United States Patent Application Publication US 2023/0026259 A1 - sequence listing, part 50

SEQ ID NO: 142738 - DNA, 4272 bp, Homo sapiens
  Payload ID: 8203
  Gene Symbol: INO80
  Gene Name: INO80 complex subunit
  ENST ID: ENST00000616814
  CDS Start-End: 3694-4272
agcgagctaggagcgtccacgcccaacgcagtcaccgtcccacggcctcagagagcgaaccgcggctccaccgtcggcggggcgacccccccctccggaccccgcccgcaccccgccccccctccgccgccgtcgcggcggcggggccaggcggcccgagccgtgcagtcggaggtccttgtgcatgaagacagatttgttctatggcctcggagttgggtgccagggatgatggaggctgcactgagctggcaaagcccctctatcttcagtacttggagagggccctccggttggaccattttctgcgacaaacgtcagctatcttcaataggaatatttctagtgatgacagtgaagatggactggatgacagtaatccattattgccccagtctggggatcccttaatacaagttaaggaagaacctccaaattcattgcttggtgaaacttctggagcaggcagttctggaatgttaaacacatattctctgaatggagttctacagtcagaatcaaaatgtgataaggggaatttatataatttctctaagctgaagaaaagcagaaagtggctaaagagcattctgctaagtgatgaatccagcgaggctgattctcagagtgaagacgatgatgaagaagaactcaatctcagcagagaagaacttcacaacatgcttcgactacacaaatataagaaacttcaccaaaataagtatagtaaagacaaggagttgcagcaatatcagtactacagtgcaggcctgctctccacatatgaccctttctatgagcaacaacggcacctacttggacccaagaaaaagaaatttaaggaggaaaagaaacttaaagctaagttgaaaaaagtgaagaaaaaaagacgaagagatgaagaactttcctctgaagaatcccctcgtcgccatcaccaccagaccaaagtctttgccaagttttctcacgatgcacctccccctggcactaagaaaaagcacttatccattgagcagctgaatgctcgtcgcaggaaagtatggctcagcattgtgaaaaaggaactaccaaaggcaaataagcagaaagcttcagctcgtaacctgtttctcaccaatagccgaaagcttgctcaccagtgcatgaaggaggtgcgtcgagctgccttgcaggcccagaagaactgtaaggaaaccttgcctcgtgcccgccgcctcaccaaggagatgcttctgtactggaagaaatatgagaaagtagagaaggagcaccgcaagagagcagagaaggaagctttggagcagcggaagttggatgaggaaatgcgggaggccaagaggcaacagcgaaaactcaacttcttaattacccagacagagttgtatgcccatttcatgagtcgcaaacgagatatgggtcatgatggtatccaggaagaaatcctaaggaaactggaagacagttctacccagagacaaatcgatataggtggaggagtggtagttaacatcacacaggaggattatgatagtaaccattttaaagcccaggccctgaagaatgctgaaaatgcttaccatattcaccaagctcggacaaggtcatttgatgaagatgcaaaagaaagtcgagcagctgccctacgggcagcaaacaagtctggcactgggtttggggagagttatagcctggctaacccatctatccgggctggtgaggatattccacagcccacaatttttaatggcaaattgaaaggttatcaactgaaaggcatgaattggttggccaatctatatgaacagggtattaatggcattcttgctgatgaaatgggccttggtaaaacagtacagagcattgcccttctggcccatctggctgagagagagaacatttggggacctttcttaataatttcacctgcgtctacacttaacaattggcaccaggagtttactagatttgttcctaaatttaaggtgctaccatattggggaaatcctcatgatagaaaagtcatcagaaggttctggagtcagaagaccctctacactcaggatgcccccttccatgtggttattaccagctatcagctggtggtgcaggatgtaaagtatttccagcgggtcaagtggcaatacatggtactggatgaggctcaggcgctcaagagtagttccagtgttcgttggaagatcctcttacagttccagtgtcggaatcggcttttgctaaccgggaccccaattcagaacaccatggcagagctttgggctctgctgcatttcattatgccaacattatttgattcacatgaggaatttaatgaatggttttccaaggacattgagagccatgccgaaaacaaatctgctattgatgagaatcaactttctcgcttacacatgattttgaagccatttatgctgaggagaatcaagaaagatgtggaaaatgaattatctgacaagattgagattctaatgtattgccaactgaccagccgacagaagctgctatatcaggcactaaagaacaaaatttccattgaggatttattgcagtcttctatgggctctacccaacaagcacagaacaccaccagcagcctcatgaatctggtcatgcagtttaggaaggtgtgtaatcacccggagttatttgaacggcaagaaacttggtctccatttcatatttccctaaagccataccacatttcaaagtttatctaccgtcatggacagatcagggtcttcaatcattcacgagacaggtggttaagggttctttctccatttgcaccagactatatccaacggtctctctttcacagaaaaggtattaatgaagaaagctgtttctctttccttcgctttattgatatatctccagcagaaatggcaaaccttatgcttcagggacttttggccagatggttagctcttttcctgtctctgaaagcctcctacaggctccatcagctacgctcctggggagcgccagaaggggagagccaccagagatacctgaggaacaaggatttccttcttggggttaattttccactctcctttccaaacctttgcagctgccctttgttaaagtctcttgttttcagcagccactgtaaagcagtgagtggctactcagaccaggttgtccatcagcggagatcagctacctcctcgctgcgtcgctgcctgctcactgagctgccatcttttttgtgtgtggccagtccacgagttaccgcagtgccattggattcttactgcaatgaccgaagtgcagaatatgaaaggcgagttctgaaggaaggagggagtctggcagccaagcagtgtttgttgaatggggcccctgaactggctgcagactggctaaatagacgatcacagttcttcccagagccagctggaggtctgtggagcatcagacctcagaatggctggtctttcatcaggattccaggaatacatggtttacaggaagcatacctacatgaggcttgatggctcatccaagatctcggagaggcgagacatggttgctgattttcagaacaggaatgacatctttgtgttcctgttaagcacacgagctggaggactgggtatcaatctcactgctgcagacacagtgattttctatgatagcgactggaaccccactgtggaccagcaggccatggacagggcccaccgcttagggcagacaaagcaggttactgtgtaccggctcatctgtaaaggcaccattgaagaacgcattctgcaaagagccaaggagaagagtgagattcagcggatggtgatttcaggtgggaacttcaaaccagataccttgaaacccaaagaggtggttagtcttcttctagacgacgaagagttggagaagaaactgaggctgcggcaggaagagaaacggcaacaggaggaaaccaaccgagtgaaagagcgcaagcggaagcgggaaaagtatgcagagaagaagaaaaaagaagatgaattggatgggaaaaggagaaaagagggtgtgaacctggtgatcccatttgttccctcggctgataactccaacctctctgctgacggagatgactccttcattagcgtggactcagccatgccaagccctttcagtgagatctccatcagcagtgagctgcacactggctccattcccctggacgagagcagcagcctagccccagactctctggtccggaaacagggcaaaggcaccaacccctctggaggacggtaa

SEQ ID NO: 142739 - DNA, 1261 bp, Homo sapiens
  Payload ID: 8204
  Gene Symbol: INO80B
  Gene Name: INO80 complex subunit B
  Uniprot ID: Q9C086
  ENST ID: ENST00000233331
  CDS Start-End: 95-1165
ggttgttttgctggctccagtttttccgcggggcggaaaaggcgtgtctgcgtgtgtcccaaccatttctagtcccctttcctcgcaggacctcatgagtaagctgtggcggcgtgggagcacctctggggctatggaggcccctgagccgggagaagccctggagttgagcctggcgggtgcccatggccatggagtgcacaagaaaaaacacaagaagcacaagaagaaacacaagaagaaacaccatcaggaagaagacgccgggcccacgcagccgtcccctgccaagcctcagctcaaactcaaaatcaagcttgggggacaagtcctggggaccaagagtgttcctaccttcactgtgatcccagaggggcctcgctcaccctctccccttatggttgtggataatgaagaggaacctatggaaggagtcccccttgagcagtaccgtgcctggctggatgaagacagtaatctctctccctctccacttcgggacctatcaggagggttagggggtcaggaggaagaggaggaacagaggtggctggatgccctggagaagggggagctggatgacaatggagacctcaagaaggagatcaatgagcggctgcttactgctcgacagcgagctctgctccagaaggcgcggagtcaaccttcccctatgctgccgctgcctgtagctgagggctgcccacctcccgccctcacagaggagatgctgctgaagcgcgaggagcgggcgcggaagcggcggctccaggcggcgcggcgggcagaagagcacaagaaccagactatcgagcgcctcaccaagactgcggcgaccagtgggcggggaggccgggggggcgcacggggcgagcggcggggagggcgggctgcggctccggcccccatggtgcgctactgcagcggagcacagggttccaccctttccttcccacctggcgtccccgcccccacggcagtgtctcagcggccatccccctcaggcccgccgccgcgctgctctgtccccggctgtccccatccgcgccgctacgcttgctcccgcacaggccaggcactctgtagtcttcagtgctaccgcatcaacctgcagatgcggctgggggggcccgagggtcctggatccccccttttggctacgtaaggcccttaacccggactctgcgccccgtcccatgcccgctcttgagtatcttccccaccctattaaattacatccggtgcttcggcttgtacagaa

SEQ ID NO: 142740 - DNA, 623 bp, Homo sapiens
  Payload ID: 8204
  Gene Symbol: INO80B
  Gene Name: INO80 complex subunit B
  ENST ID: ENST00000409493
  CDS Start-End: 2-623
catgagtaagctgtggcggcgtgggagcacctctggggctatggaggcccctgagccgggctttccttccacaggagaagccctggagttgagcctggcgggtgcccatggccatggagtgcacaagaaaaaacacaagaagcacaagaagaaacacaagaagaaacaccatcaggaagaagacgccgggcccacgcagccgtcccctgccaagcctcagctcaaactcaaaatcaagcttgggggacaagtcctggggaccaagagtgttcctaccttcactgtgatcccagaggggcctcgctcaccctctccccttatggttgtggataatgaagaggaacctatggaaggagtcccccttgagcagtaccgtgcctggctggatgaagacagtaatctctctccctctccacttcgggacctatcaggagggttagggggtcaggaggaagaggaggaacagaggtggctggatgccctggagaagggggagctggatgacaatggagacctcaagaaggagatcaatgagcggctgcttactgctcgacagcgagctctgctccagaaggcgcggagtcaaccttcccctatgctgccgctgcctgtagctgagggct

SEQ ID NO: 142741 - DNA, 796 bp, Homo sapiens
  Payload ID: 8204
  Gene Symbol: INO80B
  Gene Name: INO80 complex subunit B
  ENST ID: ENST00000409917
  CDS Start-End: 16-570
tcctcgcaggacctcatgagtaagctgtggcggcgtgggagcacctctggggctatggaggcccctgagccgggagaagccctggagttgagcctggcgggtgcccatggccatggagtgcacaagaaaaaacacaagaagcacaagaagaaacacaagaagaaacaccatcaggaagaagacgccgggcccacgcagccgtcccctgccaagcctcagctcaaactcaaaatcaagcttgggggacaagtcctggggaccaagagtgttcctaccttcactgtgatcccagaggggcctcgctcaccctctccccttatggttgtggataatgaagaggaacctatggaaggagtcccccttgagcagtaccgtgcctggctggatgaagacagtaatctctctccctctccacttcgggacctatcaggagggttagggggtcaggaggaagaggaggaacagaggtggctggatgccctggagaagggggagctggatgacaatggagacctcaagaaggagatcaatgagcggctgcttactgctcgacagaggagatgctgctgaagcgcgaggagcgggcgcggaagcggcggctccaggcggcgcggcgggcagaagagcacaagaaccagactatcgagcgcctcaccaagactgcggcgaccagtgggcggggaggccgggggggcgcacggggcgagcggcggggagggcgggctgcggctccggcccccatggtgcgctactgcagcggagcacagggttccaccctttccttcccacctggcgt

SEQ ID NO: 142742 - DNA, 559 bp, Homo sapiens
  Payload ID: 8204
  Gene Symbol: INO80B
  Gene Name: INO80 complex subunit B
  ENST ID: ENST00000431187
  CDS Start-End: 31-559
atttctagtcccctttcctcgcaggacctcatgagtaagctgtggcggcgtgggagcacctctggggctatggaggcccctgagccgggagaagccctggagttgagcctggcgggtgcccatggccatggagtgcacaagaaaaaacacaagaagcacaagaagaaacacaagaagaaacaccatcaggaagaagacgccgggcccacgcagccgtcccctgccaagcctcagctcaaactcaaaatcaagcttgggggacaagtcctggggaccaagagtgttcctaccttcactgtgatcccagaggggcctcgctcaccctctccccttatggttgtggataatgaagaggaacctatggaaggagtcccccttgagcagtaccgtgcctggctgggagggttagggggtcaggaggaagaggaggaacagaggtggctggatgccctggagaagggggagctggatgacaatggagacctcaagaaggagatcaatgagcggctgcttactgctcgacagcgagctctgctccagaaggcgcggagtcaacctt

SEQ ID NO: 142743 - DNA, 617 bp, Homo sapiens
  Payload ID: 8204
  Gene Symbol: INO80B
  Gene Name: INO80 complex subunit B
  ENST ID: ENST00000455562
  CDS Start-End: 1-294
aagaaacaccatcaggaagaagacgccgggcccacgcagccgtcccctgccaagcctcagctcaaactcaaaatcaagcttgggggacaagtcctggggaccaagagtgttcctaccttcactgtgatcccagaggggcctcgctcaccctctccccttatggttgtggataatgaagaggaacctatggaaggagtcccccttgagcagtaccgtgcctggctgggtgaggatctggagatgaagacagtaatctctctccctctccacttcgggacctatcaggagggttagggggtcaggaggaagaggaggaacagaggtggctggatgccctggagaagggggagctggatgacaatggagacctcaagaaggagatcaatgagcggctgcttactgctcgacagcgagctctgctccagaaggcgcggagtcaaccttcccctatgctgccgctgcctgtagctgagggctgcccacctcccgccctcacagaggagatgctgctgaagcgcgaggagcgggcgcggaagcggcggctccaggcggcgcggcgggcagaagagcacaagaaccagactatcgagcgcctcaccaagactgcggcgaccagt

SEQ ID NO: 142744 - DNA, 974 bp, Homo sapiens
  Payload ID: 8205
  Gene Symbol: INO80C
  Gene Name: INO80 complex subunit C
  Uniprot ID: Q6PI98
  ENST ID: ENST00000334598
  CDS Start-End: 118-696
acagcttggagtccaggccgggttttcaagcatcaagacggaagtaacagcggaaaggaagttccaaggcccgcgctgggaaaaaggtggggggaccaggggaagactcggagtgcgatggcggcgcaaattccaattgtggccaccacttccactcccggaatagtccggaacagcaagaagaggccggccagcccttcccacaatggcagcagcggcgggggctatggcgccagtaagaagaaaaaagcgtccgcttccagctttgcgcagggtatcagcatggaagccatgagtgagaataaaatggtgccctctgagtttagcacaggacctgtggaaaaagctgccaaacctttgccatttaaggatcccaactttgtgcactctggccacggtggcgcagtagctggcaagaagaacagaacctggaagaacctgaaacaaatcctcgcttctgaaagggcattgccgtggcaactgaacgatcctaactacttcagtattgatgctcctccatcctttaagccagctaagaagtattctgatgtttcaggtctgcttgccaactacacagacccccagagcaaactgcggttcagcaccattgaagagttttcctacattcggaggctgccctctgacgtcgtcaccggctacctggccctgaggaaggccacgagcatcgttccctgagccccagaaagggagatgaagtggaaagctgtttcaaaaacagactctggactcatgattttgtttcacggaaacaaactcgttctgctgtcaatctgaaaatgccagtgctgtgccttggaaagaatgtttggctttaatttaagggttttttttttttttagtgtgtgttttccctccaagtgtgatatttcctgctgaattaaattatacttcagttgttgcctcaagtaaaggtgtttgacaagaagatacaataaaaccatacttttcattta

SEQ ID NO: 142745 - DNA, 904 bp, Homo sapiens
  Payload ID: 8205
  Gene Symbol: INO80C
  Gene Name: INO80 complex subunit C
  Uniprot ID: Q6PI98
  ENST ID: ENST00000441607
  CDS Start-End: 70-756
agcggaaaggaagttccaaggcccgcgctgggaaaaaggtggggggaccaggggaagactcggagtgcgatggcggcgcaaattccaattgtggccaccacttccactcccggaatagtccggaacagcaagaagaggccggccagcccttcccacaatggcagcagcggcgggggctatggcgccagtaagaagaaaaaagcgtccgcttccagctttgcgcagacgtgcctttcgccttccaccatgattgtgaggcctccccagccacgtggaactacgtgcctcttgccttccgccatgattgtgaggcctccccagccgcgtggaaatggtatcagcatggaagccatgagtgagaataaaatggtgccctctgagtttagcacaggacctgtggaaaaagctgccaaacctttgccatttaaggatcccaactttgtgcactctggccacggtggcgcagtagctggcaagaagaacagaacctggaagaacctgaaacaaatcctcgcttctgaaagggcattgccgtggcaactgaacgatcctaactacttcagtattgatgctcctccatcctttaagccagctaagaagtattctgatgtttcaggtctgcttgccaactacacagacccccagagcaaactgcggttcagcaccattgaagagttttcctacattcggaggctgccctctgacgtcgtcaccggctacctggccctgaggaaggccacgagcatcgttccctgagccccagaaagggagatgaagtggaaagctgtttcaaaaacagactctggactcatgattttgtttcacggaaacaaactcgttctgctgtcaatctgaaaatgccagtgctgtgccttggaaagaatgtttggctttaatttaaggg

SEQ ID NO: 142746 - DNA, 594 bp, Homo sapiens
  Payload ID: 8205
  Gene Symbol: INO80C
  Gene Name: INO80 complex subunit C
  ENST ID: ENST00000586489
  CDS Start-End: 154-567
agggcgcgtgcgtaatgtggggcgctgcgcgtgcggtctccgttggggttgaaagacgctgccccgcggagtgaatgactactctttcccttcgtttggacacatgggcttacaacgccttgtgttgtaaggagagaagaagaaggtatcagcatggaagccatgagtgagaataaaatggtgccctctgagtttagcacaggacctgtggaaaaagctgccaaacctttgccatttaaggatcccaactttgtgcactctggccacggtggcgcagtagctggcaagaagaacagaacctggaagaacctgaaacaaatcctcgcttctgaaagggcattgccgtggcaactgaacgatcctaactacttcagtattgatgctcctccatcctttaagccagctaagaagtattctgatgtttcaggtctgcttgccaactacacagacccccagagcaaactgcggttcagcaccattgaagagttttcctacattcggaggctgccctctgacgtcgtcaccggctacctggccctgaggaaggccacgagcatcgttccctgagccccagaaagggagatgaagtggaaa

SEQ ID NO: 142747 - DNA, 3245 bp, Homo sapiens
  Payload ID: 8205
  Gene Symbol: INO80C
  Gene Name: INO80 complex subunit C
  Uniprot ID: Q6PI98
  ENST ID: ENST00000592173
  CDS Start-End: 60-653
aagttccaaggcccgcgctgggaaaaaggtggggggaccaggggaagactcggagtgcgatggcggcgcaaattccaattgtggccaccacttccactcccggaatagtccggaacagcaagaagaggccggccagcccttcccacaatggcagcagcggcgggggctatggcgccagtaagaagaaaaaagcgtccgcttccagctttgcgcagggtatcagcatggaagccatgagtgagaataaaatggtgccctctgagtttagcacaggacctgtggaaaaagctgccaaacctttgccatttaaggatcccaactttgtgcactctggccacggtggcgcagtagctggcaagaagaacagaacctggaagaacctgaaacaaatcctcgcttctgaaagggcattgccgtggcaactgaacgatcctaactacttcagtattgatgctcctccatcctttaagccagctaagaagtattctgatgtttcaggtctgcttgaaccaccaaactgttttccacagaggctgcatcaattgacattcccactagcaatggatgagggttccaatttttccagatgctcaccaacacttgttaattttggttttgttttcattatggccattctggtgggtgtaaagtagcatctcattgtggcttgactgaatttctctaatgagtaatgatgttgagcatttttcatgtgcttattggctatttgtatatctttgttggagaaatatctgttcaagttctttggccattttaaaattgggttgtctttttgttgttgaattgtaaagttctttagatattctgaatactagatccttattaaatatatgatttgaaaatatttttcccattttgaatgttgtcttttcattttttggatagtgtcttttggtgcaccaaacttcaaaaattttttcgaagtccagtttatcaattttttattttgttgcctgtgcttttggtgtcatatccaataagtcattgccaaatccaatgtcacaaatatatttttgctgctttcttgtaagagttatacagttttagctcatatgtttaggtctttgatgcattttgagttaatttttgtatgtagtgtaggataagggtctaacttcattcctttgcatgtaaatattccatttttctggcaccatttgttgtaggaactgtcatttccccattaaatgatttggcatccttgtcagaaatcaattgtccatacatgtgagggtttatttctgggctcccaattctattccattggtctatacatctgttcccatgccagtaccacactgtttgattaatgtcgatttttagtaagttttgaaatcaggaagtgtgaatcctccaactttgttcttttcaagatcattttggttatatgggttaccttaagattccatttgaattttcggatgggtttttctatttttgtaaaaaatatcattgggattttgataggaattgcactgaatctgtagatcgctttgggtagtactatcatattaacaatattaagtcttccaagccataaacatggactgtctttccatttatttagattttctttaatttctttcagcaatgttttgcagtattcagtgtacaagtcttttgcctcctttgttaaatttattcctaaggatgctattctttctgatgctagtaaaatagttttcctaatttcattttcagatcatgcataaccaccaccataaacatgattccaacaccccagagtattccctcagtctgaccttttgtaaagtggtgctttttaaaatttaattttccaattgcttgttgctagtgtatagaaatacgactgatacttttatattggccttgtatcctgagaccctgtaaattcacttattagttctagacagttttaattctttctttccaatctttatgcctattatttctgttttgttttgttttttaaacagggtttggctctgtcacccaggctggagtgcagtggcttgattccaactcactgcaccctcgacctcctgggctcaagtcatcctcccacctcagccttccaagtagctgggactacaagcatgagccaccacacccagctaattttttttcttttctttttctttttttttttttttggagggtgcagggagcagagtcttgctctgttgcccaggctggtctcaaattcctgagctcaagtaattcatacaccttggcctcccaaagtgctaggattacaggcatgagtcaccttgcctgactattacttctttttttgagacagtcttgctctgttgccaggctggagtgcagtggcatgatctcggctcactgcaacctccgcctcatgggttcaagcgattctcctgcctcagcctcccaggtagctgggactacagatgcatgccaccacaccaagctaatttttagatttttagtagagatggggtttcaccatgttggccaggatggtctcgatctcttgacctcatgatccacctgcctcagcctcccaacatgctgggattacaggcgtgagccactgcacccggcctattattcctttttttgccctattgtcccagtggatagtgatgtccagtagagcgttgaatcaaagtggtaaaattgtgcgtccttgccttgttctccacgttaaggtgaaattttgaagatttcattattacatatgatgtaagctgtaggtttttatttatttatttatttagagacagggtcttgctctgtcacccaggctggagtacagtggcatgatccactgtagccttgacctcccagtctcaagcagtcctcccacctcagcctcccaaatagctgagaccacaggcacatgccaccataccctgctaattttttattttttgtagacatggggtcttactatcttgaccaggctggtctcaaactcatgggctcaaatcatcctcctgcctcagcctcccaaagtgctgggattacaggcatgagccactgcacctggcctaactgtgggctttttttgaaatgtctttttcaggttgaggaaggtcccttctattcctagtgtactgagagtttgtatcatgaaaaggtattgaattttgtcaaatgttgttcctgtgtctattgagatggctgtatgggttttctcttttttctgataatgtgatgaattatatggatttattaatattgaaataataaaatgacactgcattcttcgg

SEQ ID NO: 142748 - DNA, 299 bp, Homo sapiens
  Payload ID: 8205
  Gene Symbol: INO80C
  Gene Name: INO80 complex subunit C
  ENST ID: ENST00000589273
  CDS Start-End: 212-299
gaaagacgctgccccgcggagtgaatgactactctttcccttcgtttggacacatgggcttacaacgccttgtgttgtaaggagagaagaagaataagatttacacagagtacaatgcacaaattttcaagaatactggctgaaccacagatcttcaagaatcctgtctcacgcctgtatcccagcactttgagaggccaagggtatcagcatggaagccatgagtgagaataaaatggtgccctctgagtttagcacaggacctgtggaaaaagctgccaaacctttgccatttaagg

SEQ ID NO: 142749 - DNA, 898 bp, Homo sapiens
  Payload ID: 8205
  Gene Symbol: INO80C
  Gene Name: INO80 complex subunit C
  ENST ID: ENST00000586449
  CDS Start-End: 62-331
ggaagttccaaggcccgcgctgggaaaaaggtggggggaccaggggaagactcggagtgcgatggcggcgcaaattccaattgtggccaccacttccactcccggaatagtccggaacagcaagaagaggccggccagcccttcccacaatggcagcagcggcgggggctatggcgccagtaagaagaaaaaagcgtccgcttccagctttgcgcagacgtgcctttcgccttccaccatgattgtgaggcctccccagccacgtggaactgctcattggtggaagggacttgccttgtctcggatgagactttggactgtggacttttgagttaatgctgaaatgagttaagactttgagggactgctgggaaggcatgattgattttaacatgtgaggacatgagatttgggaggggccgggggcggaatgatagtttggctgtgccctcacccaaatctcatcttgaattgtagctcccaaaattcccacatgttgtgggaggaacccggtgggatataattgaatcatgggggcagtttcccccatgctgttctcatggtagtgaataactctcaggaaatctgatggttttataaggggaaacccctttcacttggctttcattctctctcttgcctgctgccacgtaagacgtgcctcttgccttccgccatgattgtgaggcctccccagccgcgtggaaatggtatcagcatggaagccatgagtgagaataaaatggtgccctctgagtttagcacaggacctgtggaaaaagctgccaaacctttgccatttaaggatcccaactttcactctggccacggtggcgcagtagctggcaagaagaacagaacctggaagaacctgaaacaaatcctcgcttctgaaagg

SEQ ID NO: 142750 - DNA, 382 bp, Homo sapiens
  Payload ID: 8205
  Gene Symbol: INO80C
  Gene Name: INO80 complex subunit C
  ENST ID: ENST00000587450
  CDS Start-End: 87-382
atcaagacggaagtaacagcggaaaggaagttccaaggcccgcgctgggaaaaaggtggggggaccaggggaagactcggagtgcgatggcggcgcaaattccaattgtggccaccacttccactcccggaatagtccggaacagcaagaagaggccggccagcccttcccacaatggcagcagcggcgggggctatggcgccagtaagaagaaaaaagcgtccgcttccagctttgcgcagacttcagtattgatgctcctccatcctttaagccagctaagaagtattctgatgtttcaggtctgcttgccaactacacagacccccagagcaaactgcggttcagcaccattgaagagttttcctacattcggaggctg

SEQ ID NO: 142751 - DNA, 595 bp, Homo sapiens
  Payload ID: 8205
  Gene Symbol: INO80C
  Gene Name: INO80 complex subunit C
  ENST ID: ENST00000590757
  CDS Start-End: 31-318
tggggggaccaggggaagactcggagtgcgatggcggcgcaaattccaattgtggccaccacttccactcccggaatagtccggaacagcaagaagaggccggccagcccttcccacaatggcagcagcggcgggggctatggcgccagtaagaagaaaaaagcgtccgcttccagctttgcgcaggccaactacacagacccccagagcaaactgcggttcagcaccattgaagagttttcctacattcggaggctgccctctgacgtcgtcaccggctacctggccctgaggaaggccacgagcatcgttccctgagccccagaaagggagatgaagtggaaagctgtttcaaaaacagactctggactcatgattttgtttcacggaaacaaactcgttctgctgtcaatctgaaaatgccagtgctgtgccttggaaagaatgtttggctttaatttaagggttttttttttttttagtgtgtgttttccctccaagtgtgatatttcctgctgaattaaattatacttcagttgttgcctcaagtaaaggtgtttgacaagaagatacaataaaaccatacttttcattt

SEQ ID NO: 142752 - DNA, 408 bp, Homo sapiens
  Payload ID: 8205
  Gene Symbol: INO80C
  Gene Name: INO80 complex subunit C
  ENST ID: ENST00000591139
  CDS Start-End: 1-408
tcattctctctcttgcctgctgccacgtaagacgtgcctcttgccttccgccatgattgtgaggcctccccagccgcgtggaaatggtatcagcatggaagccatgagtgagaataaaatggtgccctctgagtttagcacaggacctgtggaaaaagctgccaaacctttgccatttaaggatcccaactttgtgcactctggccacggtggcgcagtagctggcaagaagaacagaacctggaagaacctgaaacaaatcctcgcttctgaaagggcattgccgtggcaactgaacgatcctaactacttcagtattgatgctcctccatcctttaagccagctaagaagtattctgatgtttcaggtctgcttgccaactacacagacccccagagcaaactgcg

SEQ ID NO: 142753 - DNA, 14136 bp, Homo sapiens
  Payload ID: 8206
  Gene Symbol: INO80D
  Gene Name: INO80 complex subunit D
  Uniprot ID: Q53TQ3
  ENST ID: ENST00000403263
  CDS Start-End: 406-3489
ctcttcttgtacagccccggcagccctgccttcttggctggagagtatattcagggatttccccttaataatcaccgaccctgggagcactttttagtttccaaaataaaaatatgatcctcacccctcttgcttgacagggaaaggctctcgccggagcccaggggggagcagtagcagcggcagccgagcttcctagtccattgccagcgcctctcactctgatctgtcagcccagccgagggaacaggggggaaggagaaaaaaaaaagcagctgaaagacaatctgcttcatcctgattctgcggcattccaaactgtggtatccttgggggttctcttaacattgctatggtgcagaagatttaaaatcagctgatgttcacaaggaatagagtcacgtgatgtatgaagggaaacatatacacttctctgaggttgacaataagcccttgtgctcatatagccccaaactgtgcaagcagaggcgactcaacggctacgccttctgtatcagacacgttctggaggacaagactgcccccttcaagcaatgtgaatatgtggccaagtataacagccaacgctgcaccaaccccatccccaaatcagaggatcgtaggtactgcaacagccacttgcaggtacttggctttatcccgaaaaaagagaggaagaaaaagaatgatcctatagatgaggtgaaggtcaggcaccagatggataccatggcctttagcctgacagtgcccacgttggccttgaagatgcccaacggactggatggaatgtccctctctccacctggggcaagggtccctctccactacctggaaaccgaattggaagacccatttgctttcaatgaggaagatgatgacctaaagaaaggggcaactgtgagaaagaagttgcagagcaagttggcccagaatcggcagcgccagagagagacagagattttaaaagttcgacaagagcactttagtccccctcctgcaccttcacagcagcagcctccgcagcagcactcccacctgtcacctttatctacttctttaaaacctccagcgccaccgcagggttcagtctgcaagtcacctcaacctcagaacaccagcctaccaatgcagggagtggcacccaccacacacactatagcacaagcacggcagttgtctcacaagaggcctctgcccctcctgccatccagtagggctcccactgtggacccacccaggactgaccggatcctcatgaaagccacagccttctctccacacttctcatgtataagccgactgcagagactggtgaaactgtgcacccagaaacatcagttggacactgatctgtttccccatttaggtttggactggtctgaagagagcggagaggaaccagaggactcagagcaggcctcgccctaccaggttgcatggtccatccgggaaaccctcagatatcaaagacatgcgtcagatgatgatgatgcggagagtaggagctccagggtgactcaactttgcacttactttcagcagaaatataagcacctctgccgcctggagcgggcagaatctcgtcaaaagaaatgccggcatacgtttaggaaagctttgctgcaggcggccagtaaagaaccagaatgcactggtcagttaatacaagaactgcggagagctgcatgcagtcgaaccagcataagccggaccaagctgagggaggtggaaccagcagcatgcagtggaaccgtgaagggtgaacagtgcgctaacaaagcccttccattcaccagacattgtttccaacatatcctcttgaaccactctcagcagctcttctcaagttgcacagccaagtttgcagatggacagcagtgctctgtgccagtttttgacattacacatcagacacctctgtgtgaagaacatgccaaaaaaatggataatttcttgagaggagataactcccgtaaagttcagcaccagcagcagaggaaacccaggaaaaaaaccaagcctcctgcactaaccaaaaaacacaagaagaagagaaggcgtggacctcgtcgaccccaaaaacccattccacctgcagtcccccaagggaacctcagcatgcccgccagcgtctcactgccagtggaggcctctcacatccggagcccatccacgccagagctgagtgctgatgagttgccggatgacattgccaatgagatcactgacattccacatgacttggaattgaaccaggaggacttttcagatgtcctgccacggctacctgatgacttacaagattttgatttttttgaagggaagaatggagacctcctcccaactaccgaagaggctgaggagcttgaacgggccttgcaggctgtaacttctctcgagtgcctgagtaccattggggtccttgcccagtcagatggtgtgccagtccaggagttgtcagatagaggaataggggtgttctccacaggtactggagcttcaggaatacaatccttgagccgagaggtgaacacagacctaggggagctattgaatgggcgtatagtacatgataatttttctagtctagagctggatgagaacctgctccgttctgctaccttgtcaaacccacctacacccctggcagggcagatccaggggcagttctctgccccagccaacgttggccttacttctgccactctgatcagccagagtgcacttggggagagagccttcccaggacagtttcatggacttcatgacggcagccatgcctcccagaggccacatcctgcccagctgctgagcaaggcagatgacctaatcacctcacgacagcaatacagcagtgatcactcacactcctcaccccatggaagccattatgatagtgagcatgtgccgtctccctacagtgaccatatcacctctccccacacaacatcgtactctggtgataatatggcagctaccttttcagcagagatgcccatcatggcgcagcacttgctcccaacccaacttgaggtgccacttggaggcgtggtaaaccccagaactcactggggcaatctccctgtcaaccttggagacccctctccatttagcaaccttctcggcgcagatggacatcttctttccacttccctatccacgccacccaccacttcgaactcagagaccacacagcctgccttcgccaccgtgacccccagcagctccagtgtgcttccggggttaccacagaccagcttcagtggcatggggccttctgctgaactaatggcctccacctctcccaagcagcaactccctcagttcagcgcagcctttggccaccagctgagttctcacagtggcattcctaaggacctgcagcccagccacagctctatagcccctcctacaggcttcacagtaacaggtgccacagctacaagtaccaataatgcatcttctccctttccctcccctaactgagggtgtctgtgtgtttgcaggcaggtggggaacccagtgttttctatctttgtttcctctttagcacccctctccccttttcctaaagaagatataacagatggggatcagaggggcaccccccttcccagttcaatgagtggccctgcagtggacctcgctacagtgttcacatgtgctccttagcactggtgctcattccctcctggcaggcccactccgccccagtggtttccttagtggttcagcacagtgactggataggattgatttttagcagcaagtcctagaagtggaagatacctcagaataccagtgccctttactatttcctagtattcagatcagtgctttccattctgttgccaggtttttacataggtggttctagatagaatgatcttattaattgagttcctgtataagagacagcaaatggtgtgtggcaggtcaagattctgacctagcaccaactgctaaacaccacagtgaggccaggattccattcgtaattgtgatcatgtttaactaaaagaaaaaaatgtgtcttttgactgcctgtgagtatgcgtgtgcccacgcgtgtgtttttgtgcagtgcaggaagcagctgtcccattagtttgatttttttttgttctccccttccccctacttaatgagtataaaactcttacttttctcctgtcctacatctcacagtcctaataaggttggtccttcttttcctcaagtttcctgaatagggagggtggtggactggtcgtgtgagtagcacaacctttttctgctaaaagttagcccaagaagaaacagaacatagaaagcttggattcccgtcagtgaggtagggatgtcctaaaaagcttgcctgggatgactgcaggctgccggggttctggggcctgatggtcactttgtcttttcagacatttgtttgtttctaaatccctctctcatggaatacatttgcaagatgtaattaaagaaaatattttgatgtgaaaaagcaggataggtcagatagatttgaaaagatgggatctgtcaactccttgatccatcttttgcttttgaatttttcatgtttacagtagtgattctttggtaagatttgtaaaatgttaagacacttgtagaatcagtgtaccagttgtgaagtgatgtgtaatatctgaaggatacacattttaaagtttctttcaaagcagaatatggaaattagatataaattttattcgccctttggtccttttaaaataattcaagtacttgggtttaagtaaatttgaaaatagctttgggaaatgtttttaaaatgccaggattttaggggttaaagatcatatggggtagtttaggaagtttgtgactatgagatgaatttgtgaggtttcttgcctaccttttttcccccccagagaagggtggaactagattttaaaggcatctctactctgcttttgctgagtagtttcactgtcccttgagataccattggctatttatacctgagtctagtctaattcacatatatatatattttaaaagttgagagaacatacctattgatgtggttcaataattcatttgtcagggaatatttgatcttaattcctttctaataggtagtgattggatgtattttcctacttcctgtatgtaatctctttatgccatgctagttctaaccagtcccttcttttgaaagcttttctttctctgctttttaaaggaatgatggtgatcagcaggcattatgcagataccacgtgcctgaggttatggaggggaaatgtcacatgactgtatgaaatcattatatgccctattttgtatttattgatgtttctttttgtgggccaaaaatatgtttgtaatatatttagtttttttaaaatcatggtaattgattggaagatttatttttaatagctttgccttttttgcagagtgcaaaatttctaaattataacttatgtcataaagcaaaattatatttggtatcaccataaatttctattctgaatggtgagaacagataatttgaatatttctcacctgtgagtctatattagtaagcttttttattttaatgtactgtaatgaagtggtcacgagtagttacctcggctcaaaaatgtcatttagtttgttaaactattttcacaaccatcataagcataactagataactgtccattcccagcagttcagtttagtctccattgtgtatttaaaggttgtcgcagagcagcacattgacttcctcatcagccctttgacaaggaagggaaagtcgtgggtagtcgatttgaactttttctgtctacttgtcccctcatgttagctgcttgaaattcttcagttatgatacaaagctgagtttgcagtaagttgcacattttattgtttgcaattttctgttttatgtgcatttaaaagcccttctctgctttctagtaaggaggcatgaaattatcaggaatgttgctagttacagcttcacaccaaaaactttgagtaaatacattttcgtttggatgcccatgatgaaagctgaggaaagtggttgaggaattatcaacaacaaacttttcctcttattttatctagttcaaaacagatatcaaagtttgcaatttgctttgctcttgctgtttcttatgagtccctttttggaagagaggagaacatctataagcccagagagatctgtgtttttcttttacttaatagagccattctcgtctattagtaggaactttgctattaatatgtatagaaaggaatgaagtggcttttactccagaaatatgaaaattagtatcttttaaaatagcacttatgctatcacaaggcaatactggaatgaaaaacaaatcttatataaggtcctaaataggtagaaactagcttttattctagtgttgaacccaggagaaatagtggcaaagaagtttcactctgtttctgcagttctttgggactatttataaaggccagttagattgtgttactgtgatttaatttacaaagttgctgcagttaatggatacattctgtgctctgagaatctgaattccattctaatgtgtgatattcactggctatgatcagtagtatctgaagaaaagatgggctttttctcctttactctctctacataattattaatattattttaattaaagtacttaagacattgttttttcttctgtaaaaatggcttagcaatttgcacatctgggtaggttatgtagctagtaaacaactcaatagtaagtagcaattatacttaacccaccaagtgacagactatgcaatggaaaaattttctaattatcgtcacatagcttagacagcaaaggattattttctctggtgacctaccatgtgtgatataactgctttataaatgacttcctgagcaatttcatgttggcaggcagtgtggtgtgtctagtgcccctctatgagaagactataatttaatcagaaacaaatagtaggcatggggagcaagttggaaagtgaggttattattttttttccttaaaattggtgttactgtctttagtggcttgaggctaaagaaagctgatactttatctttgccaaataattatttataagatttatttttaaataagcccaatctctcacctgcagttaagaatcatcattttctgtgactgacactaaagctcttccttatcagagcttgttctcaatctgtgatcacagtccacagtggcaaagacaactctttgattaggaaggaaaccatgtttgggatgcacagaggtgccctgtccatacggttttcttcttacatgaaagaattgacctttctgttgacctataccattctgtttttataaagtgggattagaatttgagcatatctagtaaatgccgtgtggtcagtccgctgatgcttgcccgccgtctttgccgtgccttggcatcctaggggtgctggtgatggtcagtgggcatcatcggtcagcagtgcacgtgtaaggcaatctcctctcctccaggttagttcagaaggtcgctatgggttggtattgcaaaaagatgagtatatgaacactaaacttattaagaggtttgaaattcattaaaaattagttttcagtttcttcatctttcttttcagacttctttaaaaatactgttcttaatctggtatatatagaaatctaatattatggtcttctaaatggtcaacagaactctccagtttaatgaggcaatttagaggattccttgaaagaaaatttcatcatactgaacagtcctcatttgtatctcttttgttaccagtatttacattgttccaaggatttttttcctgacaaaaaatatatttctcgggagtggagagttttttatatatatatatgaaagaacatagatgtttccccccgcccaatacattaactgaatcttcactggcattctgtagaaaagttaaaacagtttaataatgtcttaacatctttatacattttcctatattctggaggaaaccagaatcatgtttagtagattaaagtaacattttaaatactacctttccaataatttgtaataaaataccagtgaaggacatgtttggatatctgttaagcatttttccctgactaatgaattaggaaagaaaacataaaacataaatgaatagttatgtctcttctaataaacagtgtcattaatgctgcagttgtgggtcaaacttagggagccttatttctaaatagcaaaaattctgttttcacttcagcccttatttttttttgttagtttttctctgcactgtgatacagagctaataagaggaaatgtgacgtttcagagagagagcaagcaaattgggtatgacttttttaccctatgttccccaatactggggatgtttggctactttgaacagcagtttttagtgatctaaagtttagatcaatactcgtataagagaaaaatctaactctcagtgagctccatagggcagcacagctttccatcttctctttcgccttcttgcgtctgcccaccacagtcccgaagaatgcacacgcacatatgatctgtacccatcccgcccgaagagtcatagaatcctcttctttcacttgtttcttttttcttcgtttgtttgtttttgtttgtttgttttttaagctggggaccactgaagtaagctctgtatgcacccaaagttccccttggaaaaattttcaacacgcagtgcagaaggctccagtgcagctaaatgccacaccattggttctacctgggggaatagactgatttgccctaaaatgactccaacctgcatcattaaggtacagttggctccagtggattagtgctgaaatgatgggaagtctgacacttgttgacattgtcttcatctgtttggaagggttgaatctgttcctctcaacagtgatagttcttttcactgtatagtattgagtatgtctcagggattccttgtggaaattagggcagtttttaaaataagaaaatagttttaaaagaaactaaaggtgactcatcattgaagagagcggaagaaagaggaaacatttggttttgtagcccacagtgtcttgcataggactttttcctttctcctccaggctctcatctcagcttcagaatacagaatcctttcccatcacgcacagctttaaaacttttatttaaaaatttccttccccaatgagctttcagaatacttattgtagattttaagagaaaaggtatattaatttatgctattaacatcacctcataaattataagttttatactaaagctgtatcgagtgtaatgaattatgttgcctatgtgtttaatagctaaatatatatgagcttttttttttttttttttttttgacaaaacaaactagtgaagcacctttttacactggatctctgccgtgtcaaggtgtatagctatcctttgctaccttgcagatatataaaataaaaggatatcctggggcctcaaaatgtagaacacctttagaccatttataactgttcctagaactgttgagaatcatgttctttagtaaatgatctgtggtttacacttaagatggctagaagcttagttacagggtacatagaaatacatagatcaagtaaaactccaactactgtagctggaatttgtaaactaagtttgtaagacctcttttatttcctatggagttattctttaatttacagtttattctgtaagttgggaagtaaaatagagaaaataataaatctagatgttctcagtgtcttattcaggaactttttatccctcctcactaaggaattcccactgtgactttaaaatagaactaaattacttgtgtgcatgtatatgtctgtattttttacacacatgcaaaaatatacattgggggcacgtgtgtgagagatatgaatgtgtgcttatataaaaatagataaaggtaaccgaatgtattgtagaaacatgatttatttagttgagggtattggagttactttctcattgtctctgttgtataaatacaccaaattaatcattatgttatcttatgttaaaaggctagctctgatatcatgtgcattttatgttaacctttggattaacttatattatgctatgttcataaaatgacatgagaaacaggaggttctaagatcagcctctcactttcgagcataaaaataagagagggagacagacagccccagacatgagctgtgtttatctattgtggtgatgggaccacagatctattgaatcttttttatgttaattatagatttctttatattcgagtaagaaaatattgttgatcatcttttcttggtgaagttaagaaaaagtataggcctttcataaacaatttttggaaggggctgctttgtttaaggagttggtgggatcatttcaccgtgcatatttcaaagctggggtgatttcatttatttccaaaatttttcaaaaaacttttactcagttctgctgttatttattaacttaagagtgctcccatccccatatttcagctataggaaaattgtgctacccctgattcatatggaattaaaaaaaaatacatccctttattttgagttttaagttgttattttgctatacatttattactggagtatctggtggtctgaaatagtcaaaagtagagttggtattaaatgttccaatgacatttatttttaatacttaaaaaatcatgtactttgaaatatgtcaaagcaacttctgataatatacctgaatttgtagttgtctcttgagcatcatttacttcatcttagatatagtgaagatctaggaaagctctatatgctgttcttttctacagttgtatttttgcagcatctcctggtttcattcactcttgttttgggatttttttttagatctgcatatttcttgtacatatgcatgcaaatgaaagaagggagtttgtactggtgccatttctcccttcagttgctggttaatgggatttgctagaaaaaattctcccggttgaagggtgaaaacagacccttatgtgtatatctgtacagagatgtgtatatgggatgtggtggcactttgctgaatgtgaacttgccttgtcaatggaaagattgaaaagtattatgtttatttatacatttgtataaatctatatatacacgtatgtatatgtgtgtgtatagataaagctatatacatatatttcccttaaaaatgtgtgtgtataataggtaaacagcctttgttaagcaagattaatgtctatggaaagttctggattattctgtaagccagaggaggtgacagtctagagtacatcatcagaacatactaaaatggaagtcctttggattatagttttgtttatggatattacacaatgaatgcttgtctgaacagttcttacttgccagttccactattcttcatcttcaccaccttctactggtcagtctttcatcacttaaaaaaaaaaaaaaaatcacacatcattgtggtttttttcccccttaattctgtctcttctagccagaagcatctggcttaagcatatttcatcaacttctctgttatttcttttaaagatctttatctctgaaattttcccagaagatacaagttttggtaatattatcaataggaattttgagacttgggcattcatctttgtctcaaaaacaaacagaaagccaaccttcaaataaaacaaatttgaaagttttagctcaataatttggggacattttacttaaattacaaaagaacataattatgattttatgatcgatattagtgttaggtttatttccacacttactgtcattaatttgtcatttacatatttttatttgctttgtagtttaatcataacttcaccatttacattttaatggaaagcatacaaggtcacatgttagcctcttgaattctgtaactaactcatttttctcatgatgaaactgctttgatgaattcctgtgtgatgaattctgctatatttccttttgacttttctcagtttgtgacattctgtattaactttgctgcagctctctagaaaacttgcatccctatatattgtgcctttaaagctcttatgcacacacagacaaaagtgtatatatacatgtcagagcatgtgtacatatgctttcgtatgtactcacacagtatgtctctagtatatattgtgggagtagatatatagatattcaaaggcaatgaaatattgctctccagatatatatgtatataaatagtgttgatataactgtatatacacatgtatatgtatgagttttaaatggcaatcttttacatttagcaaaatgctgcccctactggaatattgtcactgcagtggcagttgtatgtaatgatttaaaatacattatcaaaagttatttaaagaacatttaaagtctcatctaaagacatccacacactatttatttatcttccttttccttttattgttgtgtttttcttaactgaaagggagactgtcattttaaaaatgccatctgtcccatgagagtaagaaagagctggagattcacttgaggagctttgtgcatttttcctctctctgaagtggagatgttccacagaccagactgtttatttcacttataaagcaatcctaatatttccgttagtgtatgtcagccaccatctcctagatcaacttaattcaccaatttgcctcctcctttcattaataaataatgattattgagatcattttgcctgggggaagttaactactcccatgctgcagggaaatatatcacctaattgttattttgccttgttcaaaattcaaatttgaaagaaggcagctctctcatgaagctgtcttaagcacattttagttaagggccctcccaaactcttttttctttctttctttctttcttttttttttttttttgcgagttccaagttgcatgtgcttgaaatagatttaattcttattccccacagtttaggtatttttcattagtacatcaatttgacacactgaatgcaagactattaaggaagaacgattaaatattattttattttgtgaagagttggcagcagattacatctcaagaacttgcagagagaggaaggtagatggacaatcctaaattgtaagatgttacaaaaaacagtgaagtaagagtactcctgaagactaaaatagagaggctggggtttgagccattttactgagtagcttagctggaacctgatatcagaagtagcctttaacaaaaagcctcttggcaattgtatggtactaacaactagagtactgaagtgtaagttgaaaccaagttgcagtgggaaatcaaaggtgaggtagcttatttgaaaccagcaaatgagacaggttggacagttttaaaatctcttctaacaaagaaactgcacggtagcaaggactagcggttctcaaagcccttctttttcagtgttctcattcaccttggcacccaagtatgtttaacaggccatgcattaaaaataaatacaaaaatataaaagccgcttaaagggaacttacaaactgacaatctctcctctgtatttgtgttcatagtggctgggagtttaattatatgcacaaaagttaggagccacttgtttctgcacagactgtaggagcaagatgaggagatgggcaggttttggtaagagcccccagttctggtggacaggcatacttgtggcattgggtgcggcattgctgggaggaccacgtcttgggaggcgattgacttttggtttgtaatttccctttaaacaagaagagatggctcacattttccatatatatctcaatgaatgtactgtattactgttttaaaaatttgatgaaataataatgaattggtctccttttgttatctggtccttgtttaatttgtttaagggtttttgtatacaaaagtttacatttttatgtatatttttcttgtgtaaaaactgatgtaatatgtgtatgaaacactgtatgtattatctgtatatagtgtgacaaaatcatttttctttctttcttttggatgtattaataaatcttgctgtgaagta

SEQ ID NO: 142754 - DNA, 1664 bp, Homo sapiens
  Payload ID: 8206
  Gene Symbol: INO80D
  Gene Name: INO80 complex subunit D
  ENST ID: ENST00000424117
  CDS Start-End: 348-1664
acaatctgcttcatcctgattctgcggcattccaaactgtggtatccttgggggttctcttaacattgctatggtgcagaagatttaaaatcagccccaaactgtgcaagcagaggcgactcaacggctacgccttctgtatcagacacgttctggaggacaagactgcccccttcaagcaatgtgaatatgtggccaagtataacagccaacgctgcaccaaccccatccccaaatcagaggatcgtaggtactgcaacagccacttgcaggtacttggctttatcccgaaaaaagagaggaagaaaaagaatgatcctatagatgaggtgaaggtcaggcaccagatggataccatggcctttagcctgacagtgcccacgttggccttgaagatgcccaacggactggatggaatgtccctctctccacctggggcaagggtccctctccactacctggaaaccgaattggaagacccatttgctttcaatgaggaagatgatgacctaaagaaaggggcaactgtgagaaagaagttgcagagcaagttggcccagaatcggcagcgccagagagagacagagattttaaaagttcgacaagagcactttagtccccctcctgcaccttcacagcagcagcctccgcagcagcactcccacctgtcacctttatctacttctttaaaacctccagcgccaccgcagggttcagtctgcaagtcacctcaacctcagaacaccagcctaccaatgcagggagtggcacccaccacacacactatagcacaagcacggcagttgtctcacaagaggcctctgcccctcctgccatccagtagggctcccactgtggacccacccaggactgaccggatcctcatgaaagccacagccttctctccacacttctcatgtataagccgactgcagagactggtgaaactgtgcacccagaaacatcagttggacactgatctgtttccccatttaggtttggactggtctgaagagagcggagaggaaccagaggactcagagcaggcctcgccctaccaggttgcatggtccatccgggaaaccctcagatatcaaagacatgcgtcagatgatgatgatgcggagagtaggagctccagggtgactcaactttgcacttactttcagcagaaatataagcacctctgccgcctggagcgggcagaatctcgtcaaaagaaatgccggcatacgtttaggaaagctttgctgcaggcggccagtaaagaaccagaatgcactggtcagttaatacaagaactgcggagagctgcatgcagtcgaaccagcataagccggaccaagctgagggaggtggaaccagcagcatgcagtggaaccgtgaagggtgaacagtgcgctaacaaagcccttccattcaccagacattgtttccaacatatcctcttgaaccactctcagcagctcttctcaagttgcacagccaagtttgcagatggacagcagtgctctgtgccagtttttgacattacacatcagacacctctgtgtgaagaacatgccaaaaaaatggataatttcttgagaggagataactcccgtaaagttcagcaccagcagcagaggaaacccaggaaaaaaaccaagcctcctgcactaacc

SEQ ID NO: 142755 - DNA, 753 bp, Homo sapiens
  Payload ID: 8206
  Gene Symbol: INO80D
  Gene Name: INO80 complex subunit D
  ENST ID: ENST00000414320
  CDS Start-End: 643-753
ctggcccccctttgctctgcctccaagatggtaggaaagttgtcgtttcggagggcagaggagcagctctctggtgttatgtcctcgcagtgcctgtagtggtgctgtaggaggctgctgcctcttcttgtacagccccggcagccctgccttcttggctggagagtatattcagggatttccccttaataatcaccgaccctgggagcactttttagtttccaaaataaaaatatgatcctcacccctcttgcttgacagggaaaggctctcgccggagcccaggggggagcagtagcagcggcagccgagcttcctagtccattgccagcgcctctcactctgatctgtcagcccagccgagggaacaggggggaaggagaaaaaaaaaagcagctgaaagatcttcactctcacccaggctggagtccagaggtgtgatctcggctcactgcaacctctgtcttccgggttcaagtgattctcctgcctcagcctcccaagtggctgggattacagacaatctgcttcatcctgattctgcggcattccaaactgtggtatccttgggggttctcttaacattgctatggtgcagaagatttaaaatcagctgatgttcacaaggaatagagtcacgtgatgtatgaagggaaacatatacacttctctgaggttgacaataagcccttgtgctcatatagccccaaactgtgcaagcagaggcgactcaacggctacgccttctgtatc

SEQ ID NO: 142756 - DNA, 1489 bp, Homo sapiens
  Payload ID: 8207
  Gene Symbol: INO80E
  Gene Name: INO80 complex subunit E
  ENST ID: ENST00000304516
  CDS Start-End: 597-1214
gaccgttggcccttggccgcggaccgcgtgggccgagaactttgccagacgagacttgttttctctgggcagttggagggtctcgcggctcctacccttttttggaacggatcattttaaaagttctcgttagaaaccaattcggcgccggcaccctttgggtgaaacctaatcagcccgcgacgctgcctttctcactggtcacgggcaacagctaggctgctgttatttcgcaaggcagaagagaaaaggcatcctcgcgagcagatgaggaacctcggggataaatccttttgtggcttcaagtgtctaagtacattagagtcaggaacggcgctttccagcgtccgccatttttgtggcgtcaccgcgtcgctgctacgccatccccagcgcagtggctgccgcgctcctgtcccagtgtcccccgggaggtcggcccgtgcggtgacgcccctgagcgcggggtacgccgggagttgtagtcctgacggcacagccttgcagcgtctccggaagtggaggcgggagcggcacggcagccactgcttggggtagcgggagggcagactctgggcgccactcccgggccggtcatgaacgggccggcggacggcgaagtggactacaaaaaaaaataccggaatctgaagcggaagctcaagttcctcatctacgagcacgagtgcttccaggaggagctgaggaaagcgcaaaggaaattactgaaggtgtcccgggacaagagtttcctcctagaccgacttctgcagtacgagaacgtggatgaagactcttcggactcagatgccactgcatcatcagataacagcgagacggaggggacacccaagttgtctgacacaccggcccctaagaggaagagaagccctccgctggggggcgccccctctccctccagcctctccctgcctccttcaacagggtttccccttcaggcctccggggtcccctccccatacctgagctcgatggcggtgggaccccccgactgccctgtgggagggccgctgaccttccctggccggggttctggggctggggtcgggacaaccctgacccccctcccaccccctaagatgcccccccccacgatcctgagcacggtccctcggcagatgttcagcgatgcaggtagcggggacgatgccttggatggagacgatgacctggtgatcgacatcccggagtgaccgtgacatcacgccatgcccaccacggccccgcccggcgccctccccgtgccagcacacacgagtccagcttcctcggaggtgtttattgatgcccagctgccatgctccggccactgacacaaccagaaaaggcgtaaacatgcacgggtgtcccccaggagggtggcaggggccctgccttcaaaccccggccccctccaggggacagttatttaaacgagtggccgggagcatctgccacctgctggggaggcagagaccctgcaatggcc

SEQ ID NO: 142757 - DNA, 883 bp, Homo sapiens
  Payload ID: 8207
  Gene Symbol: INO80E
  Gene Name: INO80 complex subunit E
  Uniprot ID: Q8NBZ0
  ENST ID: ENST00000567065
  CDS Start-End: 66-479
cggcacggcagccactgcttggggtagcgggagggcagactctgggcgccactcccgggccggtcatgaacgggccggcggacggcgaagtggactacaaaaaaaaataccggaatctgaagcggaagctcaagttcctcatctacgagcacgagtgcttccaggaggagctgaggaaagcgcaaaggaaattactgaaggtgtcccgggacaagagtttcctcctagaccgacttctgcagtacgagaacgtggatgaagactcttcggactcagatgccactgcatcatcagataacagcgagacggaggggacacccaagttgtctgacacaccggcccctaagaggaagagaagccctccgctggggggcgccccctctccctccagcctctccctgcctccttcaacagggtttccccttcaggcctccggggtcccctccccatacctgagctcggaacggggccaggcctgactgaggagagcaaagcccaggacagcatcctgctgctgcccggcccttctgtgctcgggagccccgggagccgcactcatcaccatctcttttgtttttccatcctccttctgtttgcatttcttcccccaccctcaccccggtccattccgcctcccatctccatccccgctcccgcccgcagctggcctcctcccgctaccccccattcccttctgactacctggccctgcagctgcccgagcccagtcccctgaggcccaagcgggagaaacggccccgcctgccccggaaactcaagatggcggtgggaccccccgactgccctgtgggagggccgctgaccttccctggccggggttctggggctggggtcgggacaaccctgacccccctcccacccc

SEQ ID NO: 142758 - DNA, 880 bp, Homo sapiens
  Payload ID: 8207
  Gene Symbol: INO80E
  Gene Name: INO80 complex subunit E
  ENST ID: ENST00000567705
  CDS Start-End: 62-745
acggcagccactgcttggggtagcgggagggcagactctgggcgccactcccgggccggtcatgaacgggccggcggacggcgaagtggactacaaaaaaaaataccggaatctgaagcggaagctcaagttcctcatctacgagcacgagtgcttccaggaggagctgaggaaagcgcaaaggaaattactgaaggtgtcccgggacaagagtttcctcctagaccgacttctgcagtacgagaacgtggatgaagactcttcggactcagatgccactgcatcatcagataacagcgagacggaggggacacccaagttgtctgacacaccggcccctaagaggaagagaagccctccgctggggggcgccccctctccctccagcctctccctgcctccttcaacagggtttccccttcaggcctccggggtcccctccccatacctgagctcgctgcccgagcccagtcccctgaggcccaagcgggagaaacggccccgcctgccccggaaactcaagatggcggtgggaccccccgactgccctgtgggagggccgctgaccttccctggccggggttctggggctggggtcgggacaaccctgacccccctcccaccccctaagatgcccccccccacgatcctgagcacggtccctcggcagatgttcagcgatgcaggtagcggggacgatgccttggatggagacgatgacctggtgatcgacatcccggagtgaccgtgacatcacgccatgcccaccacggccccgcccggcgccctccccgtgccagcacacacgagtccagcttcctcggaggtgtttattgatgcccagctgccatgctccggccactgacacaaccagaaaagg

SEQ ID NO: 142759 - DNA, 1412 bp, Homo sapiens
  Payload ID: 8207
  Gene Symbol: INO80E
  Gene Name: INO80 complex subunit E
  Uniprot ID: Q8NBZ0
  ENST ID: ENST00000562441
  CDS Start-End: 66-479
cggcacggcagccactgcttggggtagcgggagggcagactctgggcgccactcccgggccggtcatgaacgggccggcggacggcgaagtggactacaaaaaaaaataccggaatctgaagcggaagctcaagttcctcatctacgagcacgagtgcttccaggaggagctgaggaaagcgcaaaggaaattactgaaggtgtcccgggacaagagtttcctcctagaccgacttctgcagtacgagaacgtggatgaagactcttcggactcagatgccactgcatcatcagataacagcgagacggaggggacacccaagttgtctgacacaccggcccctaagaggaagagaagccctccgctggggggcgccccctctccctccagcctctccctgcctccttcaacagggtttccccttcaggcctccggggtcccctccccatacctgagctcggaacggggccaggcctgactgaggagagcaaagcccaggacagcatcctgctgctgcccggcccttctgtgctcgggagccccgggagccgcactcatcaccatctcttttgtttttccatcctccttctgtttgcatttcttcccccaccctcaccccggtccattccgcctcccatctccatccccgctcccgcccgcagctggcctcctcccgctaccccccattcccttctgactacctggccctgcagctgcccgagcccagtcccctgaggcccaagcgggagaaacggccccgcctgccccggaaactcaagagcgcgcgctctggctgccgtgcggaggagctggatctgggagaggctgcgggcagggagtccagttaggaggctgggaccgcagcccagatggcggtgggaccccccgactgccctgtgggagggccgctgaccttccctggccggggttctggggctggggtcgggacaaccctgacccccctcccaccccctaagatgcccccccccacgatcctgagcacggtccctcggcagatgttcagcgatgcaggtagcggggacgatgccttggatggagacgatgacctggtgatcgacatcccggagtgaccgtgacatcacgccatgcccaccacggccccgcccggcgccctccccgtgccagcacacacgagtccagcttcctcggaggtgtttattgatgcccagctgccatgctccggccactgacacaaccagaaaaggcgtaaacatgcacgggtgtcccccaggagggtggcaggggccctgccttcaaaccccggccccctccaggggacagttatttaaacgagtggccgggagcatctgccacctgctggggaggcagagaccctgcaatggccacctctttaaaagggcagctgtacagggctaggttttttcaatga

SEQ ID NO: 142760 - DNA, 2103 bp, Homo sapiens
  Payload ID: 8207
  Gene Symbol: INO80E
  Gene Name: INO80 complex subunit E
  Uniprot ID: Q8NBZ0
  ENST ID: ENST00000563197
  CDS Start-End: 1018-1752
agcaagccccgcctccgcctcccgcggcccaggctccggcccggcacacctgcatcttcagcagctcctcctccaccagccgcttcagtgcctgcttctcctcgggctccaggtggctgcggcccgagtgagctaagtacctccgccgcacgatggaatgcgtaagcgtgctgcagggacatggtgtcaggacggagtcccgacccacccgcgccctttccaaccccatctccaaccccctgggcacctgaggtccgggcggcctcggaagaagctacgggtgaactcctgcatctccttctcccgcgccattttgctcaacccgggattgacggctcccgcctttttttcttctcggcctccgtcagcgcgtttgacagcggctcgcgcacgcgcagtgctgcggcaacgtggggcgagggaccgttggcccttggccgcggaccgcgtgggccgagaactttgccagacgagacttgttttctctgggcagttggagggtctcgcggctcctacccttttttggaacggatcattttaaaagttctcgttagaaaccaattcggcgccggcaccctttgggtgaaacctaatcagcccgcgacgctgcctttctcactggtcacgggcaacagctaggctgctgttatttcgcaaggcagaagagaaaaggcatcctcgcgagcagatgaggaacctcggggataaatccttttgtggcttcaagtgtctaagtacattagagtcaggaacggcgctttccagcgtccgccatttttgtggcgtcaccgcgtcgctgctacgccatccccagcgcagtggctgccgcgctcctgtcccagtgtcccccgggaggtcggcccgtgcggtgacgcccctgagcgcggggtacgccgggagttgtagtcctgacggcacagccttgcagcgtctccggaagtggaggcgggagcggcacggcagccactgcttggggtagcgggagggcagactctgggcgccactcccgggccggtcatgaacgggccggcggacggcgaagtggactacaaaaaaaaataccggaatctgaagcggaagctcaagttcctcatctacgagcacgagtgcttccaggaggagctgaggaaagcgcaaaggaaattactgaaggtgtcccgggacaagagtttcctcctagaccgacttctgcagtacgagaacgtggatgaagactcttcggactcagatgccactgcatcatcagataacagcgagacggaggggacacccaagttgtctgacacaccggcccctaagaggaagagaagccctccgctggggggcgccccctctccctccagcctctccctgcctccttcaacagggtttccccttcaggcctccggggtcccctccccatacctgagctcgctggcctcctcccgctaccccccattcccttctgactacctggccctgcagctgcccgagcccagtcccctgaggcccaagcgggagaaacggccccgcctgccccggaaactcaagatggcggtgggaccccccgactgccctgtgggagggccgctgaccttccctggccggggttctggggctggggtcgggacaaccctgacccccctcccaccccctaagatgcccccccccacgatcctgagcacggtccctcggcagatgttcagcgatgcaggtagcggggacgatgccttggatggagacgatgacctggtgatcgacatcccggagtgaccgtgacatcacgccatgcccaccacggccccgcccggcgccctccccgtgccagcacacacgagtccagcttcctcggaggtgtttattgatgcccagctgccatgctccggccactgacacaaccagaaaaggcgtaaacatgcacgggtgtcccccaggagggtggcaggggccctgccttcaaaccccggccccctccaggggacagttatttaaacgagtggccgggagcatctgccacctgctggggaggcagagaccctgcaatggccacctctttaaaagggcagctgtacagggctaggttttttcaatgaagtttctgtattaaaggagtggctctgggtt

SEQ ID NO: 142761 - DNA, 255 bp, Homo sapiens
  Payload ID: 8207
  Gene Symbol: INO80E
  Gene Name: INO80 complex subunit E
  ENST ID: ENST00000562291
  CDS Start-End: 1-255
cctctccctgcctccttcaacagggtttccccttcaggcctccggggtcccctccccatacctgagctcgctggcctcctcccgctaccccccattcccttctgactacctggccctgcagctgcccgagcccagtcccctgaggcccaagcgggagaaacggccccgcctgccccggaaactcaagatgttcagcgatgcaggtagcggggacgatgccttggatggagacgatgacctggtgatcgacatccc

SEQ ID NO: 142762 - DNA, 1926 bp, Homo sapiens
  Payload ID: 8207
  Gene Symbol: INO80E
  Gene Name: INO80 complex subunit E
  ENST ID: ENST00000567987
  CDS Start-End: 61-627
cggcagccactgcttggggtagcgggagggcagactctgggcgccactcccgggccggtcatgaacgggccggcggacggcgaagtggactacaaaaaaaaataccggaatctgaagcggaagctcaagttcctcatctacgagcacgagtgcttccaggaggagctgaggaaagcgcaaaggaaattactgaaggtgtcccgggacaagagtttcctcctagaccgacttctgcagtacgagaacgtggatgaagactcttcggactcagatgccactgcatcatcagataacagcgagacggaggggacacccaagttgtctgacacaccggcccctaagaggaagagaagccctccgctggggggcgccccctctccctccagcctctccctgcctccttcaacagggtttccccttcaggcctccggggtcccctccccatacctgagctcgctggcctcctcccgctaccccccattcccttctgactacctggccctgcagctgcccgagcccagtcccctgaggcccaagcgggagaaacggccccgcctgccccggaaactcaagacactggtggtcagagaacagactgagcggtggagtgagttgggacgggagtgaggaggccaccacggtaaaccaggccaagggcagagggtccagagggagctgcggacccatttcagagaatgagcatgggagttcctggaggacctggtgtgggctgtgcgggagagaggccaggatgcctccagggctttagtctgagcacgagtggagtctccctccctggagatgggagggctgtgggaccacaggcttggaggaaaactgagtctggccgcggatgtgtcagatgccatctggaaaggcagctagatagcggcccgtgaggggctgcgcatttggaagccgccaggctggcggtagatgcaagccttgggagagatggggatgggctgaggggcagagcggagtggggaccaactgggcggctcccagggttctggagccagaagcagaatgagaggccgcatttgcggtggtctggagtacaggatctggagctctaatcccaactctgccgttttctccgtgtgaccttggccctgtgaggcttcacctcttgagcctgagaagcagaggggagcgggagtccctgaagggccaggggagtgaggagatggaaggaagggagtccaagcagaggaaggatagctgtgaagacagaagcagtggcggcattgtgcggagaatagcgcgcgctctggctgccgtgcggaggagctggatctgggagaggctgcgggcagggagtccagttaggaggctgggaccgcagcccagatggcggtgggaccccccgactgccctgtgggagggccgctgaccttccctggccggggttctggggctggggtcgggacaaccctgacccccctcccaccccctaagatgcccccccccacgatcctgagcacggtccctcggcagatgttcagcgatgcaggtagcggggacgatgccttggatggagacgatgacctggtgatcgacatcccggagtgaccgtgacatcacgccatgcccaccacggccccgcccggcgccctccccgtgccagcacacacgagtccagcttcctcggaggtgtttattgatgcccagctgccatgctccggccactgacacaaccagaaaaggcgtaaacatgcacgggtgtcccccaggagggtggcaggggccctgccttcaaaccccggccccctccaggggacagttatttaaacgagtggccgggagcatctgccacctgctggggaggcagagaccctgcaatggccacctctttaaaagggcagctgtacagggctaggttttttcaatgaagtttctgtattaaaggagtggctctgggtt

SEQ ID NO: 142763 - DNA, 625 bp, Homo sapiens
  Payload ID: 8207
  Gene Symbol: INO80E
  Gene Name: INO80 complex subunit E
  ENST ID: ENST00000567254
  CDS Start-End: 68-589
agcggcacggcagccactgcttggggtagcgggagggcagactctgggcgccactcccgggccggtcatgaacgggccggcggacggcgaagtggactacaaaaaaaaataccggaatctgaagcggaagctcaagttcctcatctacgagcacgagtgcttccaggaggagctgaggaaagcgcaaaggaaattactgaaggtgtcccgggacaagagtttcctcctagaccgacttctgcagtacgagaacgtggatgaagactcttcggactcagatgccactgcatcatcagataacagcgagacggaggggacacccaagttgtctgacacaccggcccctaagaggaagagaagccctccgctggggggcgccccctctccctccagcctctccctgcctccttcaacagggtttccccttcaggcctccggggtcccctccccatacctgagctcgctggcctcctcccgctaccccccattcccttctgactacctggccctgcagctgcccgagcccagtcccctgaggcccaagcgggagaaacggccccgcctgccccggaaactcaaggtaccctgacgtgggggtgctagggaggggcaggacggcaggagg

SEQ ID NO: 142764 - DNA, 515 bp, Homo sapiens
  Payload ID: 8207
  Gene Symbol: INO80E
  Gene Name: INO80 complex subunit E
  Uniprot ID: Q8NBZ0
  ENST ID: ENST00000620599
  CDS Start-End: 102-515
acagccttgcagcgtctccggaagtggaggcgggagcggcacggcagccactgcttggggtagcgggagggcagactctgggcgccactcccgggccggtcatgaacgggccggcggacggcgaagtggactacaaaaaaaaataccggaatctgaagcggaagctcaagttcctcatctacgagcacgagtgcttccaggaggagctgaggaaagcgcaaaggaaattactgaaggtgtcccgggacaagagtttcctcctagaccgacttctgcagtacgagaacgtggatgaagactcttcggactcagatgccactgcatcatcagataacagcgagacggaggggacacccaagttgtctgacacaccggcccctaagaggaagagaagccctccgctggggggcgccccctctccctccagcctctccctgcctccttcaacagggtttccccttcaggcctccggggtcccctccccatacctgagctcggaacggggccaggcctga

SEQ ID NO: 142765 - DNA, 2040 bp, Homo sapiens
  Payload ID: 8208
  Gene Symbol: INO80B-WBP1
  Gene Name: INO80B-WBP1 readthrough (NMD candidate)
  ENST ID: ENST00000452361
  CDS Start-End: 30-1121
tttctagtcccctttcctcgcaggacctcatgagtaagctgtggcggcgtgggagcacctctggggctatggaggcccctgagccgggagaagccctggagttgagcctggcgggtgcccatggccatggagtgcacaagaaaaaacacaagaagcacaagaagaaacacaagaagaaacaccatcaggaagaagacgccgggcccacgcagccgtcccctgccaagcctcagctcaaactcaaaatcaagcttgggggacaagtcctggggaccaagagtgttcctaccttcactgtgatcccagaggggcctcgctcaccctctccccttatggttgtggataatgaagaggaacctatggaaggagtcccccttgagcagtaccgtgcctggctggatgaagacagtaatctctctccctctccacttcgggacctatcaggagggttagggggtcaggaggaagaggaggaacagaggtggctggatgccctggagaagggggagctggatgacaatggagacctcaagaaggagatcaatgagcggctgcttactgctcgacagcgagctctgctccagaaggcgcggagtcaaccttcccctatgctgccgctgcctgtagctgagggctgcccacctcccgccctcacagaggagatgctgctgaagcgcgaggagcgggcgcggaagcggcggctccaggcggcgcggcgggcagaagagcacaagaaccagactatcgagcgcctcaccaagactgcggcgaccagtgggcggggaggccgggggggcgcacggggcgagcggcggggagggcgggctgcggctccggcccccatggtgcgctactgcagcggagcacagggttccaccctttccttcccacctggcgtccccgcccccacggcagtgtctcagcggccatccccctcaggcccgccgccgcgctgctctgtccccggctgtccccatccgcgccgctacgcttgctcccgcacaggccaggcactctgtagtcttcagtgctaccgcatcaacctgcagatgcggctgggggggcccgagggtcctggatccccccttttggctaccttcgagagctgtgcccaggagtgaacaaccagccctacctctgtgagagtggtcactgctgcggggagactggctgctgcacctactactatgagctctggtggttctggctgctctggactgtcctcatcctctttagctgctgttgcgccttccgccaccgacgagctaaactcaggctgcaacaacagcagcggcagcgtgaaatcaacttgttggcctatcatggggcatgccatggggctggtcctttccctaccggttcactgcttgaccttcgcttcctcagcaccttcaagcccccagcctacgaggatgtggttcaccgcccaggcacaccaccccccccttatactgtggccccaggccgccccttgactgcttccagtgaacaaacctgctgttcctcctcatccagctgccctgcccactttgaaggaacaaatgtggaaggtgtttcctcccaccagagtgccccccctcatcaggagggtgagcccggggcaggggtgacccctgcctccacacccccctcctgccgctatcgccgtttaactggcgactccggtattgagctctgcccttgtcctgcctccggtgagggtgagccagtcaaggaggtgagggttagtgccaccctgccagatctggaggactactccccgtgtgcactacccccagagtctgtaccgcagatctttcccatggggctgtcttccagtgaaggggacatcccataagtagttttgagagggtggatgggttacttgcccaccagaaacagccctagtcccaactccttgcgttcctttggcccctccctgcctacctagaatctgcctgaaagggctggagaggggcagtattgggggactgtgctagctttacccccgcaggacatacacaggagcctttgatctcattaaagagatgtgaaccagct

SEQ ID NO: 142766 - DNA, 1668 bp, Homo sapiens
  Payload ID: 8208
  Gene Symbol: INO80B-WBP1
  Gene Name: INO80B-WBP1 readthrough (NMD candidate)
  ENST ID: ENST00000441673
  CDS Start-End: 18-809
tttcctcgcaggacctcatgagtaagctgtggcggcgtgggagcacctctggggctatggaggcccctgagccgggagaagccctggagttgagcctggcgggtgcccatggccatggagtgcacaagaaaaaacacaagaagcacaagaagaaacacaagaagaaacaccatcaggaagaagacgccgggcccacgcagccgtcccctgccaagcctcagctcaaactcaaaatcaagcttgggggacaagtcctggggaccaagagtgttcctaccttcactgtgatcccagaggggcctcgctcaccctctccccttatggttgtggataatgaagaggaacctatggaaggagtcccccttgagcagtaccgtgcctggctggatgaagacagtaatctctctccctctccacttcgggacctatcaggagggttagggggtcaggaggaagaggaggaacagaggtggctggatgccctggagaagggggagctggatgacaatggagacctcaagaaggagatcaatgagcggctgcttactgctcgacagcgagctctgctccagaaggcgcggagtcaaccttcccctatgctgccgctgcctgtagctgagggctgcccacctcccgccctcacagaggagatgctgctgaagcgcgaggagcgggcgcggaagcggcggctccaggcggcgcggcgggcagaagagcacaagaaccagactatcgagcgcctcaccaagactgcggcgaccacttcgagagctgtgcccaggagtgaacaaccagccctacctctgtgagagtggtcactgctgcggggagactggctgctgcacctactactatgagctctggtggttctggctgctctggactgtcctcatcctctttagctgctgttgcgccttccgccaccgacgagctaaactcaggctgcaacaacagcagcggcagcgtgaaatcaacttgttggcctatcatggggcatgccatggggctggtcctttccctaccggttcactgcttgaccttcgcttcctcagcaccttcaagcccccagcctacgaggatgtggttcaccgcccaggcacaccaccccccccttatactgtggccccaggccgccccttgactgcttccagtgaacaaacctgctgttcctcctcatccagctgccctgcccactttgaaggaacaaatgtggaaggtgtttcctcccaccagagtgccccccctcatcaggagggtgagcccggggcaggggtgacccctgcctccacacccccctcctgccgctatcgccgtttaactggcgactccggtattgagctctgcccttgtcctgcctccggtgagggtgagccagtcaaggaggtgagggttagtgccaccctgccagatctggaggactactccccgtgtgcactacccccagagtctgtaccgcagatctttcccatggggctgtcttccagtgaaggggacatcccataagtagttttgagagggtggatgggttacttgcccaccagaaacagccctagtcccaactccttgcgttcctttggcccctccctgcctacctagaatctgcctgaaagggctggagaggggcagtattgggggactgtgctagctttacccccgcaggacatacac

SEQ ID NO: 142767 - DNA, 1185 bp, Homo sapiens
  Payload ID: 8209
  Gene Symbol: ITPA
  Gene Name: inosine triphosphatase (nucleoside triphosphate pyrophosphatase)
  Uniprot ID: Q9BY32
  ENST ID: ENST00000380113
  CDS Start-End: 193-777
gcaaatcggacgctgtgggctaggccgccaccgcgagcccactcgcccgatacgcgccttggggtccgggtcggctttccccgggacccctggccggaaactgagccgttcacttccgccaccagccggaagttttctgtcactggacgccaaggagttttcggtggctcagctgggtaaccggggatcaccatggcggcctcattggtggggaagaagatcgtgtttgtaacggggaacgccaagaagctggaggaggtcgttcagattctaggagataagtttccatgcactttggtggcacagaaaattgacctgccggagtaccagggggagccggatgagatttccatacagaaatgtcaggaggcagttcgccaggtacaggggcccgtgctggttgaggacacttgtctgtgcttcaatgcccttggagggctccccggcccctacataaagtggtttctggagaagttaaagcctgaaggtctccaccagctcctggccgggttcgaggacaagtcagcctatgcgctctgcacgtttgcactcagcaccggggacccaagccagcccgtgcgcctgttcaggggccggacctcgggccggatcgtggcacccagaggctgccaggactttggctgggacccctgctttcagcctgatggatatgagcagacgtacgcagagatgcctaaggcggagaagaacgctgtctcccatcgcttccgggccctgctggagctgcaggagtactttggcagtttggcagcttgacttctgcagctggaggaggcccctcaggccggggatctggggagggctagcccaaaacctcccgcatcgggcaggcaccccctgaagtacttccttcagggtttcccctttgtgagggtgtcgagtagcctcaccggcctgtctggaggagcagctggctctgctctgagaaactctggcaagtggacgccattctcttgcccttaggattcactgctctctcctacagccgccaggcctggggtcctgaaaggaccttgggtggtaaagctgtacttggtgggagtgagggcgtggggaggaaccatgcaaatcgccttccatggtttttaaatgcagtaaataacatttctggatgagacttgtttccaaaataaaccagctatatctgttttgaaccctgcccca

SEQ ID NO: 142768 - DNA, 897 bp, Homo sapiens
  Payload ID: 8209
  Gene Symbol: ITPA
  Gene Name: inosine triphosphatase (nucleoside triphosphate pyrophosphatase)
  Uniprot ID: Q9BY32
  ENST ID: ENST00000399838
  CDS Start-End: 28-489
ggctcagctgggtaaccggggatcaccatggcggcctcattggtggggaagaagatcgtgtttgtaacggggaacgccaagaagctggaggaggtacaggggcccgtgctggttgaggacacttgtctgtgcttcaatgcccttggagggctccccggcccctacataaagtggtttctggagaagttaaagcctgaaggtctccaccagctcctggccgggttcgaggacaagtcagcctatgcgctctgcacgtttgcactcagcaccggggacccaagccagcccgtgcgcctgttcaggggccggacctcgggccggatcgtggcacccagaggctgccaggactttggctgggacccctgctttcagcctgatggatatgagcagacgtacgcagagatgcctaaggcggagaagaacgctgtctcccatcgcttccgggccctgctggagctgcaggagtactttggcagtttggcagcttgacttctgcagctggaggaggcccctcaggccggggatctggggagggctagcccaaaacctcccgcatcgggcaggcaccccctgaagtacttccttcagggtttcccctttgtgagggtgtcgagtagcctcaccggcctgtctggaggagcagctggctctgctctgagaaactctggcaagtggacgccattctcttgcccttaggattcactgctctctcctacagccgccaggcctggggtcctgaaaggaccttgggtggtaaagctgtacttggtgggagtgagggcgtggggaggaaccatgcaaatcgccttccatggtttttaaatgcagtaaataacatttctggatgagacttgtttccaaaataaaccagctatatctgttttgaaccctgcccca

SEQ ID NO: 142769 - DNA, 729 bp, Homo sapiens
  Payload ID: 8209
  Gene Symbol: ITPA
  Gene Name: inosine triphosphatase (nucleoside triphosphate pyrophosphatase)
  Uniprot ID: Q9BY32
  ENST ID: ENST00000455664
  CDS Start-End: 40-573
ggagttttcggtggctcagctgggtaaccggggatcaccatggcggcctcattggtcgttcagattctaggagataagtttccatgcactttggtggcacagaaaattgacctgccggagtaccagggggagccggatgagatttccatacagaaatgtcaggaggcagttcgccaggtacaggggcccgtgctggttgaggacacttgtctgtgcttcaatgcccttggagggctccccggcccctacataaagtggtttctggagaagttaaagcctgaaggtctccaccagctcctggccgggttcgaggacaagtcagcctatgcgctctgcacgtttgcactcagcaccggggacccaagccagcccgtgcgcctgttcaggggccggacctcgggccggatcgtggcacccagaggctgccaggactttggctgggacccctgctttcagcctgatggatatgagcagacgtacgcagagatgcctaaggcggagaagaacgctgtctcccatcgcttccgggccctgctggagctgcaggagtactttggcagtttggcagcttgacttctgcagctggaggaggcccctcaggccggggatctggggagggctagcccaaaacctcccgcatcgggcaggcaccccctgaagtacttccttcagggtttcccctttgtgagggtgtcgagtagcctcaccggcctgtctggaggagcagct

SEQ ID NO: 142770 - DNA, 4401 bp, Homo sapiens
  Payload ID: 8210
  Gene Symbol: IPPK
  Gene Name: inositol 1,3,4,5,6-pentakisphosphate 2-kinase
  Uniprot ID: Q9H8X2
  ENST ID: ENST00000287996
  CDS Start-End: 278-1753
tctaccagtacctaagatggccgccggcccatccaccgtcgcgatcggtgtgaggaaagtgtcacgaacccggaattgcccgactccgtcatggcaggcgccgggggcgtggcttccggcggccacagcttgctagtcgccgcggcggggtcgagcgggggcggcagctgacaggcgctcctcccccgaccgcagcggctggttcccagcgaggcgggcggcccccagctcgcgtccccgagtcctagcccgcgaggcgccagggctgcgcctgggcatggaagaggggaagatggacgagaatgaatgggggtaccacggagagggcaataagagcctggtggtggcccacgcgcagcgctgcgtcgtgctgcggtttctgaagtttcctccaaataggaagaagacctcggaagagatatttcaacacctgcagaacatagtggactttgggaaaaatgtcatgaaggagtttttgggggagaactatgttcattatggggaggtcgttcagctacctttagagtttgtgaaacagctttgtttaaagatacaatctgaaagaccagagtctcgctgtgacaaggacctggatactctcagtggttacgctatgtgccttcctaatttaaccagactccaaacctaccgctttgcagagcaccggccgattctgtgtgtagagattaagccaaaatgtgggtttattcctttctcgagtgatgtcacgcatgagatgaagcataaggtctgtcgatactgcatgcaccagcacctcaaggtagcaactgggaagtggaagcagatcagcaaatactgtccccttgatctctactcaggaaacaaacagagaatgcactttgccttgaagagtttgctgcaggaggcacagaacaacttgaagatatttaagaatggtgagctgatttacggctgcaaagatgcccggagccccgtggctgactggagcgagcttgcacaccacctgaagccgttcttcttcccttccaacggcctggccagtgggccccactgcacaagggctgtgatcagggagctggtgcacgtgatcacacgggtgctgctgagtggctcggacaagggccgggcaggcaccctgagtccggggctcgggcctcagggcccgcgagtctgcgaagccagccctttcagtaggagccttcgctgccaaggaaaaaacaccccagagcgctcggggttaccgaagggctgtcttctgtacaaaaccctccaggtgcagatgttggacctgctggacatcgaaggcctctaccctctgtacaaccgggttgagcgatacctggaagagtttcccgaggagagaaaaaccttacaaatagatgggccttatgatgaagcattttaccagaagctgcttgacctttccactgaggatgacgggacagtggccttcgcgctaacgaaggtgcagcagtaccgcgtcgccatgactgccaaggactgctccatcatgattgcactgtctccctgtctgcaggatgccagctctgatcaaaggcctgtcgtcccttcatcgaggtccaggtttgccttttccgtgtctgtgctggaccttgacctcaagccctacgagagcattccccatcagtataaactggacggcaagatcgtcaactattattcaaagactgtacgtgccaaagacaacgccgtgatgtcgactcggttcaaggaaagcgaagattgcacattagttctccacaaggtctaactctttccctgcagtgtctttgaaacttgaacataatgtgaaggctgaatgatagagatattttctgttgtgttgggtgacctttggttgtgaatgtttttgcttttaaccccttttgaggtgggattgcctcttggagacatggaattgaagagcactagaaacaacttcctggacaaggaatgtaggaagtgagtgctgtgtcccaggaagctgctcacactcttaaaatggaagtgtccgttaagccctgggaagacgttctggatagttcttctttcccaaccagggctcatgtctgattctctaatgcgaaaagccttattctaagacccaaggtttggatctgctaccaccagactcctaacatagaaaacttgaattgtcacatacattttacagtttggacttttaagaaaacatggatactactggaacttcccccagctgagttacatggtcactttttcagtgcaagccacatatcaacacaggtttttaggtggttccctgctgcacagcgtgacctcgtggtcgcgcagatgccgattctgagcagtgtagactcagggtccctgtggaggtgctgaagcccacagttccacacagggcagcagggagcgcaaggctcaggtcaggatggacaccactcatgcgagcattgacctttttttttttgctttacaatttaatctttcacatgagggggagatgagctgttctttcccactaaaaattgctgctgtagaagttggaggtggagctgtgactggctgagctgctgtggccgggctgggcagtgtgccccaacagctcagtgctttcctgacactccagtgtctggggtggttgaggagcgagttctctcttcctcccagaccaagttcctccctcgggtttgccttgagacgtgttgcgtttttgggccccgtggcctctccctgttaggctgccacaggccctgcttctggaaggtgaacagctcctggctgctgccgagagggttctcgttggggtcaccaaagtgtgcccggctgctatgaaaaacgttgggaatcttggtttcagttttttattctatgctaggttgtacagacttatttatatcatcgttttgagggactaatggaggcttattgtaacatataatattagtgaaaccatggaattatatgaaaatgatacatgagaaataaggaaactattttgctgattgtaaatttttgtgggaaattttgtgataacttgagaattatacttgtttgaatcaaggcaactcttctagaatttattgttcaattctgtcatatttacttctaattctactctcagaggtgcaaaaagatacttatctaactggacacttttactgttttcttctcacttccaatgacaccgtctcatacacacgggtcctgtgtgctgggatgggggctttggtgaagtgcacggagctcacggacaagccgcaggctctgggaagcgtggaggtagtggccgttgagtactgtcttgacccaagggagttcactgttgctgggctggggctggggcagcctggtttgggatgattttgcccattgtcacggtgtgtggaggatgctgggtcctgggttcaagtgcacatgtgagggaaccccagtccgtgggaaggtgggctgggctccctaggtccttcagggctgcaagagttattgcctagcacagggcccagacagggctggactagacacgatgaaaacagcctgtatttgagggagaagagaaaacagatggagacccccactctgtctggtcttggctcccaccagcccgggctgtgaggagcccctgagccgcgggtgccactgctgtggatgcgtttctggcccgtcttggaaactgctgctgctgcgtagtcatgacggccctgactggtttgagacaacacgcgttcacagatcttaacaatgctaaatgggcgactgatgaggtcacggttcttaaggcacatccgggacgatcgatatagcacttaggctatgcaggggggtctttctttcataaaggacctcattccttgcgtcccagcccaggaacagtgctgtctttgctgtcttaggccattcttgttattaagctgacagcttcactttcttgtggaagaccaagaacagcatgaggacttgctgagactgcctcacggtgccaccatgcggaccggggggaggcagggagtgagggtgtggctcccctgggctactaaggacagtttaaagatgaggcgccataggcatccgtctccagagcccccaggaggcaggaaccaggataagggtggcttctcccagctgagtaatgtggccaccatgtccaaggtggactcggtgtgaggctgcagtgggtgggggatggatcctccccacacatctgaggacacacaaccacttggtacattttctcagatgttaagcttatttttataaaccacattgtacgtgtcacttttatttggcattttatacttaactagttgtatttatttttcatgtcatgagagtttccatataatgtgccataactgcatagacagcacgtcttcagggtgtggtttctaagcagaaaatagcaaatgtttatattgaataaaattgcatgttcctccacgc

SEQ ID NO: 142771 - DNA, 882 bp, Homo sapiens
  Payload ID: 8210
  Gene Symbol: IPPK
  Gene Name: inositol 1,3,4,5,6-pentakisphosphate 2-kinase
  ENST ID: ENST00000375522
  CDS Start-End: 86-577
accctgagtccggggctcgggcctcagggcccgcgagtctgcgaagccagccctttcagtaggagccttcgctgccaaggtgcagatgttggacctgctggacatcgaaggcctctaccctctgtacaaccgggttgagcgatacctggaagagtttcccgaggagagaaaaaccttacaaatagatgggccttatgatgaagcattttaccagaagctgcttgacctttccactgaggatgacgggacagtggccttcgcgctaacgaaggtgcagcagtaccgcgtcgccatgactgccaaggactgctccatcatgattgcactgtctccctgtctgcaggatgccagctctgatcaaaggcctgtcgtcccttcatcgaggtccaggtttgccttttccgtgtctgtgctggaccttgacctcaagccctacgagagcattccccatcagtataaactggacggcaagatcgtcaactattattcaaagactgtacgtgccaaagacaacgccgtgatgtcgactcggttcaaggaaagcgaagattgcacattagttctccacaaggtctaactctttccctgcagtgtctttgaaacttgaacataatgtgaaggctgaatgatagagatattttctgttgtgttgggtgacctttggttgtgaatgtttttgcttttaaccccttttgaggtgggattgcctcttggagacatggaattgaagagcactagaaacaacttcctggacaaggaatgtaggaagtgagtgctgtgtcccaggaagctgctcacactcttaaaatggaagtgtccgttaagccctgggaagacgttctggatagttcttctttcccaaccagggctcatgtctgattc

SEQ ID NO: 142772 - DNA, 6807 bp, Homo sapiens
  Payload ID: 8211
  Gene Symbol: ITPRIP
  Gene Name: inositol 1,4,5-trisphosphate receptor interacting protein
  Uniprot ID: Q8IWB1
  ENST ID: ENST00000278071
  CDS Start-End: 454-2097
gtgcgctcttcaggacagcagaggtcggttggaggtctgcattctctgccgacttgggccccaacttccccatcaggtcactgctccctcctctgaggtctggacaaaggacaaggctgtagggacctagactgtcctagacggggaggacatctatcctcagtggtctttccagcagtttgtttggagctgctcatcctgatcttttggctgactctggcagagggaaagtcagatttgaggcctgagctctaacaggcatccagagaggaaggaagggcccaccccgtgacatcagtgaaacggaagcaccctgcaggtgacatcactgttgctcagggcaacgcctccaccctaaggcggacggggaggtgaaaaatcggcctcaagtgtgagacgcatgttgaagggaagggacatagaaggtgtaacgttcacaggaaagctccaaccatggccatggggctcttccgcgtgtgtctggtggtggtgacggccatcatcaaccacccgctgctgttcccgcgggagaacgccacagtccccgagaacgaggaggagatcatccgcaagatgcaggcgcaccaggagaagctgcagctggagcagttgcgcctggaggaggaggtggctcggctggcggccgaaaaggaggcactggagcaggtggcggaggagggcaggcagcagaacgagacacgcgtggcctgggacctctggagcaccctctgcatgatcctcttcctgatgatcgaggtgtggcggcaggaccaccaggaggggccctcacctgagtgcctgggcggtgaggaggatgagctgcctgggctggggggcgcccccttgcagggcctcaccctgcccaacaaggccacgcttggccacttttatgagcgctgcatccggggggccacggccgatgcagcccgtacccgggagttcctggaaggcttcgtggatgacttgctggaagccctgaggagcctctgcaaccgggacaccgacatggaggtggaggacttcattggcgtggacagcatgtacgagaactggcaggtggacaggccactgctgtgccaccttttcgtgcccttcacaccccccgagccctaccgcttccacccagagctctggtgctccggccgctcagtgcccctggatcgccagggctacggccagatcaaggtggtccgcgccgatggggacacattgagctgcatctgcggcaagaccaagctcggggaagacatgctgtgtctcctgcacggcaggaacagcatggcgcctccctgcggcgacatggagaacctgctgtgtgccacagattccctgtacctggacacgatgcaggtcatgaagtggttccagacggccctcaccagagcctggaagggcatcgcccacaagtacgagttcgacctggcctttggccagctggacagcccggggtccctgaagatcaagttccgttcagggaagttcatgcccttcaacctgattcctgtgatccagtgtgatgactcggacctgtactttgtctcccaccttcccagggagccctctgagggcaccccagcctccagcacagactggctcctgtcctttgctgtctatgagcgacacttcctcaggacgacactaaaggcactgcccgagggcgcctgccacctcagctgcctgcagatagcatccttcctgctctccaagcagagccgcctgaccggtcccagcgggctcagcagctaccacctgaagacggccctactgcacctcctactcctccggcaggccgccgactggaaggcggggcagctggacgctcgtctgcacgagttgctgtgcttcctggagaagagcttgctccagaagaagctccaccacttcttcatcggcaaccgcaaggtgcctgaggccatgggactccctgaggccgtgctcagggccgagcccctcaacctcttccggcccttcgtcctgcagcgaagcctttaccgtaagacactggactccttctatgagatgctcaagaatgccccagcgctcattagcgagtattccctacatgtcccctcagaccagcctaccccaaaaagctgacgtcttttacagaatgtgggatcctcgagctaagatgagggcatccctcacgttcacacccctggtggcatctgccagccctgttctggggacaaggcgggctttcgtgggagccgtgctcagcctgccaggaagccaagccctacagtgcagaggaaacagaatttcaacgggaagctggtttgcttcataccattgggatctgctggtaaagctgttatttgggtttagggactgatcccttgcagtttacttctggatcaccatgaatggccaagatggtggcagaacacgctgtggaccctgagttagagacaatgcaaatgttggattgggtgtaattctttttgaatcccagatccagtctgtacttgaatatgagcagaggatctacaagaatgctgacagggaaccgtgttaagacccagcacccctattcccaggagcttctggcctgaccatctgcagccaaagcactaacagggacagatatgggaatgtccacctttgatccgcatcctgcacaatagtggtcccaccatggctgccacttttttatactatttggagaaaagaccttgtataaattcgaggcccaaatgactaacgtctctgtcacacggaaatgggtacttggtggcatagagaaacacaattagccactttttcagctacacttctcactcagctgcaccctacacttctcactcaggtgcacccccttctgctgtcctttccccaacgtactgggtcccgagcgtggtgggtatttgccacactgggtgccagctcagcagccccccacctctctttattctctccaaagctggtctttctgactatcattgtggtagggggaggacagatgctaaaggtggaagctgacctggagaaagagacacacggggtgactgtggcaaaggacagctggaaaagaaactctatcacttcttcattggcaaccacaaggcacctgaggccatggcactcccagaggctgtgcgcagagccaagcctctcaacctcttctggccctgcgtcctgcagcgaagtctctgctgtaagacagtagactccttcgatgaggtgctcaaaaatgctacccggggtggtggtgtctggcttgcagtctggcccagttcagagaaagttgcagagatcaggggccaaggatgtcatagccccaggttgtcctcagggtcccaatcctagggcagggtgtgcatggaagcaagaactatggaaacctagctccagtctgcaggctctgagcccctagttcctcactccagcggggctccctcactgcacagaacccaccccttctgtgtgggcactgctgaccacacagatgacccagacccaaagagcctggcagaagctctgtggttggagctgggctccgtctccaggtctggttcagggggatcaggaaggctcttttccacctgtggcttcactggccctttgagatttcctatctcaccgttacttcagttacccttgcagggggccagggagtcaagaatataccgtgttcctccagggtttaagccggccatgccttcccgagagcataaccaacttgacaggggtgcccagttaccccacaaactgaaggaaggagatccttcccccatccccaggagtgctctcaaccagcctcagaaagcttgagaagatggaccctttgcccaccagggttaattcctggtggggcagctcggctgtgatcagggcaaccaaacctataggaagccttccagtgtgagctggaattagactgaacatgtgcttgggcctgcctctccctagacgcagttgcggggcactccagggaatgaaccagctcaagtgtgtccctaacagcagcctggagctacccccaatccctcacagcctgaccctcctcattccatcagatgcatttgtagaatcggggcaaatttccttatttatttatggcccatgcctttccccctcttcatcctgatcccgttttgctttgaagagaccccagtaaccaaaaaacagcctccagaagccaaaaccatgcctggatctcccatagcttctcctttgcttccaggagaaagttcactgaaaaaaaaatatcttctggcttcttgtgtgtacagagacaacagaactcggtggggaaacgggaatcttttctgcaccaaagctgcttctaaagcagaaagcagtggggctcttggtgtttcatgctgccttatttatattaaaggaagaattaaatcttgcaaggagtagaaatggtcactgtttgtttttaacttcaggaaatctgtgaggctcccagggcagagttggggacaggggggtggatttcctattgacaaagcagaagctttcactccctttttattcttacactttcaggagactttaaaaaataacaaaacagaacatttctaccctgtctttgaggcaacttgtgtgctgcccgcagggctccagaaagggcctttgaaagctggctgtagggtggattccagcctaagaccttatttcacagagctaatgtcagcgagaaatataggagctggaactaacaggaagcttttgggttttaaagaaagagattgtattttaaatagaggattttgagtcctctaggggactttggcctttccactaaggacaaccctgccctctttccccagagtctctttcccaaggatgcttgactttccccagcaactgctcacttgctttgcaaaataacaagggtgaaatgaatagagttggcccctaggccaagaggctggttatgttggggaagggccttatatcctcaaaagctctagcccctctgcatgcctggctgaagcacagcccccgttgagaacctgggggtggagctctggttcatcatcaagggtgtcatccgaatcacccagacaacctggtccattgccccgaccccgccttgaacctacatggtgctcagaatccagtctggagtggtcaggctaggctcgatttttaaagatttcccccaagtgactgatggtacccctagctgaggaagccctctcactttctttcttaatggaaagttaaagaaaacccaagtggactactttccctacagatctattggaagatagatagacctgggaaaagccaatgagcctgcttggaatctgtggtctaagtggcatcagctacaccacaagcttctcatgagggcacccacattcacgctagtgccgtaagcctcagagagagggtgggaaggcataagatggtgagcccttctcccaagcaggtcatgaatagtccacaagcatttgtcaggagcctaacgtgcatgagacattgtggaagatgggaaaatgaataggaccaagcctgttccctaggagaggcagcagaaggtggccttccaagtactgagctattccaagtgtgaccctgcactacacatacgggtgtcacctgggggcagcttcctgggccgtgtcacagactccagtgggatcctgagaagttaggtagaagaatctgcacttcaccaagttccccacctgattctggatgtccaagaaccactggtacctgggctgattagggaaggcctcatggtggggcgctgccagatagagactctgaaaaatgaccaggactgtggccaggaaagacattccagccagaagcatggagtgagggtgggaagcacctactgtatggcaggcaccgttccgcacacacatttgttaatgcacacagttccatgtcagtcctatgatgtaggtgctattcttatcctccctgctttccagataaggaaacaggcactgaaggggcaactgacttacctactgtcacagtggtaagtagcacagcccagattccaacccaggcagtcctggtgtacatgttggcatatactgagaagtcgtagcaaatgaggttgaaaagataagagtggggctgaaccatgcaaagccttgaatgctaatacaaggtaaatttggacctcacaacaagcagaggtgggccattggcgggttttgagtgagacagtaacttgattcacccccaaactaaggagtccttatctatgtgatcagtgccatccatgtcctgtgctgtagggtacatggccggcttcccgagcagggttggtggcagctggcagtggttggtgaatgtccaggaagtcttaactcaagccaccccaaggctgtgattcagaacattttcgtggtccgtctcatctccacctcacgggacagagctggaaggctgtttggtttggccagcgaccgaaagcagagggagccaagagtcacagagtgaagggcaatgtgtgccttcaacagggccctccctctccgccccactctgccttgccccacccctgtccctgggaagggcatcttttagagttaacttttctcattgccatccaaaaatagcttgcttgtttaactagtttgttgtttaaaaaataaacataaaagcaataatacagtcataattttaaaattcaagtactaacaggaaaattaagtaacagactaacggtcccacttctgacttcttagtccactccccagagataaccaatatgaagtttttggtgtatccttccaaaatttttctgtgtatgtgtcacatgtatgtatatatatatgcatccttttagtccttttttacataaatggcatcataccgact

SEQ ID NO: 142773 - DNA, 4093 bp, Homo sapiens
  Payload ID: 8211
  Gene Symbol: ITPRIP
  Gene Name: inositol 1,4,5-trisphosphate receptor interacting protein
  Uniprot ID: Q8IWB1
  ENST ID: ENST00000337478
  CDS Start-End: 173-1816
agcgggggcatcgccgcccgcgcccctctaagtgccgggccgcaagctccaccgcagccgcctgcaagcagcggcgcctcggccctcgacctgcgcgcaaagcctgtgctggagccgtcctcccgcggcggggaccgggaccggggacccaagccaatcgaaagctccaaccatggccatggggctcttccgcgtgtgtctggtggtggtgacggccatcatcaaccacccgctgctgttcccgcgggagaacgccacagtccccgagaacgaggaggagatcatccgcaagatgcaggcgcaccaggagaagctgcagctggagcagttgcgcctggaggaggaggtggctcggctggcggccgaaaaggaggcactggagcaggtggcggaggagggcaggcagcagaacgagacacgcgtggcctgggacctctggagcaccctctgcatgatcctcttcctgatgatcgaggtgtggcggcaggaccaccaggaggggccctcacctgagtgcctgggcggtgaggaggatgagctgcctgggctggggggcgcccccttgcagggcctcaccctgcccaacaaggccacgcttggccacttttatgagcgctgcatccggggggccacggccgatgcagcccgtacccgggagttcctggaaggcttcgtggatgacttgctggaagccctgaggagcctctgcaaccgggacaccgacatggaggtggaggacttcattggcgtggacagcatgtacgagaactggcaggtggacaggccactgctgtgccaccttttcgtgcccttcacaccccccgagccctaccgcttccacccagagctctggtgctccggccgctcagtgcccctggatcgccagggctacggccagatcaaggtggtccgcgccgatggggacacattgagctgcatctgcggcaagaccaagctcggggaagacatgctgtgtctcctgcacggcaggaacagcatggcgcctccctgcggcgacatggagaacctgctgtgtgccacagattccctgtacctggacacgatgcaggtcatgaagtggttccagacggccctcaccagagcctggaagggcatcgcccacaagtacgagttcgacctggcctttggccagctggacagcccggggtccctgaagatcaagttccgttcagggaagttcatgcccttcaacctgattcctgtgatccagtgtgatgactcggacctgtactttgtctcccaccttcccagggagccctctgagggcaccccagcctccagcacagactggctcctgtcctttgctgtctatgagcgacacttcctcaggacgacactaaaggcactgcccgagggcgcctgccacctcagctgcctgcagatagcatccttcctgctctccaagcagagccgcctgaccggtcccagcgggctcagcagctaccacctgaagacggccctactgcacctcctactcctccggcaggccgccgactggaaggcggggcagctggacgctcgtctgcacgagttgctgtgcttcctggagaagagcttgctccagaagaagctccaccacttcttcatcggcaaccgcaaggtgcctgaggccatgggactccctgaggccgtgctcagggccgagcccctcaacctcttccggcccttcgtcctgcagcgaagcctttaccgtaagacactggactccttctatgagatgctcaagaatgccccagcgctcattagcgagtattccctacatgtcccctcagaccagcctaccccaaaaagctgacgtcttttacagaatgtgggatcctcgagctaagatgagggcatccctcacgttcacacccctggtggcatctgccagccctgttctggggacaaggcgggctttcgtgggagccgtgctcagcctgccaggaagccaagccctacagtgcagaggaaacagaatttcaacgggaagctggtttgcttcataccattgggatctgctggtaaagctgttatttgggtttagggactgatcccttgcagtttacttctggatcaccatgaatggccaagatggtggcagaacacgctgtggaccctgagttagagacaatgcaaatgttggattgggtgtaattctttttgaatcccagatccagtctgtacttgaatatgagcagaggatctacaagaatgctgacagggaaccgtgttaagacccagcacccctattcccaggagcttctggcctgaccatctgcagccaaagcactaacagggacagatatgggaatgtccacctttgatccgcatcctgcacaatagtggtcccaccatggctgccacttttttatactatttggagaaaagaccttgtataaattcgaggcccaaatgactaacgtctctgtcacacggaaatgggtacttggtggcatagagaaacacaattagccactttttcagctacacttctcactcagctgcaccctacacttctcactcaggtgcacccccttctgctgtcctttccccaacgtactgggtcccgagcgtggtgggtatttgccacactgggtgccagctcagcagccccccacctctctttattctctccaaagctggtctttctgactatcattgtggtagggggaggacagatgctaaaggtggaagctgacctggagaaagagacacacggggtgactgtggcaaaggacagctggaaaagaaactctatcacttcttcattggcaaccacaaggcacctgaggccatggcactcccagaggctgtgcgcagagccaagcctctcaacctcttctggccctgcgtcctgcagcgaagtctctgctgtaagacagtagactccttcgatgaggtgctcaaaaatgctacccggggtggtggtgtctggcttgcagtctggcccagttcagagaaagttgcagagatcaggggccaaggatgtcatagccccaggttgtcctcagggtcccaatcctagggcagggtgtgcatggaagcaagaactatggaaacctagctccagtctgcaggctctgagcccctagttcctcactccagcggggctccctcactgcacagaacccaccccttctgtgtgggcactgctgaccacacagatgacccagacccaaagagcctggcagaagctctgtggttggagctgggctccgtctccaggtctggttcagggggatcaggaaggctcttttccacctgtggcttcactggccctttgagatttcctatctcaccgttacttcagttacccttgcagggggccagggagtcaagaatataccgtgttcctccagggtttaagccggccatgccttcccgagagcataaccaacttgacaggggtgcccagttaccccacaaactgaaggaaggagatccttcccccatccccaggagtgctctcaaccagcctcagaaagcttgagaagatggaccctttgcccaccagggttaattcctggtggggcagctcggctgtgatcagggcaaccaaacctataggaagccttccagtgtgagctggaattagactgaacatgtgcttgggcctgcctctccctagacgcagttgcggggcactccagggaatgaaccagctcaagtgtgtccctaacagcagcctggagctacccccaatccctcacagcctgaccctcctcattccatcagatgcatttgtagaatcggggcaaatttccttatttatttatggcccatgcctttccccctcttcatcctgatcccgttttgctttgaagagaccccagtaaccaaaaaacagcctccagaagccaaaaccatgcctggatctcccatagcttctcctttgcttccaggagaaagttcactgaaaaaaaaatatcttctggcttcttgtgtgtacagagacaacagaactcggtggggaaacgggaatcttttctgcaccaaagctgcttctaaagcagaaagcagtggggctcttggtgtttcatgctgccttatttatattaaaggaagaattaaatcttgcaaggagtagaaa

SEQ ID NO: 142774 - DNA, 3981 bp, Homo sapiens
  Payload ID: 8211
  Gene Symbol: ITPRIP
  Gene Name: inositol 1,4,5-trisphosphate receptor interacting protein
  Uniprot ID: Q8IWB1
  ENST ID: ENST00000358187
  CDS Start-End: 74-1717
gaacagtctgggatttctttcactgtgtggggcctagaatctcaggaagccaggacgtgggaaagctccaaccatggccatggggctcttccgcgtgtgtctggtggtggtgacggccatcatcaaccacccgctgctgttcccgcgggagaacgccacagtccccgagaacgaggaggagatcatccgcaagatgcaggcgcaccaggagaagctgcagctggagcagttgcgcctggaggaggaggtggctcggctggcggccgaaaaggaggcactggagcaggtggcggaggagggcaggcagcagaacgagacacgcgtggcctgggacctctggagcaccctctgcatgatcctcttcctgatgatcgaggtgtggcggcaggaccaccaggaggggccctcacctgagtgcctgggcggtgaggaggatgagctgcctgggctggggggcgcccccttgcagggcctcaccctgcccaacaaggccacgcttggccacttttatgagcgctgcatccggggggccacggccgatgcagcccgtacccgggagttcctggaaggcttcgtggatgacttgctggaagccctgaggagcctctgcaaccgggacaccgacatggaggtggaggacttcattggcgtggacagcatgtacgagaactggcaggtggacaggccactgctgtgccaccttttcgtgcccttcacaccccccgagccctaccgcttccacccagagctctggtgctccggccgctcagtgcccctggatcgccagggctacggccagatcaaggtggtccgcgccgatggggacacattgagctgcatctgcggcaagaccaagctcggggaagacatgctgtgtctcctgcacggcaggaacagcatggcgcctccctgcggcgacatggagaacctgctgtgtgccacagattccctgtacctggacacgatgcaggtcatgaagtggttccagacggccctcaccagagcctggaagggcatcgcccacaagtacgagttcgacctggcctttggccagctggacagcccggggtccctgaagatcaagttccgttcagggaagttcatgcccttcaacctgattcctgtgatccagtgtgatgactcggacctgtactttgtctcccaccttcccagggagccctctgagggcaccccagcctccagcacagactggctcctgtcctttgctgtctatgagcgacacttcctcaggacgacactaaaggcactgcccgagggcgcctgccacctcagctgcctgcagatagcatccttcctgctctccaagcagagccgcctgaccggtcccagcgggctcagcagctaccacctgaagacggccctactgcacctcctactcctccggcaggccgccgactggaaggcggggcagctggacgctcgtctgcacgagttgctgtgcttcctggagaagagcttgctccagaagaagctccaccacttcttcatcggcaaccgcaaggtgcctgaggccatgggactccctgaggccgtgctcagggccgagcccctcaacctcttccggcccttcgtcctgcagcgaagcctttaccgtaagacactggactccttctatgagatgctcaagaatgccccagcgctcattagcgagtattccctacatgtcccctcagaccagcctaccccaaaaagctgacgtcttttacagaatgtgggatcctcgagctaagatgagggcatccctcacgttcacacccctggtggcatctgccagccctgttctggggacaaggcgggctttcgtgggagccgtgctcagcctgccaggaagccaagccctacagtgcagaggaaacagaatttcaacgggaagctggtttgcttcataccattgggatctgctggtaaagctgttatttgggtttagggactgatcccttgcagtttacttctggatcaccatgaatggccaagatggtggcagaacacgctgtggaccctgagttagagacaatgcaaatgttggattgggtgtaattctttttgaatcccagatccagtctgtacttgaatatgagcagaggatctacaagaatgctgacagggaaccgtgttaagacccagcacccctattcccaggagcttctggcctgaccatctgcagccaaagcactaacagggacagatatgggaatgtccacctttgatccgcatcctgcacaatagtggtcccaccatggctgccacttttttatactatttggagaaaagaccttgtataaattcgaggcccaaatgactaacgtctctgtcacacggaaatgggtacttggtggcatagagaaacacaattagccactttttcagctacacttctcactcagctgcaccctacacttctcactcaggtgcacccccttctgctgtcctttccccaacgtactgggtcccgagcgtggtgggtatttgccacactgggtgccagctcagcagccccccacctctctttattctctccaaagctggtctttctgactatcattgtggtagggggaggacagatgctaaaggtggaagctgacctggagaaagagacacacggggtgactgtggcaaaggacagctggaaaagaaactctatcacttcttcattggcaaccacaaggcacctgaggccatggcactcccagaggctgtgcgcagagccaagcctctcaacctcttctggccctgcgtcctgcagcgaagtctctgctgtaagacagtagactccttcgatgaggtgctcaaaaatgctacccggggtggtggtgtctggcttgcagtctggcccagttcagagaaagttgcagagatcaggggccaaggatgtcatagccccaggttgtcctcagggtcccaatcctagggcagggtgtgcatggaagcaagaactatggaaacctagctccagtctgcaggctctgagcccctagttcctcactccagcggggctccctcactgcacagaacccaccccttctgtgtgggcactgctgaccacacagatgacccagacccaaagagcctggcagaagctctgtggttggagctgggctccgtctccaggtctggttcagggggatcaggaaggctcttttccacctgtggcttcactggccctttgagatttcctatctcaccgttacttcagttacccttgcagggggccagggagtcaagaatataccgtgttcctccagggtttaagccggccatgccttcccgagagcataaccaacttgacaggggtgcccagttaccccacaaactgaaggaaggagatccttcccccatccccaggagtgctctcaaccagcctcagaaagcttgagaagatggaccctttgcccaccagggttaattcctggtggggcagctcggctgtgatcagggcaaccaaacctataggaagccttccagtgtgagctggaattagactgaacatgtgcttgggcctgcctctccctagacgcagttgcggggcactccagggaatgaaccagctcaagtgtgtccctaacagcagcctggagctacccccaatccctcacagcctgaccctcctcattccatcagatgcatttgtagaatcggggcaaatttccttatttatttatggcccatgcctttccccctcttcatcctgatcccgttttgctttgaagagaccccagtaaccaaaaaacagcctccagaagccaaaaccatgcctggatctcccatagcttctcctttgcttccaggagaaagttcactgaaaaaaaaatatcttctggcttcttgtgtgtacagagacaacagaactcggtggggaaacgggaatcttttctgcaccaaagctgcttctaaagcagaaagcagtggggctcttggtgtttcatgctgccttatttatattaaaggaagaattaaatcttg

SEQ ID NO: 142775 - DNA, 796 bp, Homo sapiens
  Payload ID: 8211
  Gene Symbol: ITPRIP
  Gene Name: inositol 1,4,5-trisphosphate receptor interacting protein
  ENST ID: ENST00000458723
  CDS Start-End: 454-796
gtgcgctcttcaggacagcagaggtcggttggaggtctgcattctctgccgacttgggccccaacttccccatcaggtcactgctccctcctctgaggtctggacaaaggacaaggctgtagggacctagactgtcctagacggggaggacatctatcctcagtggtctttccagcagtttgtttggagctgctcatcctgatcttttggctgactctggcagagggaaagtcagatttgaggcctgagctctaacaggcatccagagaggaaggaagggcccaccccgtgacatcagtgaaacggaagcaccctgcaggtgacatcactgttgctcagggcaacgcctccaccctaaggcggacggggaggtgaaaaatcggcctcaagtgtgagacgcatgttgaagggaagggacatagaaggtgtaacgttcacaggaaagctccaaccatggccatggggctcttccgcgtgtgtctggtggtggtgacggccatcatcaaccacccgctgctgttcccgcgggagaacgccacagtccccgagaacgaggaggagatcatccgcaagatgcaggcgcaccaggagaagctgcagctggagcagttgcgcctggaggaggaggtggctcggctggcggccgaaaaggaggcactggagcaggtggcggaggagggcaggcagcagaacgagacacgcgtggcctgggacctctggagcaccctctgcatgatcctcttcctgatgatcgaggtgtggcggcaggaccaccaggaggggccctcacctgagt

SEQ ID NO: 142776 - DNA, 4295 bp, Homo sapiens
  Payload ID: 8212
  Gene Symbol: ITPRIPL1
  Gene Name: inositol 1,4,5-trisphosphate receptor interacting protein-like 1
  Uniprot ID: Q6GPH6
  ENST ID: ENST00000361124
  CDS Start-End: 386-2077
ggcaggttcagggctttctggctataaaagggagcctctgggatcagcaggtcatatctggtgcccatggttgactgaggagtcgggtgaggccaccctaccacaagggtccccctccccatcctacacaggaatgaaaacagtcccatgtacactttctggaagcctaaataccacccacaccatgtggaaggaaagcaggagagagactgagtggcacatcctttcgccctcttttctctcgaacctcctcccaggccgaccacccttgctgtgtccaagccaagctctgtgggctttctgttcctcctgagtagctgattttcagaatttggggtaccagggctctggggaatgtgagctagagagcagataagtctggaagatgaccactgactcctactctcctacttctccagatgcagaggcctccatggctgtgataagcctgctgttcttggcagtgatgtatgttgttcaccaccctctgatggtcagtgatcggatggacctggacacattagccaggagtcggcagctggagaagcgaatgagtgaggagatgcgcctgctagagatggagtttgaagagagaaagcgagccgctgagcagaggcagaaggcagagaacttctggacaggagacacatccagtgaccagttagtgctggggaagaaagacatggggtggccgttccaggccgatggccaggaagggcctctgggctggatgctgggaaacctgtggaacactggcctcttttgcctttttctcgtctttgagctcctgcgacagaacatgcagcatgaaccggcctttgattccagcagtgaggaggaggaggaggaagtccgtgttgtccctgtcacctcttacaactggcttactgacttcccctcccaggaggccctggactccttttacaaacactatgtccaaaatgccatccgtgacctgccctgcacctgtgagtttgtggagagttttgtggatgatctcattgaggcctgtcgggtgctcagccgccaagaggctcacccacaattggaagactgcctgggcatcggggctgcctttgagaaatggggaaccctccatgagacccagaaatttgatatcctggtgcccattgtccccccacagggcaccatgtttgtcctggagatgagggacccagccctgggccgccgctgtggctgtgtgctggtggagtcagaatgtgtgtgcaagcgtgagaaactcctaggggacgtgctgtgcctggtgcaccaccacagggacccctcggcagtcttggggaagtgtagtagctccatcaaggcagctctctgcaccggcttccacctagacgtgtgcaagactgtgcagtggttccggaacatgatgggcaatgcctgggcccttgtggcccacaagtatgactttaaactcagtctcccaccgtctaccacctcctgcaagctccggctggactatcgctcaggccgctttctctcaatccacttggtcctgggggtgcaacgagaagacaccttggtctacctggtgagtcaggctcctgaccaggagcagctcaccagtgtggactggcctgagtcctttgtggcctgtgagcacctgttcctgaagctggtggggcgctttgcccccgagaacacctgtcacctcaagtgcctccagatcattttaagtctccggcagcatcagagcttaccccatggagcatcccgccccatcctcacttcttaccattttaaaacagctctcatgcacctcttgctacggctgcccctcacggactgggcccacaacatgctctctcagcggctccaggacattctctggttcttgggccgtggcctccagcaaaggtccctccatcatttcctcattggtaacaattttctgcccctgaccatcccaatccctaagacatttaggaatgctgagccggtcaatctcttccaacacctggtgctcaaccccaaggcacattcacaggcagtggaagagttccaaaaccttctgacccaggtgaaaactctgcctcatgccccactggctgcagcaccttgatgtaaagaccattaaaaaaaaaacagaggaaggtatttctaattccttgggctacaaaagtgtttacttttcagatatatcagtggtatatgtgaccttcaccttgccagtgggggctatgatgagacaccttaaggagcgtgtgaggtggtcatgaggatgggcataatgaccctgcagggcctagtcaaggatgggtcatctgaggttttcttctgctaactttcatcatgacccaaagaaggtccagggaaacggatgttatgggaggatcttgctgctaaggaggtgagatccagagggtcactgtgaagttgtgtttttgtatcaacactcgaagtgagagaaccagagaataccttcattccagcttattcctttttgtgattgacttccagtatgttccttgtgaattggtttccttgttgaactgttagcttaattctcatccgagctggtggcactccattttatcccaaatactgtgatgggcaacttctcataatttacgatctaatttttcaaaccttcactattttgaaaatataaccaaggccggttgcggtggctcacgcctgttaatcccagcactttggggggccgaggtgggtgtatcgcctgagttcaggagttcaagaccaccccgggcaacatggtgaaaccccatctctgctaaaatacacaaaattagccgggcatggtggcgcgcacctgtagtcccagctacttgggaggctgaggcacgagaatcacttaagccccagtggtggaggttgcagtgagccgagatcgcaccactacacttcagcttggactacagagtgagaatctgtctcaaaaaaaaaaaaattatatatatatatatatatatatatatatatatatatatatatatctccaagatgtttacattccattttcttaacttagccctattttcatatgacaatagagttgtttttatgcatctgaaaaaactacctaatttattcgcattgattcacaaatattaagtcaatagtaacctgtctcataattgagataatgtatttaccataataatgaaatggttaacatctgatgacctttttaaggtgcctggaggcaacattataaaggccttcacaaggacaatctttttgggggctctgagatgaataattactttgttgcttgtggggagccacttgttgagtgtaaagaaggtttagctgccatgtttagctgtgctttttctgtctggccatgcctcctttgtatttttttttttttttttcaaaaatgacaaagggattacttgaactgtgtttgtggttttgaaagagaggtcatcacaatccaggctcactgccaggtttgtataggaaaggattgggaaacagtccaactctaaaattgtgattctagagatataattggtgtatttttcccttttttcaaaaccatgggatgctgaggaggagtgttaagaaatgcaactatagttatgggtgtgattgttttggaaacgccaatgctgttctatctgcactgccaagaagatctgctggggagggtaacctgtccccactgaacttgacctcagcagggatcagatgctggcccttataggcttcagtcatagaatacacaccctctcctccagcaaaaataaattaaaaatgtcccaaagccaggtgcagtggctcacacctgtaatcccagcactctgggaggctgaggtgggaagatcacttgagcccaggagttcaagaccagcctgggcaacatgtcgcaatcccgtctctacaaaaaattagctgggcatggtggcatatacctgtgatccctgctactctggaggttgaggcggaaagactgcttgagcccaggaggtcagggctgtagtgagctatgatagtgtcactgtgctccagcgaccctgggcaaaaaagtgagaccgcgtctcaaaaaaaaaaaaaaaaaaaaaaaaaaaaaaggttcccagaagctgatgccagtcaatcattggggctcccagtgcacaatagctactgtgttcctgtgttgcctgcatctgtcaggtaccgctttcaatgcaagatgcaatcatggttgcttccctgctgatgggattttggtgttttagcaacattcacatactttttgtttagaaaattatttgctgatgttttaagttaaagtcaataaaggaggctattttctgtatacattggaa

SEQ ID NO: 142777 - DNA, 1946 bp, Homo sapiens
  Payload ID: 8212
  Gene Symbol: ITPRIPL1
  Gene Name: inositol 1,4,5-trisphosphate receptor interacting protein-like 1
  Uniprot ID: Q6GPH6
  ENST ID: ENST00000439118
  CDS Start-End: 252-1919
gctcggacaagcatggtctataacccaggaaaggggagcagggccactcccgcgggcggccccagcgatgaaccggacgcccccaccctgccgggaaaaaagcagtggcggtcaggccgcgctgtctctttaagatcgtgttcctactaacactgacgggctcctagagagggcggggagacgaagcaaggccaagttccaaagggaggataggcccagctggcttcagcgtccacacggcatagtccttcatgaatgttgatgcagaggcctccatggctgtgataagcctgctgttcttggcagtgatgtatgttgttcaccaccctctgatggtcagtgatcggatggacctggacacattagccaggagtcggcagctggagaagcgaatgagtgaggagatgcgcctgctagagatggagtttgaagagagaaagcgagccgctgagcagaggcagaaggcagagaacttctggacaggagacacatccagtgaccagttagtgctggggaagaaagacatggggtggccgttccaggccgatggccaggaagggcctctgggctggatgctgggaaacctgtggaacactggcctcttttgcctttttctcgtctttgagctcctgcgacagaacatgcagcatgaaccggcctttgattccagcagtgaggaggaggaggaggaagtccgtgttgtccctgtcacctcttacaactggcttactgacttcccctcccaggaggccctggactccttttacaaacactatgtccaaaatgccatccgtgacctgccctgcacctgtgagtttgtggagagttttgtggatgatctcattgaggcctgtcgggtgctcagccgccaagaggctcacccacaattggaagactgcctgggcatcggggctgcctttgagaaatggggaaccctccatgagacccagaaatttgatatcctggtgcccattgtccccccacagggcaccatgtttgtcctggagatgagggacccagccctgggccgccgctgtggctgtgtgctggtggagtcagaatgtgtgtgcaagcgtgagaaactcctaggggacgtgctgtgcctggtgcaccaccacagggacccctcggcagtcttggggaagtgtagtagctccatcaaggcagctctctgcaccggcttccacctagacgtgtgcaagactgtgcagtggttccggaacatgatgggcaatgcctgggcccttgtggcccacaagtatgactttaaactcagtctcccaccgtctaccacctcctgcaagctccggctggactatcgctcaggccgctttctctcaatccacttggtcctgggggtgcaacgagaagacaccttggtctacctggtgagtcaggctcctgaccaggagcagctcaccagtgtggactggcctgagtcctttgtggcctgtgagcacctgttcctgaagctggtggggcgctttgcccccgagaacacctgtcacctcaagtgcctccagatcattttaagtctccggcagcatcagagcttaccccatggagcatcccgccccatcctcacttcttaccattttaaaacagctctcatgcacctcttgctacggctgcccctcacggactgggcccacaacatgctctctcagcggctccaggacattctctggttcttgggccgtggcctccagcaaaggtccctccatcatttcctcattggtaacaattttctgcccctgaccatcccaatccctaagacatttaggaatgctgagccggtcaatctcttccaacacctggtgctcaaccccaaggcacattcacaggcagtggaagagttccaaaaccttctgacccaggtgaaaactctgcctcatgccccactggctgcagcaccttgatgtaaagaccattaaaaaaaaaacaga

SEQ ID NO: 142778 - DNA, 1788 bp, Homo sapiens
  Payload ID: 8212
  Gene Symbol: ITPRIPL1
  Gene Name: inositol 1,4,5-trisphosphate receptor interacting protein-like 1
  ENST ID: ENST00000420728
  CDS Start-End: 1-1763
agaggaaaggtgtcacccaggcaggttcagggctttctggctataaaagggagcctctgggatcagcaggtcatatctggtgcccatggttgactgaggagtcggatgcagaggcctccatggctgtgataagcctgctgttcttggcagtgatgtatgttgttcaccaccctctgatggtcagtgatcggatggacctggacacattagccaggagtcggcagctggagaagcgaatgagtgaggagatgcgcctgctagagatggagtttgaagagagaaagcgagccgctgagcagaggcagaaggcagagaacttctggacaggagacacatccagtgaccagttagtgctggggaagaaagacatggggtggccgttccaggccgatggccaggaagggcctctgggctggatgctgggaaacctgtggaacactggcctcttttgcctttttctcgtctttgagctcctgcgacagaacatgcagcatgaaccggcctttgattccagcagtgaggaggaggaggaggaagtccgtgttgtccctgtcacctcttacaactggcttactgacttcccctcccaggaggccctggactccttttacaaacactatgtccaaaatgccatccgtgacctgccctgcacctgtgagtttgtggagagttttgtggatgatctcattgaggcctgtcgggtgctcagccgccaagaggctcacccacaattggaagactgcctgggcatcggggctgcctttgagaaatggggaaccctccatgagacccagaaatttgatatcctggtgcccattgtccccccacagggcaccatgtttgtcctggagatgagggacccagccctgggccgccgctgtggctgtgtgctggtggagtcagaatgtgtgtgcaagcgtgagaaactcctaggggacgtgctgtgcctggtgcaccaccacagggacccctcggcagtcttggggaagtgtagtagctccatcaaggcagctctctgcaccggcttccacctagacgtgtgcaagactgtgcagtggttccggaacatgatgggcaatgcctgggcccttgtggcccacaagtatgactttaaactcagtctcccaccgtctaccacctcctgcaagctccggctggactatcgctcaggccgctttctctcaatccacttggtcctgggggtgcaacgagaagacaccttggtctacctggtgagtcaggctcctgaccaggagcagctcaccagtgtggactggcctgagtcctttgtggcctgtgagcacctgttcctgaagctggtggggcgctttgcccccgagaacacctgtcacctcaagtgcctccagatcattttaagtctccggcagcatcagagcttaccccatggagcatcccgccccatcctcacttcttaccattttaaaacagctctcatgcacctcttgctacggctgcccctcacggactgggcccacaacatgctctctcagcggctccaggacattctctggttcttgggccgtggcctccagcaaaggtccctccatcatttcctcattggtaacaattttctgcccctgaccatcccaatccctaagacatttaggaatgctgagccggtcaatctcttccaacacctggtgctcaaccccaaggcacattcacaggcagtggaagagttccaaaaccttctgacccaggtgaaaactctgcctcatgccccactggctgcagcaccttgatgtaaagaccattaaaaaaaaaaca

SEQ ID NO: 142779 - DNA, 790 bp, Homo sapiens
  Payload ID: 8212
  Gene Symbol: ITPRIPL1
  Gene Name: inositol 1,4,5-trisphosphate receptor interacting protein-like 1
  ENST ID: ENST00000420176
  CDS Start-End: 250-790
gctgcggcgcgcgggcgccctcggagccgcgtgctgggggtcgtaggggcccaccgcgctcagccagacgttcagacgctcggacaagcatggtctataacccaggaaaggggagcagggccactcccgcgggcggccccagcgatgaaccggacgcccccaccctgccgggaaaaaagcagtggcggtcaggccgcgctgtctctttaagatcgtgttcctactaacactgacgatgcagaggcctccatggctgtgataagcctgctgttcttggcagtgatgtatgttgttcaccaccctctgatggtcagtgatcggatggacctggacacattagccaggagtcggcagctggagaagcgaatgagtgaggagatgcgcctgctagagatggagtttgaagagagaaagcgagccgctgagcagaggcagaaggcagagaacttctggacaggagacacatccagtgaccagttagtgctggggaagaaagacatggggtggccgttccaggccgatggccaggaagggcctctgggctggatgctgggaaacctgtggaacactggcctcttttgcctttttctcgtctttgagctcctgcgacagaacatgcagcatgaaccggcctttgattccagcagtgaggaggaggaggaggaagtccgtgttgtccctgtcacctcttacaactggcttactgacttcccctcccaggaggccctggactccttttacaaacactatgtccaaaatgccatccgtgacctgccctgcacctgtgagt

SEQ ID NO: 142780 - DNA, 1947 bp, Homo sapiens
  Payload ID: 8212
  Gene Symbol: ITPRIPL1
  Gene Name: inositol 1,4,5-trisphosphate receptor interacting protein-like 1
  Uniprot ID: Q6GPH6
  ENST ID: ENST00000536814
  CDS Start-End: 250-1893
gctgcggcgcgcgggcgccctcggagccgcgtgctgggggtcgtaggggcccaccgcgctcagccagacgttcagacgctcggacaagcatggtctataacccaggaaaggggagcagggccactcccgcgggcggccccagcgatgaaccggacgcccccaccctgccgggaaaaaagcagtggcggtcaggccgcgctgtctctttaagatcgtgttcctactaacactgacgatgcagaggcctccatggctgtgataagcctgctgttcttggcagtgatgtatgttgttcaccaccctctgatggtcagtgatcggatggacctggacacattagccaggagtcggcagctggagaagcgaatgagtgaggagatgcgcctgctagagatggagtttgaagagagaaagcgagccgctgagcagaggcagaaggcagagaacttctggacaggagacacatccagtgaccagttagtgctggggaagaaagacatggggtggccgttccaggccgatggccaggaagggcctctgggctggatgctgggaaacctgtggaacactggcctcttttgcctttttctcgtctttgagctcctgcgacagaacatgcagcatgaaccggcctttgattccagcagtgaggaggaggaggaggaagtccgtgttgtccctgtcacctcttacaactggcttactgacttcccctcccaggaggccctggactccttttacaaacactatgtccaaaatgccatccgtgacctgccctgcacctgtgagtttgtggagagttttgtggatgatctcattgaggcctgtcgggtgctcagccgccaagaggctcacccacaattggaagactgcctgggcatcggggctgcctttgagaaatggggaaccctccatgagacccagaaatttgatatcctggtgcccattgtccccccacagggcaccatgtttgtcctggagatgagggacccagccctgggccgccgctgtggctgtgtgctggtggagtcagaatgtgtgtgcaagcgtgagaaactcctaggggacgtgctgtgcctggtgcaccaccacagggacccctcggcagtcttggggaagtgtagtagctccatcaaggcagctctctgcaccggcttccacctagacgtgtgcaagactgtgcagtggttccggaacatgatgggcaatgcctgggcccttgtggcccacaagtatgactttaaactcagtctcccaccgtctaccacctcctgcaagctccggctggactatcgctcaggccgctttctctcaatccacttggtcctgggggtgcaacgagaagacaccttggtctacctggtgagtcaggctcctgaccaggagcagctcaccagtgtggactggcctgagtcctttgtggcctgtgagcacctgttcctgaagctggtggggcgctttgcccccgagaacacctgtcacctcaagtgcctccagatcattttaagtctccggcagcatcagagcttaccccatggagcatcccgccccatcctcacttcttaccattttaaaacagctctcatgcacctcttgctacggctgcccctcacggactgggcccacaacatgctctctcagcggctccaggacattctctggttcttgggccgtggcctccagcaaaggtccctccatcatttcctcattggtaacaattttctgcccctgaccatcccaatccctaagacatttaggaatgctgagccggtcaatctcttccaacacctggtgctcaaccccaaggcacattcacaggcagtggaagagttccaaaaccttctgacccaggtgaaaactctgcctcatgccccactggctgcagcaccttgatgtaaagaccattaaaaaaaaaacagaggaaggtatttctaattccttgggcta

SEQ ID NO: 142781 - DNA, 7247 bp, Homo sapiens
  Payload ID: 8213
  Gene Symbol: ITPRIPL2
  Gene Name: inositol 1,4,5-trisphosphate receptor interacting protein-like 2
  Uniprot ID: Q3MIP1
  ENST ID: ENST00000381440
  CDS Start-End: 80-1687
ctgtgcgcatgctgggcttgggtcgccgccggggcttgccccctgggctgctcggccaccgccgccccgggcgcccggcatgtcggtgcactacaccctcaatctacgcgtcttctggcccctggtgaccggcctgtgcaccgccctggtgtgcctctaccatgtcctgcggggaagcgggggcgcccgggccgagcccgccgacggcgtggatggcggcttcccgttgcttaaggtggccgtcctgctcctcctcagctatgtcctcctgcgctgtcgccacgctgtccggcagcgcttcctgcccgggtctccccgtctggagggtcacgccgccttctcctcgagacacttccgagagccgggcctcagcatcctgctggagagttactacgagcatgaggtgcgcctgtctccgcacgtgttgggccacagcaaggcgcacgtgagccggatcgtgggcgagctggtgcgggctggccgcgcccgggggtcccccggtctcattcctgggggagcgctggccttggccttccgcggagacttcatccaggtgggcagcgcctacgagcaacataaaatccgccggcccgacagcttcgacgtgctggtgccactgcgcctcccgccgcttgtggcgctggagccacggagcctgggcgaggagccagcgctggccccggccttccgcggctgcttcttgtgcgccctcaaggcaccaccctcaccatcgggggcctcggggggccactggcttcgggactgcaaaccctttgctgatgccttctgcgtggatgtgcgcgggcggcgtcacctctctgctactctggtgctgcgctggttccagtcgcatctgcagcgctccttggccactgtgcgttacagcctggaggggcgctgtcgggtcaccttgaccccaggtggcctggaacagccccccaccttacacatcttgccctgccgcactgactacggctgctgccgcctttctatggctgtgcgtctcatccccgctgtccatctgggagatggggtcttccttgtggcgccaccaccgccacccttgcccagcgcgcccctgttggagctccctgagggcctgcgtgcggaggcactgtggggtgtgaacacagcacgccaggagcagaagctgctgagttggctgcaggaacgggcagctccaggtgcctgctacctcaagtgcctgcagttgcttaaggctctgcgcgatctgggggcccgtgggctggactcagcggccgccacccagtggggacgcatcctatcctcatatgtgctcaagacagtgctgctggcagtgctgctgcgcaagggggcccctgggcaaggctgggacgaggagcacctgggaaggtgtttggaggagttggtgcagttccttagggactgcctgctgcgacgccatacgctcttccactgcgtcctgggccctggtggggcggctgccgaggtgggtcccctgcccaaggcactgagggaagccgccccagttgacctcctggccgctttcgacgggcacgcccgggaacttgcagcagcgcggttgctgtccacgtggcaaaggctgccccagcttctccgggcctacgggggtccccgctaccttgccaggtgccccccaccccggagtcagcgcacccagggcttccttgaaggtgaaccgtaaaccctgacagcacccccacctgaccaaatgctcctaaagcctttcccactgggtgggggtgggaatggcggtgaagccagttaaatgcaagattgcagaaggcattggaaaatttggtggctgccacaagctttagtggcttaaatatcaccttctcgcttcacagtccagtataatatgacatcttcacacccactagagtgtcctgggcaaaccatgggaagacatccaacaggagacccaagaattggttcaaatattgttctgtgtagacggattctgtagaaggatgtggcttttagagaagtccagtagaagaagcaagaactagctgcagggaaagttccttctgtcggtttttagacacagatctctctgcccaaattaaaaaaaaacaaaacaaaacactaaagtttttgacacaattacttgctaggtactgggttcctgattgtctttaaaaagaaaaatctgaatctttatttgcaactggaattgaagttctattttaggggctaatgtttagaggaacataatttccactgttcaaattaatattaatgtatttttaaaatggtgcaatcacaggtgtttgacaagattgtcaacaagttaagtcacatagatggaaaggcaatcgagagttggttagagaagcttccagagaaaatagcactttatattgatcaattcactcattttgtggtaattgctagcaccaagcattgcatctgaaagggaagccagttatatttattattaaatgtacaaccttgaaaagcagccagcatgcttgcctaactaacatcgccgcaggccacaagctgggatatgtacctgtccgtcaacatccattcattaaactacctactaccagccagagatgtctggaaccaaagtagcaaccaaatacatattcaagacaacactggtgaaggcataaaacatgttggctttggagaaagatgtgttttaggctttgcctgtaaaggtgtttctccaaggctggctgctggctggagacagaaaacttttttgttttaaggtttttagcaaactccttcacaaagagatttctttctgagcttaatgagctaatgaagaggaaatgcctgctgcttagcatgtggtttgtgctgggtctctaaccattgatggttcttccttgtccaggcagtcttacgtggtccaagagacctgttgattcagcacaggtcttgcaaaacatttcacttatagttcagtatcttgggctctgtgcttgaagatcagttactccctggtcgtgggcagaggagacaaattaggaaaagagcaagggagacagcccttgacggcagtctgtctcttttctctttaggtgtcagtatcaccaggttgggtgtattttgcagctgggaggagccggtcctggaattcttccttgttctcccaaatttataacagtcctcaattgcagtttaagttcagcatggcccctcatctgcttgcctgattggaaatgcagccagtccaagtgttacaaattgggatttttttgttttctaaataaaaacatgtacttcctcagactcttaaagctaaaatttggaagacagaaatgcctatgtgaatagaatcattgttgaagttctgagctcttttgagggaactctataagccttctttctttaggggatccacttgcctgctgtgggaaatcatagtgagtgatttacaggaatccttctcctccaagctgcattggcttcttatatcctttgcgaccttgggctgaaagagaaacagctgcaaatgttgtgctgtctctttgaggttgtcttggggacagttccccgcaaaggtcattcctagcttttgaggtcaatgttgggtcataaggtactgcattgtgcaaagaagtcagtctgctaactttatgcaaagatagaaactgcacggtattttttaaaattagtttttaaaataaatgccaagagtagatcttatatatatatatatgtatacatattttatatatatatatatttccatactcaaccacaacttcctctgtactcattgtttactacagtgggggacatcaagggttggaaggattataaagctttaaggctgggcgtggtggctcacgcctgtaatcccagcactttgggaggcgaggtgggcggatcacctgaggtcaggagttcaagaccagcctagccaacatagtgaaactctgtctctactaaaaaatacaaaaattagctgggcgtggtggcgggcgcctgtaatcccagatactcgggaggctaaggcaggagaatcacttgaacccgggaggtgaaggttgcagagagccaagatcacaccactgcactccagcctgggtgaccgagcgagactccgtctcaaaaaaaaaaaaaaaaagctttaaaaagctgaattttagaaatatttctagcagtgtcagtgagttcctcttttaatagtgttttaaagtataaatctggtaacatactgttcttgtagttttttgttagttttgtttttcaggttaattacccaaagcctcatccatcctcaaggtttttaaattttatttttttaaaataaattgtgcattgtatttgtgaatttttaaaatattactgttttatttaaatgccatgctgagcaattgttctctgtacatggtaaccaaaacttagagatttcgatcaattttgatcaatgtttagtaaaccaaaacatgtactgtgtacaacggaaataatatggcatattagccaggcatgatggttgcccaagacagttaaattaagctcaattctgtattttattagggctctgttatgtccttcatctgaaatgtacacatttttggtgtatgcttggtactggagattcatatatgcaaatattctcatgcaagaagttccacagtaacaacagcaaaaagaaaaaattagttgtccagccagtgctggaggaaaatgtttctggggaagatgactcagtcattttgtggcgagacaccctttggtaactcccactgaccagtcttgggagccttcctggaatgatcgtgggctgagcggagatgttttttgcaaaatgaaactgaagctgaaagaaaggagaattcgagtgaaccaagagaaatccaaagacctggggaaggaggacttaagatgaaagtgaagcaagagagggaaggggaaatgaagtgaaaatggcgtgagggtgtgagagaggtttgggttaggaaacatgtttttagtgctatttccaaccaggggtcgcaaactcagcagcctgtagaaacaggggtgggaggtgggggggaagctgtgcccacctttaaagagggggccattgctcagccatgcagaaaaaaatggggcaacaagctggaaatcaggttttttttttttaaagtgaaacttgatgatttttaaacaagtaattaaaaaaatgtccaaaacaccatgtgggccaaacatttgtttgagcctgggggccaccagtttgcgaccactgccttacgtagttaacaccctgagtatgtatacagtcatattttttgttttggatatggtagtgttatatatacttgggggcgtgatatttgaagtcatctttatctctcagagttaagctttattgtagaagaaaaaaaaaaaagttaacacagccatagataacacttaactcacagttcccaggaggacacttgatctcgaagctgctctttttgagtcagatcctacatcaaaccacttagggccagtttttggcatttccttcctggtgatttggggtaaacttctttgctctgtcggagtttgcagatgagtaatcagaaggattgcagaataacttgtttctttgtattttattcttacatttaaattaattttggggggttagtggtatcctagctcgtgcctttacagggatgattggtggctagatttggggtgcaagcttcttaggctcataccatttcaactaccaagaacacaggtttttgtttttgttttttgagacagggtctcagtctgttgcccaggctggagtgcagtggcaagattgcagctcattgcagccttgacctcctgggctcaagcgatcctcctgcctcggcctcccaactagctgggaccacaggtatgtgccactacacccagcgaatttttaaattatttgtagagtcagggtctccctatgttgcccaggctggtcttgaactactggactcaagccatcctcccacctcggcctcccaaagtgttgggattataggcgcgagccaccacacctggcctaaaagcgtcgttctgatcagacttcacccctgaatgtttctatcattttcttttctttttttttttttttcgagacagagttttgctcttgttttacaggctggggtgcggtgggatgatcttggctcactgcaatctcctcctcccaggttcaagtgattcttgggccttagcctcccgagtagctgggattacaggcacctgccaccacgcctggctaatatatatatatatatatatatattttttttttttttttttagtagagatggggtttcatcatgttggccaggctggtctcgaactcctgacctcaggtgatctacctgcctcggcctcccaaagtgcagggattacaggtgtgagtgagccaccgcggccggcctctatcattttctgactcagcagctccaccaaaattgacatcctagcaaacactgtgaaggaattaacctaagtgcttccagagcatctcatgtaacctctatggagtaagtcactttttctgtaacatgtggcttttgaccttgatgaagactttgacttctcatccctgtctacatggaggaagatgattcagtggtggggaaaatgaacctcggtaacatttccaatgtccttcaagagggaaacaagttcagtgttatcatcgtggcattcgttagtttttttttttttaaatcacttgtttagatacaactttatttttttatacctacatagcacatgactggggggataaagcatgtataagttgggagagggtaaagaatgtgtgactatgtatacagaaaatagactaaaatgtgcagcaaaatgatatatactgtaatctggtttttgaagtatctactattctggaatattgttaaacaactttttgcttttgaaaaaaaaaggtgccttgattcagttgcgtgacttagaacattcatcctattttattgtgatttttaatgtcttctgaccccaaactgtgtttttggttgcagtctggcggctgcaggcatagcgtcggttttgttccaataacagagaccaaagagttaatcagatatggttcagctgctacaattgtatgattcaaaggcaatttaatcaccccaaatttccatggcccccacagtcaagacctgccattcgttttctcttgcaggttggagtaaatttgcactttgaatcatgtgggtcatttggggaccttgttcttttctattttgctttattaataaaggaacttgtagaaa

SEQ ID NO: 142782 - DNA, 2008 bp, Homo sapiens
  Payload ID: 8213
  Gene Symbol: ITPRIPL2
  Gene Name: inositol 1,4,5-trisphosphate receptor interacting protein-like 2
  ENST ID: ENST00000566735
  CDS Start-End: 1-384
gtcgctttaaggcggaggcccgggagggggccgacccggctcgccagctccacgctcggctccagactccggcatttcctccccgctagctggcgcggcctcgcctccccctcggaagaggaaactcccggggtccgagtaacagggtcaggcgcggagaggagcggcgggagagccaggagggccgcccaggctatgtcctcctgcgctgtcgccacgctgtccggcagcgcttcctgcccgggtctccccgtctggagggtcacgccgccttctcctcgagacacttccgagagccgggcctcagcatcctgctggagagttactacgagcatgaggtgcgcctgtctccgcacgtgttgggccacagcaaggcgcacgtgagccggatcgtgggcgagctggtgcgggctggccgcgcccgggggtcccccggtctcattcctgggggagcgctggccttggccttccgcggagacttcatccaggtgggcagcgcctacgagcaacataaaatccgccggcccgacagcttcgacgtgctggtgccactgcgcctcccgccgcttgtggcgctggagccacggagcctgggcgaggagccagcgctggccccggccttccgcggctgcttcttgtgcgccctcaaggcaccaccctcaccatcgggggcctcggggggccactggcttcgggactgcaaaccctttgctgatgccttctgcgtggatgtgcgcgggcggcgtcacctctctgctactctggtgctgcgctggttccagtcgcatctgcagcgctccttggccactgtgcgttacagcctggaggggcgctgtcgggtcaccttgaccccaggtggcctggaacagccccccaccttacacatcttgccctgccgcactgactacggctgctgccgcctttctatggctgtgcgtctcatccccgctgtccatctgggagatggggtcttccttgtggcgccaccaccgccacccttgcccagcgcgcccctgttggagctccctgagggcctgcgtgcggaggcactgtggggtgtgaacacagcacgccaggagcagaagctgctgagttggctgcaggaacgggcagctccaggtgcctgctacctcaagtgcctgcagttgcttaaggctctgcgcgatctgggggcccgtgggctggactcagcggccgccacccagtggggacgcatcctatcctcatatgtgctcaagacagtgctgctggcagtgctgctgcgcaagggggcccctgggcaaggctgggacgaggagcacctgggaaggtgtttggaggagttggtgcagttccttagggactgcctgctgcgacgccatacgctcttccactgcgtcctgggccctggtggggcggctgccgaggtgggtcccctgcccaaggcactgagggaagccgccccagttgacctcctggccgctttcgacgggcacgcccgggaacttgcagcagcgcggttgctgtccacgtggcaaaggctgccccagcttctccgggcctacgggggtccccgctaccttgccaggtgccccccaccccggagtcagcgcacccagggcttccttgaaggtgaaccgtaaaccctgacagcacccccacctgaccaaatgctcctaaagcctttcccactgggtgggggtgggaatggcggtgaagccagttaaatgcaagattgcagaaggcattggaaaatttggtggctgccacaagctttagtggcttaaatatcaccttctcgcttcacagtccagtataatatgacatcttcacacccactagagtgtcctgggcaaaccatgggaagacatccaacaggagacccaagaattggttcaaatattgttctgtgtagacggattctgtagaaggatgtggcttttagagaagtccagtagaagaagcaagaactagctgcagggaaagttccttctgtcggtttttagacacagatctctctgcccaaatt

SEQ ID NO: 142783 - DNA, 10197 bp, Homo sapiens
  Payload ID: 8214
  Gene Symbol: ITPR1
  Gene Name: inositol 1,4,5-trisphosphate receptor, type 1
  Uniprot ID: Q14643
  ENST ID: ENST00000302640
  CDS Start-End: 351-8582
gcagtaaccatgtggatgtgctgctgaagcgtttcctcaagctcgctggggtgggaggagaggaggaggaggaggtggtggtggaggaggaggcagggggtggagagagagaaagcgcacgccgagaggaggtgtgggtgttccgcttccatcctaacggaacgagctccctcttcgcggacatgggattacccagcggctgctaacccctctcctcgccctgctcccccaaaccggcgtggctccccgggcaccaaggagctgactacagaggagcaggatttgcacccctcgctgggcttgctttggcaacagagtgcctgacccaggtcaggattttcaagaaagacatgtctgacaaaatgtctagcttcctacatattggagacatttgttctctgtacgcggagggatcgacaaatggatttattagcaccttgggcctggttgatgatcgttgtgttgtacagccagaaaccggggaccttaacaatccacctaagaaattcagagactgcctctttaagctatgtcccatgaaccgctactctgcccaaaagcagttctggaaagccgctaagcctggggccaacagcaccacagacgcagtgctactcaacaaactgcaccacgctgcagacttggaaaagaagcagaatgagacagaaaacaggaaattgctggggaccgtaatccagtatggcaatgtgatccagctcctgcatttgaaaagtaataaatacctaacagtgaataagaggcttcctgctctgttggagaagaatgccatgagagtcacattggacgaggctggaaatgaagggtcctggttttatattcagccattctacaagctgcgatccattggagacagcgtggtcataggtgacaaggtggttctgaaccccgtcaatgctggtcagcccctacatgctagcagccatcaactggtagataacccaggctgcaatgaggtcaattccgtcaactgcaatacaagctggaaaatagtccttttcatgaaatggagtgataacaaagacgacatattaaaggggggtgacgtggtgaggctgtttcatgctgagcaggagaagtttctcacctgtgacgaacacaggaagaagcagcacgtcttcctgagaaccacgggccggcagtcggccacatctgccaccagttcaaaagccctgtgggaggtggaggtggtccagcatgacccatgtcggggcggagcagggtattggaacagccttttccgtttcaagcatctggccacggggcattacttggcagcagaggtggaccctgatcaggacgcctctcgaagtaggttgcggaatgcccaagaaaagatggtatactccctggtctctgtgcctgaaggcaatgacatctcctccattttcgagctagatcccaccactctgcgtggaggtgacagccttgtcccaaggaactcttatgttcggctcagacacctatgtactaatacctgggttcacagcacaaatattcctattgacaaggaagaagaaaagcccgtgatgctgaaaattggcacctctcctgtgaaggaggataaggaagcatttgccatagttccggtttctcctgctgaagttcgggacctggactttgccaatgatgccagcaaggtgctgggctccattgctgggaagctagagaagggcaccatcacccagaatgaaaggaggtctgtaaccaagctgctagaagatttggtttacttcgtcactggtggaactaattctggtcaagatgttctcgaagttgtcttctccaagcccaacagagaacggcagaaactgatgagagaacagaatattctcaagcagatcttcaagttgttacaagccccattcacagactgcggtgatggcccaatgcttcggctggaagagctcggggaccagcggcacgctcctttcagacacatctgccggctctgctacagggtgctgagacactcgcagcaagactacaggaagaaccaggagtatatagccaagcagtttggcttcatgcagaagcagattggctatgatgtgttggctgaagacactatcactgccctgctccacaataatcggaaactcctggaaaaacacattaccgcggcagagattgacacatttgtcagcctggtgcgaaagaacagggagcccagattcttagattacctctccgacctctgtgtctccatgaacaaatcaattccagtgacccaggaactgatatgtaaagctgtgctgaaccccaccaacgctgacatcctgattgagaccaagttggttctttctcgttttgaatttgaaggtgtctcttccactggagagaatgctctggaggcaggagaagacgaggaagaggtgtggctgttttggagggacagcaacaaagagattcgcagcaagagtgtgagggaattggctcaggatgctaaagaagggcagaaggaggaccgagacgttctcagctactacagatatcagctgaacctctttgcgaggatgtgtctggaccgccaatacctggccatcaacgaaatctcaggccagctggatgtcgatctcattctccgctgcatgtctgacgagaacctgccctatgacctcagggcgtccttctgccgcctcatgcttcacatgcatgtggaccgagatccccaggaacaagtcacccccgtgaaatatgcccgcctctggtcggagattccctcggagatcgccattgacgactatgatagtagtggagcttccaaagatgaaattaaggagagatttgctcagaccatggagtttgtggaggagtatttaagagatgtggtttgtcagaggttccctttctctgataaagagaagaataagcttacgtttgaggttgtaaatttagctaggaatctcatatactttggtttctacaacttctctgaccttctacgattaactaagatccttctggccatattggactgtgtacatgtgacaacaatcttccccattagcaagatggcgaaaggagaagagaataaaggtaacaatgatgtggagaagctgaagagcagtaacgtgatgagatctattcatggcgtgggagagctgatgacccaggtggtgctccggggaggaggctttttgcccatgactcccatggctgctgcccctgaaggcaatgtgaagcaggcagagcctgagaaggaggacatcatggtcatggacaccaagctgaagatcattgagatactccagtttattttgaatgtgaggttggattataggatctcctgcctcctgtgtatatttaagcgagagtttgatgaaagcaattcccagacttcagaaacatcctccggaaacagcagccaagaagggccaagtaatgtaccaggtgctcttgactttgaacacattgaagaacaagcagaaggcatctttggaggaagtgaggagaacaccccactggacttggatgaccacggcggcagaacctttctccgtgtcctgctccacttgacgatgcatgactacccacccctggtgtcaggggccctgcagctcctcttccggcacttcagccagaggcaggaggtgctccaggccttcaaacaggttcaactgctggttaccagccaagatgtggacaactacaaacagatcaaacaagacttggatcaactgaggtccatcgtggaaaagtcagagctttgggtgtacaaagggcagggccccgatgagactatggatggtgcatctggagaaaatgaacataagaaaacggaggagggaaataacaagccacaaaagcatgaaagcaccagcagctacaactacagagtggtcaaagagattttgattcggcttagcaaactctgtgttcaagagagtgcctcagtgagaaagagcaggaagcagcaacagcgtctgctccggaacatgggcgcgcacgccgtggtgctggagctgctgcagattccctatgagaaggccgaagataccaagatgcaagagataatgaggttggctcatgaatttttgcagaatttctgcgcaggcaaccagcagaatcaagctttgctacataaacacataaacctgtttctcaacccagggatcctggaggcagtaaccatgcagcacatcttcatgaacaatttccagctttgcagtgagatcaacgagagagttgttcagcacttcgttcactgcatagagactcacggtcggaatgtccagtatataaagttcttacagacaattgtcaaggcagaagggaaatttattaaaaaatgccaagacatggttatggccgagctggtcaattcgggagaggatgtcctcgtgttctacaacgacagagcctctttccagactctgatccagatgatgcggtcagaacgggatcggatggatgagaacagccctctcatgtaccacatccacttggtcgagctcctggctgtgtgcacggagggtaagaatgtctacacagagatcaagtgcaactccctgctcccgctggatgacatcgttcgcgtggtgacccacgaggactgcatccctgaggttaaaattgcatacattaacttcctgaatcactgctatgtggatacagaggtggaaatgaaggagatttataccagcaatcacatgtggaaattgtttgagaatttccttgtagacatctgcagggcctgtaacaacactagtgacaggaaacatgcagactcgattttggagaagtatgtcaccgaaatcgtcatgagtattgttactactttcttcagctctcccttctcagaccagagtacgactttgcagactcgccagcctgtctttgtgcaactgctgcaaggcgtgttcagggtttaccactgcaactggttaatgccaagccaaaaagcctccgtggagagctgtattcgggtgctgtctgatgtagccaagagccgggccattgccattcccgtggacctggacagccaagtcaacaacctctttctcaagtcccacagcattgtgcagaaaacagccatgaactggcggctctcagcccgcaatgccgcacgcagggactctgttctggcagcttccagagactaccggaatatcattgagagattgcaggacatcgtctccgcgctggaggaccgtctcaggcccctggtgcaggcagagttatctgtgctcgtggatgttctccacagacccgagctgcttttcccagagaacacagacgccagaaggaaatgtgaaagtggcggtttcatttgcaagttaataaagcatacaaaacagctgctagaagaaaatgaagagaagctctgcattaaggtcctacagaccctgagggaaatgatgaccaaagatagaggctatggagaaaagctaatttccattgatgaattggataatgctgagcttcctccagctccggattctgagaacgccactgaggagcttgaaccaagtccacccctgcggcagctggaagaccataaaaggggtgaggcgctcaggcaagttctggtcaaccgttactatggaaacgtcagaccttcgggacgaagagagagccttaccagctttggcaatggcccactgtcagcaggaggacccggcaagcccgggggaggagggggaggttccggatccagctctatgagcaggggtgagatgagtctggccgaggttcagtgtcaccttgacaaggagggggcttccaatctagttatcgacctcatcatgaacgcatccagtgaccgagtgttccatgaaagcattctcctggccattgcccttctggaaggaggcaacaccaccatccagcactcctttttctgtcgcttgacagaagataagaagtcagagaaattctttaaggtgttttatgaccggatgaaggtggcccagcaagaaatcaaagcaacagtgacagtgaacaccagtgacttgggaaataaaaagaaagacgatgaggtagacagggatgccccatcacggaaaaaagctaaagagcccacaacacagataacagaagaggtccgggatcagctcctggaggcctccgctgccaccaggaaagccttcaccactttcaggagggaggctgatcccgacgaccactaccagcctggagagggcacccaggccactgccgacaaggccaaggacgacctggagatgagcgcggtcatcaccatcatgcagcccatcctccgcttccttcagctcctgtgtgaaaaccacaaccgagacctgcagaacttcctccgttgccaaaataacaagaccaactacaatttggtatgtgagaccctgcagtttctggactgtatttgtggaagcacaactggaggccttggtcttctgggcttgtatataaatgaaaagaatgtagcgcttatcaaccaaaccctggaaagtctgaccgaatactgtcaaggaccttgccatgagaaccagaactgcatagccacccatgaatccaatggcattgacatcatcacagccctgatcctcaatgatatcaatcctttgggaaagaagaggatggaccttgtgttagaactgaagaacaatgcctcgaagttgctcctggccatcatggaaagcaggcacgacagtgaaaacgcagagaggatactttataacatgaggcccaaggaactggtggaagtgatcaagaaagcctacatgcaaggtgaagtggaatttgaggatggagaaaacggtgaggatggggcggcgtcccccaggaacgtggggcacaacatctacatattagcccatcagttggctcggcataacaaagaacttcagagcatgctgaaacctggtggccaagtggacggagatgaagccctggagttttatgccaagcacacggcgcagatagagattgtcagattagaccgaacaatggaacagatagtctttcccgtgcccagcatatgtgaattcctaaccaaggagtcaaaactacgaatttactatactacagagagagacgaacaaggcagcaaaatcaatgatttctttctgcggtctgaagacctcttcaatgaaatgaattggcagaagaaactgagagcccagcccgtgttgtactggtgtgcccgcaacatgtctttctggagcagcatttcgtttaacctggccgtcctgatgaacctgctggtggcgtttttctacccgtttaagggagtccgaggaggaaccctggagccccactggtcgggactcctgtggacagccatgctcatctctctggccatcgtcattgccctccccaagccccatggcatccgggccttaattgcctccacaattctacgactgatattttcagtcgggttacaacccacgttgtttcttctgggcgctttcaatgtatgcaataaaatcatctttctaatgagctttgtgggcaactgtgggacattcacaagaggctaccgagccatggttctggatgttgagttcctctatcatttgttgtatctggtgatctgtgccatggggctctttgtccatgaattcttctacagtctgctgctttttgatttagtgtacagagaagagactttgcttaatgtcattaaaagtgtcactcgcaatggacggtccatcatcctgacagcagttctggctctgatcctcgtttacctgttctcaatagtgggctatcttttcttcaaggatgactttatcttggaagtagataggctgcccaatgaaacagctgttccagaaaccggcgagagtttggcaagcgagttcctgttctccgatgtgtgtagggtggagagtggggagaactgctcctctcctgcacccagagaagagctggtccctgcagaagagacggaacaggataaagagcacacatgtgagacgctgctgatgtgcattgtcactgtgctgagtcacgggctgcggagcgggggtggagtaggagatgtactcaggaagccgtccaaagaggaacccctgtttgctgctagagttatttatgacctcttgttcttcttcatggtcatcatcattgttcttaacctgatttttggggttatcattgacacttttgctgacctgaggagtgagaagcagaagaaggaagagatcttgaagaccacgtgctttatctgtggcttggaaagagacaagtttgacaacaagactgtcacctttgaagagcacatcaaggaagaacacaacatgtggcactatctgtgcttcatcgtcctggtgaaagtaaaggactccaccgaatatactgggcctgagagttacgtggcagaaatgatcaaggaaagaaaccttgactggttccccaggatgagagccatgtcattggtcagcagtgattctgaaggagaacagaatgagctgagaaacctgcaggagaagctggagtccaccatgaaacttgtcacgaacctttctggccagctgtcggaattaaaggatcagatgacagaacaaaggaagcagaaacaaagaattggtcttctaggacatcctcctcacatgaatgtcaacccacaacaaccagcataagcaaatgaaagaaaggaattgtatttaccttttataattattattagtgtgggtatggctaatgagttctgattcacccacgaaggttacatttatgctgaatacatttgtaaatactcagttttatactgtatgtatatgattgctactctaaaggtttggatatatgtattgtaattagaattgttggcatgatgacatttcatttgtgccaaaaatattaaaaatgccttttttggaaggactaacagaaagcacctgatttgcacttgaaccagattatagatttaaaagtatatgacatgtattttgtatttaaaactagaatagccagtatttatgttttttataaaactgtgcaatacgaattatgcaatcacaatacatttgtagctcccgagtgtcctaaagggagtgcacttctttgaagctggtgtgttaatactatgtaataaatggttaactttcaaatgatgctgctgccaaaattatattaatagtgagtttcaggcccctgggcattttgtaccatgtaattatcctctggtgatgctgtttctcgttagtggcagtagtgcctccgtctcctagtgataatgctccaagtctatgaactgttaaatcagcattcattttaagaaaagcaactttagtttcaaagatacttttaagcttctaaattgatcatttaaactatttctttaaataagagagccaaattagaggctcatactttagcttgtgaagaagataatgaattttttaaagggaactttctatgcaatgttcaggataaatgcatactgctggccaatcagtgtcatctcctgggtaaattttgatgtcgcattataaagacatgcataattgatggtttctagattatctagtccaaacaatagagtttattttttcttcatctgaaccaacatgctacagtagctaagaagtattaaaactatatacatccatataaagatgaaatatgaactatctcattagaagtcatagttgaccacagacatgttattcttctgaaagagccacattttggttttatttcttgtcacatgatttcttttcttgatggatgaaaaatatgaaaggaaacttttatatctgttgcctagttttgtacatggatctcattttacaagagaatctctctgcaaaaaaaaaaaaaacagtttaaaaatgcattgaaagcagagttctgaaatgagtaaagtttgtaaatgcatatataaaaatatttaataaatgatgcagaatatacagtgactggttggtggctttcatttggcatttgtgacttaactgctattccatttatgtactttctttaggatcagtttgaagtacagtcggtttgattaccaggttaattcagaaaatgtttacctgattatttaaaaaaacacttgctgttgttatgacagctctgaggagaattattagaacaaacattggggagtatttagtacaacattcattcattcttctggattagtgactgccagccaggctgtcgggagcgccctactaaatctcctgtctcttctgcttttactgggggatctttaatttgctgtgtgccatgtggaagtatcgggaa

SEQ ID NO: 142784 - DNA, 10242 bp, Homo sapiens
  Payload ID: 8214
  Gene Symbol: ITPR1
  Gene Name: inositol 1,4,5-trisphosphate receptor, type 1
  Uniprot ID: Q14643
  ENST ID: ENST00000354582
  CDS Start-End: 351-8627
gcagtaaccatgtggatgtgctgctgaagcgtttcctcaagctcgctggggtgggaggagaggaggaggaggaggtggtggtggaggaggaggcagggggtggagagagagaaagcgcacgccgagaggaggtgtgggtgttccgcttccatcctaacggaacgagctccctcttcgcggacatgggattacccagcggctgctaacccctctcctcgccctgctcccccaaaccggcgtggctccccgggcaccaaggagctgactacagaggagcaggatttgcacccctcgctgggcttgctttggcaacagagtgcctgacccaggtcaggattttcaagaaagacatgtctgacaaaatgtctagcttcctacatattggagacatttgttctctgtacgcggagggatcgacaaatggatttattagcaccttgggcctggttgatgatcgttgtgttgtacagccagaaaccggggaccttaacaatccacctaagaaattcagagactgcctctttaagctatgtcccatgaaccgctactctgcccaaaagcagttctggaaagccgctaagcctggggccaacagcaccacagacgcagtgctactcaacaaactgcaccacgctgcagacttggaaaagaagcagaatgagacagaaaacaggaaattgctggggaccgtaatccagtatggcaatgtgatccagctcctgcatttgaaaagtaataaatacctaacagtgaataagaggcttcctgctctgttggagaagaatgccatgagagtcacattggacgaggctggaaatgaagggtcctggttttatattcagccattctacaagctgcgatccattggagacagcgtggtcataggtgacaaggtggttctgaaccccgtcaatgctggtcagcccctacatgctagcagccatcaactggtagataacccaggctgcaatgaggtcaattccgtcaactgcaatacaagctggaaaatagtccttttcatgaaatggagtgataacaaagacgacatattaaaggggggtgacgtggtgaggctgtttcatgctgagcaggagaagtttctcacctgtgacgaacacaggaagaagcagcacgtcttcctgagaaccacgggccggcagtcggccacatctgccaccagttcaaaagccctgtgggaggtggaggtggtccagcatgacccatgtcggggcggagcagggtattggaacagccttttccgtttcaagcatctggccacggggcattacttggcagcagaggtagaccctgactttgaggaagaatgcctggagtttcagccctcagtggaccctgatcaggacgcctctcgaagtaggttgcggaatgcccaagaaaagatggtatactccctggtctctgtgcctgaaggcaatgacatctcctccattttcgagctagatcccaccactctgcgtggaggtgacagccttgtcccaaggaactcttatgttcggctcagacacctatgtactaatacctgggttcacagcacaaatattcctattgacaaggaagaagaaaagcccgtgatgctgaaaattggcacctctcctgtgaaggaggataaggaagcatttgccatagttccggtttctcctgctgaagttcgggacctggactttgccaatgatgccagcaaggtgctgggctccattgctgggaagctagagaagggcaccatcacccagaatgaaaggaggtctgtaaccaagctgctagaagatttggtttacttcgtcactggtggaactaattctggtcaagatgttctcgaagttgtcttctccaagcccaacagagaacggcagaaactgatgagagaacagaatattctcaagcagatcttcaagttgttacaagccccattcacagactgcggtgatggcccaatgcttcggctggaagagctcggggaccagcggcacgctcctttcagacacatctgccggctctgctacagggtgctgagacactcgcagcaagactacaggaagaaccaggagtatatagccaagcagtttggcttcatgcagaagcagattggctatgatgtgttggctgaagacactatcactgccctgctccacaataatcggaaactcctggaaaaacacattaccgcggcagagattgacacatttgtcagcctggtgcgaaagaacagggagcccagattcttagattacctctccgacctctgtgtctccatgaacaaatcaattccagtgacccaggaactgatatgtaaagctgtgctgaaccccaccaacgctgacatcctgattgagaccaagttggttctttctcgttttgaatttgaaggtgtctcttccactggagagaatgctctggaggcaggagaagacgaggaagaggtgtggctgttttggagggacagcaacaaagagattcgcagcaagagtgtgagggaattggctcaggatgctaaagaagggcagaaggaggaccgagacgttctcagctactacagatatcagctgaacctctttgcgaggatgtgtctggaccgccaatacctggccatcaacgaaatctcaggccagctggatgtcgatctcattctccgctgcatgtctgacgagaacctgccctatgacctcagggcgtccttctgccgcctcatgcttcacatgcatgtggaccgagatccccaggaacaagtcacccccgtgaaatatgcccgcctctggtcggagattccctcggagatcgccattgacgactatgatagtagtggagcttccaaagatgaaattaaggagagatttgctcagaccatggagtttgtggaggagtatttaagagatgtggtttgtcagaggttccctttctctgataaagagaagaataagcttacgtttgaggttgtaaatttagctaggaatctcatatactttggtttctacaacttctctgaccttctacgattaactaagatccttctggccatattggactgtgtacatgtgacaacaatcttccccattagcaagatggcgaaaggagaagagaataaaggtaacaatgatgtggagaagctgaagagcagtaacgtgatgagatctattcatggcgtgggagagctgatgacccaggtggtgctccggggaggaggctttttgcccatgactcccatggctgctgcccctgaaggcaatgtgaagcaggcagagcctgagaaggaggacatcatggtcatggacaccaagctgaagatcattgagatactccagtttattttgaatgtgaggttggattataggatctcctgcctcctgtgtatatttaagcgagagtttgatgaaagcaattcccagacttcagaaacatcctccggaaacagcagccaagaagggccaagtaatgtaccaggtgctcttgactttgaacacattgaagaacaagcagaaggcatctttggaggaagtgaggagaacaccccactggacttggatgaccacggcggcagaacctttctccgtgtcctgctccacttgacgatgcatgactacccacccctggtgtcaggggccctgcagctcctcttccggcacttcagccagaggcaggaggtgctccaggccttcaaacaggttcaactgctggttaccagccaagatgtggacaactacaaacagatcaaacaagacttggatcaactgaggtccatcgtggaaaagtcagagctttgggtgtacaaagggcagggccccgatgagactatggatggtgcatctggagaaaatgaacataagaaaacggaggagggaaataacaagccacaaaagcatgaaagcaccagcagctacaactacagagtggtcaaagagattttgattcggcttagcaaactctgtgttcaagagagtgcctcagtgagaaagagcaggaagcagcaacagcgtctgctccggaacatgggcgcgcacgccgtggtgctggagctgctgcagattccctatgagaaggccgaagataccaagatgcaagagataatgaggttggctcatgaatttttgcagaatttctgcgcaggcaaccagcagaatcaagctttgctacataaacacataaacctgtttctcaacccagggatcctggaggcagtaaccatgcagcacatcttcatgaacaatttccagctttgcagtgagatcaacgagagagttgttcagcacttcgttcactgcatagagactcacggtcggaatgtccagtatataaagttcttacagacaattgtcaaggcagaagggaaatttattaaaaaatgccaagacatggttatggccgagctggtcaattcgggagaggatgtcctcgtgttctacaacgacagagcctctttccagactctgatccagatgatgcggtcagaacgggatcggatggatgagaacagccctctcatgtaccacatccacttggtcgagctcctggctgtgtgcacggagggtaagaatgtctacacagagatcaagtgcaactccctgctcccgctggatgacatcgttcgcgtggtgacccacgaggactgcatccctgaggttaaaattgcatacattaacttcctgaatcactgctatgtggatacagaggtggaaatgaaggagatttataccagcaatcacatgtggaaattgtttgagaatttccttgtagacatctgcagggcctgtaacaacactagtgacaggaaacatgcagactcgattttggagaagtatgtcaccgaaatcgtcatgagtattgttactactttcttcagctctcccttctcagaccagagtacgactttgcagactcgccagcctgtctttgtgcaactgctgcaaggcgtgttcagggtttaccactgcaactggttaatgccaagccaaaaagcctccgtggagagctgtattcgggtgctgtctgatgtagccaagagccgggccattgccattcccgtggacctggacagccaagtcaacaacctctttctcaagtcccacagcattgtgcagaaaacagccatgaactggcggctctcagcccgcaatgccgcacgcagggactctgttctggcagcttccagagactaccggaatatcattgagagattgcaggacatcgtctccgcgctggaggaccgtctcaggcccctggtgcaggcagagttatctgtgctcgtggatgttctccacagacccgagctgcttttcccagagaacacagacgccagaaggaaatgtgaaagtggcggtttcatttgcaagttaataaagcatacaaaacagctgctagaagaaaatgaagagaagctctgcattaaggtcctacagaccctgagggaaatgatgaccaaagatagaggctatggagaaaagctaatttccattgatgaattggataatgctgagcttcctccagctccggattctgagaacgccactgaggagcttgaaccaagtccacccctgcggcagctggaagaccataaaaggggtgaggcgctcaggcaagttctggtcaaccgttactatggaaacgtcagaccttcgggacgaagagagagccttaccagctttggcaatggcccactgtcagcaggaggacccggcaagcccgggggaggagggggaggttccggatccagctctatgagcaggggtgagatgagtctggccgaggttcagtgtcaccttgacaaggagggggcttccaatctagttatcgacctcatcatgaacgcatccagtgaccgagtgttccatgaaagcattctcctggccattgcccttctggaaggaggcaacaccaccatccagcactcctttttctgtcgcttgacagaagataagaagtcagagaaattctttaaggtgttttatgaccggatgaaggtggcccagcaagaaatcaaagcaacagtgacagtgaacaccagtgacttgggaaataaaaagaaagacgatgaggtagacagggatgccccatcacggaaaaaagctaaagagcccacaacacagataacagaagaggtccgggatcagctcctggaggcctccgctgccaccaggaaagccttcaccactttcaggagggaggctgatcccgacgaccactaccagcctggagagggcacccaggccactgccgacaaggccaaggacgacctggagatgagcgcggtcatcaccatcatgcagcccatcctccgcttccttcagctcctgtgtgaaaaccacaaccgagacctgcagaacttcctccgttgccaaaataacaagaccaactacaatttggtatgtgagaccctgcagtttctggactgtatttgtggaagcacaactggaggccttggtcttctgggcttgtatataaatgaaaagaatgtagcgcttatcaaccaaaccctggaaagtctgaccgaatactgtcaaggaccttgccatgagaaccagaactgcatagccacccatgaatccaatggcattgacatcatcacagccctgatcctcaatgatatcaatcctttgggaaagaagaggatggaccttgtgttagaactgaagaacaatgcctcgaagttgctcctggccatcatggaaagcaggcacgacagtgaaaacgcagagaggatactttataacatgaggcccaaggaactggtggaagtgatcaagaaagcctacatgcaaggtgaagtggaatttgaggatggagaaaacggtgaggatggggcggcgtcccccaggaacgtggggcacaacatctacatattagcccatcagttggctcggcataacaaagaacttcagagcatgctgaaacctggtggccaagtggacggagatgaagccctggagttttatgccaagcacacggcgcagatagagattgtcagattagaccgaacaatggaacagatagtctttcccgtgcccagcatatgtgaattcctaaccaaggagtcaaaactacgaatttactatactacagagagagacgaacaaggcagcaaaatcaatgatttctttctgcggtctgaagacctcttcaatgaaatgaattggcagaagaaactgagagcccagcccgtgttgtactggtgtgcccgcaacatgtctttctggagcagcatttcgtttaacctggccgtcctgatgaacctgctggtggcgtttttctacccgtttaagggagtccgaggaggaaccctggagccccactggtcgggactcctgtggacagccatgctcatctctctggccatcgtcattgccctccccaagccccatggcatccgggccttaattgcctccacaattctacgactgatattttcagtcgggttacaacccacgttgtttcttctgggcgctttcaatgtatgcaataaaatcatctttctaatgagctttgtgggcaactgtgggacattcacaagaggctaccgagccatggttctggatgttgagttcctctatcatttgttgtatctggtgatctgtgccatggggctctttgtccatgaattcttctacagtctgctgctttttgatttagtgtacagagaagagactttgcttaatgtcattaaaagtgtcactcgcaatggacggtccatcatcctgacagcagttctggctctgatcctcgtttacctgttctcaatagtgggctatcttttcttcaaggatgactttatcttggaagtagataggctgcccaatgaaacagctgttccagaaaccggcgagagtttggcaagcgagttcctgttctccgatgtgtgtagggtggagagtggggagaactgctcctctcctgcacccagagaagagctggtccctgcagaagagacggaacaggataaagagcacacatgtgagacgctgctgatgtgcattgtcactgtgctgagtcacgggctgcggagcgggggtggagtaggagatgtactcaggaagccgtccaaagaggaacccctgtttgctgctagagttatttatgacctcttgttcttcttcatggtcatcatcattgttcttaacctgatttttggggttatcattgacacttttgctgacctgaggagtgagaagcagaagaaggaagagatcttgaagaccacgtgctttatctgtggcttggaaagagacaagtttgacaacaagactgtcacctttgaagagcacatcaaggaagaacacaacatgtggcactatctgtgcttcatcgtcctggtgaaagtaaaggactccaccgaatatactgggcctgagagttacgtggcagaaatgatcaaggaaagaaaccttgactggttccccaggatgagagccatgtcattggtcagcagtgattctgaaggagaacagaatgagctgagaaacctgcaggagaagctggagtccaccatgaaacttgtcacgaacctttctggccagctgtcggaattaaaggatcagatgacagaacaaaggaagcagaaacaaagaattggtcttctaggacatcctcctcacatgaatgtcaacccacaacaaccagcataagcaaatgaaagaaaggaattgtatttaccttttataattattattagtgtgggtatggctaatgagttctgattcacccacgaaggttacatttatgctgaatacatttgtaaatactcagttttatactgtatgtatatgattgctactctaaaggtttggatatatgtattgtaattagaattgttggcatgatgacatttcatttgtgccaaaaatattaaaaatgccttttttggaaggactaacagaaagcacctgatttgcacttgaaccagattatagatttaaaagtatatgacatgtattttgtatttaaaactagaatagccagtatttatgttttttataaaactgtgcaatacgaattatgcaatcacaatacatttgtagctcccgagtgtcctaaagggagtgcacttctttgaagctggtgtgttaatactatgtaataaatggttaactttcaaatgatgctgctgccaaaattatattaatagtgagtttcaggcccctgggcattttgtaccatgtaattatcctctggtgatgctgtttctcgttagtggcagtagtgcctccgtctcctagtgataatgctccaagtctatgaactgttaaatcagcattcattttaagaaaagcaactttagtttcaaagatacttttaagcttctaaattgatcatttaaactatttctttaaataagagagccaaattagaggctcatactttagcttgtgaagaagataatgaattttttaaagggaactttctatgcaatgttcaggataaatgcatactgctggccaatcagtgtcatctcctgggtaaattttgatgtcgcattataaagacatgcataattgatggtttctagattatctagtccaaacaatagagtttattttttcttcatctgaaccaacatgctacagtagctaagaagtattaaaactatatacatccatataaagatgaaatatgaactatctcattagaagtcatagttgaccacagacatgttattcttctgaaagagccacattttggttttatttcttgtcacatgatttcttttcttgatggatgaaaaatatgaaaggaaacttttatatctgttgcctagttttgtacatggatctcattttacaagagaatctctctgcaaaaaaaaaaaaaacagtttaaaaatgcattgaaagcagagttctgaaatgagtaaagtttgtaaatgcatatataaaaatatttaataaatgatgcagaatatacagtgactggttggtggctttcatttggcatttgtgacttaactgctattccatttatgtactttctttaggatcagtttgaagtacagtcggtttgattaccaggttaattcagaaaatgtttacctgattatttaaaaaaacacttgctgttgttatgacagctctgaggagaattattagaacaaacattggggagtatttagtacaacattcattcattcttctggattagtgactgccagccaggctgtcgggagcgccctactaaatctcctgtctcttctgcttttactgggggatctttaatttgctgtgtgccatgtggaagtatcgggaa

SEQ ID NO: 142785 - DNA, 9762 bp, Homo sapiens
  Payload ID: 8214
  Gene Symbol: ITPR1
  Gene Name: inositol 1,4,5-trisphosphate receptor, type 1
  Uniprot ID: Q14643
  ENST ID: ENST00000357086
  CDS Start-End: 349-8481
agtaaccatgtggatgtgctgctgaagcgtttcctcaagctcgctggggtgggaggagaggaggaggaggaggtggtggtggaggaggaggcagggggtggagagagagaaagcgcacgccgagaggaggtgtgggtgttccgcttccatcctaacggaacgagctccctcttcgcggacatgggattacccagcggctgctaacccctctcctcgccctgctcccccaaaccggcgtggctccccgggcaccaaggagctgactacagaggagcaggatttgcacccctcgctgggcttgctttggcaacagagtgcctgacccaggtcaggattttcaagaaagacatgtctgacaaaatgtctagcttcctacatattggagacatttgttctctgtacgcggagggatcgacaaatggatttattagcaccttgggcctggttgatgatcgttgtgttgtacagccagaaaccggggaccttaacaatccacctaagaaattcagagactgcctctttaagctatgtcccatgaaccgctactctgcccaaaagcagttctggaaagccgctaagcctggggccaacagcaccacagacgcagtgctactcaacaaactgcaccacgctgcagacttggaaaagaagcagaatgagacagaaaacaggaaattgctggggaccgtaatccagtatggcaatgtgatccagctcctgcatttgaaaagtaataaatacctaacagtgaataagaggcttcctgctctgttggagaagaatgccatgagagtcacattggacgaggctggaaatgaagggtcctggttttatattcagccattctacaagctgcgatccattggagacagcgtggtcataggtgacaaggtggttctgaaccccgtcaatgctggtcagcccctacatgctagcagccatcaactggtagataacccaggctgcaatgaggtcaattccgtcaactgcaatacaagctggaaaatagtccttttcatgaaatggagtgataacaaagacgacatattaaaggggggtgacgtggtgaggctgtttcatgctgagcaggagaagtttctcacctgtgacgaacacaggaagaagcagcacgtcttcctgagaaccacgggccggcagtcggccacatctgccaccagttcaaaagccctgtgggaggtggaggtggtccagcatgacccatgtcggggcggagcagggtattggaacagccttttccgtttcaagcatctggccacggggcattacttggcagcagaggtagaccctgactttgaggaagaatgcctggagtttcagccctcagtggaccctgatcaggacgcctctcgaagtaggttgcggaatgcccaagaaaagatggtatactccctggtctctgtgcctgaaggcaatgacatctcctccattttcgagctagatcccaccactctgcgtggaggtgacagccttgtcccaaggaactcttatgttcggctcagacacctatgtactaatacctgggttcacagcacaaatattcctattgacaaggaagaagaaaagcccgtgatgctgaaaattggcacctctcctgtgaaggaggataaggaagcatttgccatagttccggtttctcctgctgaagttcgggacctggactttgccaatgatgccagcaaggtgctgggctccattgctgggaagctagagaagggcaccatcacccagaatgaaaggaggtctgtaaccaagctgctagaagatttggtttacttcgtcactggtggaactaattctggtcaagatgttctcgaagttgtcttctccaagcccaacagagaacggcagaaactgatgagagaacagaatattctcaagcagatcttcaagttgttacaagccccattcacagactgcggtgatggcccaatgcttcggctggaagagctcggggaccagcggcacgctcctttcagacacatctgccggctctgctacagggtgctgagacactcgcagcaagactacaggaagaaccaggagtatatagccaagcagtttggcttcatgcagaagcagattggctatgatgtgttggctgaagacactatcactgccctgctccacaataatcggaaactcctggaaaaacacattaccgcggcagagattgacacatttgtcagcctggtgcgaaagaacagggagcccagattcttagattacctctccgacctctgtgtctccatgaacaaatcaattccagtgacccaggaactgatatgtaaagctgtgctgaaccccaccaacgctgacatcctgattgagaccaagttggttctttctcgttttgaatttgaaggtgtctcttccactggagagaatgctctggaggcaggagaagacgaggaagaggtgtggctgttttggagggacagcaacaaagagattcgcagcaagagtgtgagggaattggctcaggatgctaaagaagggcagaaggaggaccgagacgttctcagctactacagatatcagctgaacctctttgcgaggatgtgtctggaccgccaatacctggccatcaacgaaatctcaggccagctggatgtcgatctcattctccgctgcatgtctgacgagaacctgccctatgacctcagggcgtccttctgccgcctcatgcttcacatgcatgtggaccgagatccccaggaacaagtcacccccgtgaaatatgcccgcctctggtcggagattccctcggagatcgccattgacgactatgatagtagtggagcttccaaagatgaaattaaggagagatttgctcagaccatggagtttgtggaggagtatttaagagatgtggtttgtcagaggttccctttctctgataaagagaagaataagcttacgtttgaggttgtaaatttagctaggaatctcatatactttggtttctacaacttctctgaccttctacgattaactaagatccttctggccatattggactgtgtacatgtgacaacaatcttccccattagcaagatggcgaaaggagaagagaataaaggcagtaacgtgatgagatctattcatggcgtgggagagctgatgacccaggtggtgctccggggaggaggctttttgcccatgactcccatggctgctgcccctgaaggcaatgtgaagcaggcagagcctgagaaggaggacatcatggtcatggacaccaagctgaagatcattgagatactccagtttattttgaatgtgaggttggattataggatctcctgcctcctgtgtatatttaagcgagagtttgatgaaagcaattcccagacttcagaaacatcctccggaaacagcagccaagaagggccaagtaatgtaccaggtgctcttgactttgaacacattgaagaacaagcagaaggcatctttggaggaagtgaggagaacaccccactggacttggatgaccacggcggcagaacctttctccgtgtcctgctccacttgacgatgcatgactacccacccctggtgtcaggggccctgcagctcctcttccggcacttcagccagaggcaggaggtgctccaggccttcaaacaggttcaactgctggttaccagccaagatgtggacaactacaaacagatcaaacaagacttggatcaactgaggtccatcgtggaaaagtcagagctttgggtgtacaaagggcagggccccgatgagactatggatggtgcatctggagaaaatgaacataagaaaacggaggagggaaataacaagccacaaaagcatgaaagcaccagcagctacaactacagagtggtcaaagagattttgattcggcttagcaaactctgtgttcaagagagtgcctcagtgagaaagagcaggaagcagcaacagcgtctgctccggaacatgggcgcgcacgccgtggtgctggagctgctgcagattccctatgagaaggccgaagataccaagatgcaagagataatgaggttggctcatgaatttttgcagaatttctgcgcaggcaaccagcagaatcaagctttgctacataaacacataaacctgtttctcaacccagggatcctggaggcagtaaccatgcagcacatcttcatgaacaatttccagctttgcagtgagatcaacgagagagttgttcagcacttcgttcactgcatagagactcacggtcggaatgtccagtatataaagttcttacagacaattgtcaaggcagaagggaaatttattaaaaaatgccaagacatggttatggccgagctggtcaattcgggagaggatgtcctcgtgttctacaacgacagagcctctttccagactctgatccagatgatgcggtcagaacgggatcggatggatgagaacagccctctcatgtaccacatccacttggtcgagctcctggctgtgtgcacggagggtaagaatgtctacacagagatcaagtgcaactccctgctcccgctggatgacatcgttcgcgtggtgacccacgaggactgcatccctgaggttaaaattgcatacattaacttcctgaatcactgctatgtggatacagaggtggaaatgaaggagatttataccagcaatcacatgtggaaattgtttgagaatttccttgtagacatctgcagggcctgtaacaacactagtgacaggaaacatgcagactcgattttggagaagtatgtcaccgaaatcgtcatgagtattgttactactttcttcagctctcccttctcagaccagagtacgactttgcagactcgccagcctgtctttgtgcaactgctgcaaggcgtgttcagggtttaccactgcaactggttaatgccaagccaaaaagcctccgtggagagctgtattcgggtgctgtctgatgtagccaagagccgggccattgccattcccgtggacctggacagccaagtcaacaacctctttctcaagtcccacagcattgtgcagaaaacagccatgaactggcggctctcagcccgcaatgccgcacgcagggactctgttctggcagcttccagagactaccggaatatcattgagagattgcaggacatcgtctccgcgctggaggaccgtctcaggcccctggtgcaggcagagttatctgtgctcgtggatgttctccacagacccgagctgcttttcccagagaacacagacgccagaaggaaatgtgaaagtggcggtttcatttgcaagttaataaagcatacaaaacagctgctagaagaaaatgaagagaagctctgcattaaggtcctacagaccctgagggaaatgatgaccaaagatagaggctatggagaaaagggtgaggcgctcaggcaagttctggtcaaccgttactatggaaacgtcagaccttcgggacgaagagagagccttaccagctttggcaatggcccactgtcagcaggaggacccggcaagcccgggggaggagggggaggttccggatccagctctatgagcaggggtgagatgagtctggccgaggttcagtgtcaccttgacaaggagggggcttccaatctagttatcgacctcatcatgaacgcatccagtgaccgagtgttccatgaaagcattctcctggccattgcccttctggaaggaggcaacaccaccatccagcactcctttttctgtcgcttgacagaagataagaagtcagagaaattctttaaggtgttttatgaccggatgaaggtggcccagcaagaaatcaaagcaacagtgacagtgaacaccagtgacttgggaaataaaaagaaagacgatgaggtagacagggatgccccatcacggaaaaaagctaaagagcccacaacacagataacagaagaggtccgggatcagctcctggaggcctccgctgccaccaggaaagccttcaccactttcaggagggaggctgatcccgacgaccactaccagcctggagagggcacccaggccactgccgacaaggccaaggacgacctggagatgagcgcggtcatcaccatcatgcagcccatcctccgcttccttcagctcctgtgtgaaaaccacaaccgagacctgcagaacttcctccgttgccaaaataacaagaccaactacaatttggtatgtgagaccctgcagtttctggactgtatttgtggaagcacaactggaggccttggtcttctgggcttgtatataaatgaaaagaatgtagcgcttatcaaccaaaccctggaaagtctgaccgaatactgtcaaggaccttgccatgagaaccagaactgcatagccacccatgaatccaatggcattgacatcatcacagccctgatcctcaatgatatcaatcctttgggaaagaagaggatggaccttgtgttagaactgaagaacaatgcctcgaagttgctcctggccatcatggaaagcaggcacgacagtgaaaacgcagagaggatactttataacatgaggcccaaggaactggtggaagtgatcaagaaagcctacatgcaaggtgaagtggaatttgaggatggagaaaacggtgaggatggggcggcgtcccccaggaacgtggggcacaacatctacatattagcccatcagttggctcggcataacaaagaacttcagagcatgctgaaacctggtggccaagtggacggagatgaagccctggagttttatgccaagcacacggcgcagatagagattgtcagattagaccgaacaatggaacagatagtctttcccgtgcccagcatatgtgaattcctaaccaaggagtcaaaactacgaatttactatactacagagagagacgaacaaggcagcaaaatcaatgatttctttctgcggtctgaagacctcttcaatgaaatgaattggcagaagaaactgagagcccagcccgtgttgtactggtgtgcccgcaacatgtctttctggagcagcatttcgtttaacctggccgtcctgatgaacctgctggtggcgtttttctacccgtttaagggagtccgaggaggaaccctggagccccactggtcgggactcctgtggacagccatgctcatctctctggccatcgtcattgccctccccaagccccatggcatccgggccttaattgcctccacaattctacgactgatattttcagtcgggttacaacccacgttgtttcttctgggcgctttcaatgtatgcaataaaatcatctttctaatgagctttgtgggcaactgtgggacattcacaagaggctaccgagccatggttctggatgttgagttcctctatcatttgttgtatctggtgatctgtgccatggggctctttgtccatgaattcttctacagtctgctgctttttgatttagtgtacagagaagagactttgcttaatgtcattaaaagtgtcactcgcaatggacggtccatcatcctgacagcagttctggctctgatcctcgtttacctgttctcaatagtgggctatcttttcttcaaggatgactttatcttggaagtagataggctgcccaatgaaacagctgttccagaaaccggcgagagtttggcaagcgagttcctgttctccgatgtgtgtagggtggagagtggggagaactgctcctctcctgcacccagagaagagctggtccctgcagaagagacggaacaggataaagagcacacatgtgagacgctgctgatgtgcattgtcactgtgctgagtcacgggctgcggagcgggggtggagtaggagatgtactcaggaagccgtccaaagaggaacccctgtttgctgctagagttatttatgacctcttgttcttcttcatggtcatcatcattgttcttaacctgatttttggggttatcattgacacttttgctgacctgaggagtgagaagcagaagaaggaagagatcttgaagaccacgtgctttatctgtggcttggaaagagacaagtttgacaacaagactgtcacctttgaagagcacatcaaggaagaacacaacatgtggcactatctgtgcttcatcgtcctggtgaaagtaaaggactccaccgaatatactgggcctgagagttacgtggcagaaatgatcaaggaaagaaaccttgactggttccccaggatgagagccatgtcattggtcagcagtgattctgaaggagaacagaatgagctgagaaacctgcaggagaagctggagtccaccatgaaacttgtcacgaacctttctggccagctgtcggaattaaaggatcagatgacagaacaaaggaagcagaaacaaagaattggtcttctaggacatcctcctcacatgaatgtcaacccacaacaaccagcataagcaaatgaaagaaaggaattgtatttaccttttataattattattagtgtgggtatggctaatgagttctgattcacccacgaaggttacatttatgctgaatacatttgtaaatactcagttttatactgtatgtatatgattgctactctaaaggtttggatatatgtattgtaattagaattgttggcatgatgacatttcatttgtgccaaaaatattaaaaatgccttttttggaaggactaacagaaagcacctgatttgcacttgaaccagattatagatttaaaagtatatgacatgtattttgtatttaaaactagaatagccagtatttatgttttttataaaactgtgcaatacgaattatgcaatcacaatacatttgtagctcccgagtgtcctaaagggagtgcacttctttgaagctggtgtgttaatactatgtaataaatggttaactttcaaatgatgctgctgccaaaattatattaatagtgagtttcaggcccctgggcattttgtaccatgtaattatcctctggtgatgctgtttctcgttagtggcagtagtgcctccgtctcctagtgataatgctccaagtctatgaactgttaaatcagcattcattttaagaaaagcaactttagtttcaaagatacttttaagcttctaaattgatcatttaaactatttctttaaataagagagccaaattagaggctcatactttagcttgtgaagaagataatgaattttttaaagggaactttctatgcaatgttcaggataaatgcatactgctggccaatcagtgtcatctcctgggtaaattttgatgtcgcattataaagacatgcataattgatggtttctagattatctagtccaaacaatagagtttattttttcttcatctgaaccaacatgctacagtagctaagaagtattaaaactatatacatccatataaagatgaaatatgaactatctcattagaagtcatagttgaccacagacatgttattcttctgaaagagccacattttggttttatttcttgtcacatgatttcttttcttgatggatgaaaaatatgaaaggaaacttttatatctgttgcctagttttgtacatggatctcattttacaagagaatctctctgcaaaaaaaaaaaaaacagtttaaaaatgcattgaaagcagagttctgaaatgagtaaagtttgtaaatgcatatataaaaatatttaataaatgatgcagaatatacagtga

SEQ ID NO: 142786 - DNA, 9717 bp, Homo sapiens
  Payload ID: 8214
  Gene Symbol: ITPR1
  Gene Name: inositol 1,4,5-trisphosphate receptor, type 1
  Uniprot ID: Q14643
  ENST ID: ENST00000456211
  CDS Start-End: 349-8436
agtaaccatgtggatgtgctgctgaagcgtttcctcaagctcgctggggtgggaggagaggaggaggaggaggtggtggtggaggaggaggcagggggtggagagagagaaagcgcacgccgagaggaggtgtgggtgttccgcttccatcctaacggaacgagctccctcttcgcggacatgggattacccagcggctgctaacccctctcctcgccctgctcccccaaaccggcgtggctccccgggcaccaaggagctgactacagaggagcaggatttgcacccctcgctgggcttgctttggcaacagagtgcctgacccaggtcaggattttcaagaaagacatgtctgacaaaatgtctagcttcctacatattggagacatttgttctctgtacgcggagggatcgacaaatggatttattagcaccttgggcctggttgatgatcgttgtgttgtacagccagaaaccggggaccttaacaatccacctaagaaattcagagactgcctctttaagctatgtcccatgaaccgctactctgcccaaaagcagttctggaaagccgctaagcctggggccaacagcaccacagacgcagtgctactcaacaaactgcaccacgctgcagacttggaaaagaagcagaatgagacagaaaacaggaaattgctggggaccgtaatccagtatggcaatgtgatccagctcctgcatttgaaaagtaataaatacctaacagtgaataagaggcttcctgctctgttggagaagaatgccatgagagtcacattggacgaggctggaaatgaagggtcctggttttatattcagccattctacaagctgcgatccattggagacagcgtggtcataggtgacaaggtggttctgaaccccgtcaatgctggtcagcccctacatgctagcagccatcaactggtagataacccaggctgcaatgaggtcaattccgtcaactgcaatacaagctggaaaatagtccttttcatgaaatggagtgataacaaagacgacatattaaaggggggtgacgtggtgaggctgtttcatgctgagcaggagaagtttctcacctgtgacgaacacaggaagaagcagcacgtcttcctgagaaccacgggccggcagtcggccacatctgccaccagttcaaaagccctgtgggaggtggaggtggtccagcatgacccatgtcggggcggagcagggtattggaacagccttttccgtttcaagcatctggccacggggcattacttggcagcagaggtggaccctgatcaggacgcctctcgaagtaggttgcggaatgcccaagaaaagatggtatactccctggtctctgtgcctgaaggcaatgacatctcctccattttcgagctagatcccaccactctgcgtggaggtgacagccttgtcccaaggaactcttatgttcggctcagacacctatgtactaatacctgggttcacagcacaaatattcctattgacaaggaagaagaaaagcccgtgatgctgaaaattggcacctctcctgtgaaggaggataaggaagcatttgccatagttccggtttctcctgctgaagttcgggacctggactttgccaatgatgccagcaaggtgctgggctccattgctgggaagctagagaagggcaccatcacccagaatgaaaggaggtctgtaaccaagctgctagaagatttggtttacttcgtcactggtggaactaattctggtcaagatgttctcgaagttgtcttctccaagcccaacagagaacggcagaaactgatgagagaacagaatattctcaagcagatcttcaagttgttacaagccccattcacagactgcggtgatggcccaatgcttcggctggaagagctcggggaccagcggcacgctcctttcagacacatctgccggctctgctacagggtgctgagacactcgcagcaagactacaggaagaaccaggagtatatagccaagcagtttggcttcatgcagaagcagattggctatgatgtgttggctgaagacactatcactgccctgctccacaataatcggaaactcctggaaaaacacattaccgcggcagagattgacacatttgtcagcctggtgcgaaagaacagggagcccagattcttagattacctctccgacctctgtgtctccatgaacaaatcaattccagtgacccaggaactgatatgtaaagctgtgctgaaccccaccaacgctgacatcctgattgagaccaagttggttctttctcgttttgaatttgaaggtgtctcttccactggagagaatgctctggaggcaggagaagacgaggaagaggtgtggctgttttggagggacagcaacaaagagattcgcagcaagagtgtgagggaattggctcaggatgctaaagaagggcagaaggaggaccgagacgttctcagctactacagatatcagctgaacctctttgcgaggatgtgtctggaccgccaatacctggccatcaacgaaatctcaggccagctggatgtcgatctcattctccgctgcatgtctgacgagaacctgccctatgacctcagggcgtccttctgccgcctcatgcttcacatgcatgtggaccgagatccccaggaacaagtcacccccgtgaaatatgcccgcctctggtcggagattccctcggagatcgccattgacgactatgatagtagtggagcttccaaagatgaaattaaggagagatttgctcagaccatggagtttgtggaggagtatttaagagatgtggtttgtcagaggttccctttctctgataaagagaagaataagcttacgtttgaggttgtaaatttagctaggaatctcatatactttggtttctacaacttctctgaccttctacgattaactaagatccttctggccatattggactgtgtacatgtgacaacaatcttccccattagcaagatggcgaaaggagaagagaataaaggcagtaacgtgatgagatctattcatggcgtgggagagctgatgacccaggtggtgctccggggaggaggctttttgcccatgactcccatggctgctgcccctgaaggcaatgtgaagcaggcagagcctgagaaggaggacatcatggtcatggacaccaagctgaagatcattgagatactccagtttattttgaatgtgaggttggattataggatctcctgcctcctgtgtatatttaagcgagagtttgatgaaagcaattcccagacttcagaaacatcctccggaaacagcagccaagaagggccaagtaatgtaccaggtgctcttgactttgaacacattgaagaacaagcagaaggcatctttggaggaagtgaggagaacaccccactggacttggatgaccacggcggcagaacctttctccgtgtcctgctccacttgacgatgcatgactacccacccctggtgtcaggggccctgcagctcctcttccggcacttcagccagaggcaggaggtgctccaggccttcaaacaggttcaactgctggttaccagccaagatgtggacaactacaaacagatcaaacaagacttggatcaactgaggtccatcgtggaaaagtcagagctttgggtgtacaaagggcagggccccgatgagactatggatggtgcatctggagaaaatgaacataagaaaacggaggagggaaataacaagccacaaaagcatgaaagcaccagcagctacaactacagagtggtcaaagagattttgattcggcttagcaaactctgtgttcaagagagtgcctcagtgagaaagagcaggaagcagcaacagcgtctgctccggaacatgggcgcgcacgccgtggtgctggagctgctgcagattccctatgagaaggccgaagataccaagatgcaagagataatgaggttggctcatgaatttttgcagaatttctgcgcaggcaaccagcagaatcaagctttgctacataaacacataaacctgtttctcaacccagggatcctggaggcagtaaccatgcagcacatcttcatgaacaatttccagctttgcagtgagatcaacgagagagttgttcagcacttcgttcactgcatagagactcacggtcggaatgtccagtatataaagttcttacagacaattgtcaaggcagaagggaaatttattaaaaaatgccaagacatggttatggccgagctggtcaattcgggagaggatgtcctcgtgttctacaacgacagagcctctttccagactctgatccagatgatgcggtcagaacgggatcggatggatgagaacagccctctcatgtaccacatccacttggtcgagctcctggctgtgtgcacggagggtaagaatgtctacacagagatcaagtgcaactccctgctcccgctggatgacatcgttcgcgtggtgacccacgaggactgcatccctgaggttaaaattgcatacattaacttcctgaatcactgctatgtggatacagaggtggaaatgaaggagatttataccagcaatcacatgtggaaattgtttgagaatttccttgtagacatctgcagggcctgtaacaacactagtgacaggaaacatgcagactcgattttggagaagtatgtcaccgaaatcgtcatgagtattgttactactttcttcagctctcccttctcagaccagagtacgactttgcagactcgccagcctgtctttgtgcaactgctgcaaggcgtgttcagggtttaccactgcaactggttaatgccaagccaaaaagcctccgtggagagctgtattcgggtgctgtctgatgtagccaagagccgggccattgccattcccgtggacctggacagccaagtcaacaacctctttctcaagtcccacagcattgtgcagaaaacagccatgaactggcggctctcagcccgcaatgccgcacgcagggactctgttctggcagcttccagagactaccggaatatcattgagagattgcaggacatcgtctccgcgctggaggaccgtctcaggcccctggtgcaggcagagttatctgtgctcgtggatgttctccacagacccgagctgcttttcccagagaacacagacgccagaaggaaatgtgaaagtggcggtttcatttgcaagttaataaagcatacaaaacagctgctagaagaaaatgaagagaagctctgcattaaggtcctacagaccctgagggaaatgatgaccaaagatagaggctatggagaaaagggtgaggcgctcaggcaagttctggtcaaccgttactatggaaacgtcagaccttcgggacgaagagagagccttaccagctttggcaatggcccactgtcagcaggaggacccggcaagcccgggggaggagggggaggttccggatccagctctatgagcaggggtgagatgagtctggccgaggttcagtgtcaccttgacaaggagggggcttccaatctagttatcgacctcatcatgaacgcatccagtgaccgagtgttccatgaaagcattctcctggccattgcccttctggaaggaggcaacaccaccatccagcactcctttttctgtcgcttgacagaagataagaagtcagagaaattctttaaggtgttttatgaccggatgaaggtggcccagcaagaaatcaaagcaacagtgacagtgaacaccagtgacttgggaaataaaaagaaagacgatgaggtagacagggatgccccatcacggaaaaaagctaaagagcccacaacacagataacagaagaggtccgggatcagctcctggaggcctccgctgccaccaggaaagccttcaccactttcaggagggaggctgatcccgacgaccactaccagcctggagagggcacccaggccactgccgacaaggccaaggacgacctggagatgagcgcggtcatcaccatcatgcagcccatcctccgcttccttcagctcctgtgtgaaaaccacaaccgagacctgcagaacttcctccgttgccaaaataacaagaccaactacaatttggtatgtgagaccctgcagtttctggactgtatttgtggaagcacaactggaggccttggtcttctgggcttgtatataaatgaaaagaatgtagcgcttatcaaccaaaccctggaaagtctgaccgaatactgtcaaggaccttgccatgagaaccagaactgcatagccacccatgaatccaatggcattgacatcatcacagccctgatcctcaatgatatcaatcctttgggaaagaagaggatggaccttgtgttagaactgaagaacaatgcctcgaagttgctcctggccatcatggaaagcaggcacgacagtgaaaacgcagagaggatactttataacatgaggcccaaggaactggtggaagtgatcaagaaagcctacatgcaaggtgaagtggaatttgaggatggagaaaacggtgaggatggggcggcgtcccccaggaacgtggggcacaacatctacatattagcccatcagttggctcggcataacaaagaacttcagagcatgctgaaacctggtggccaagtggacggagatgaagccctggagttttatgccaagcacacggcgcagatagagattgtcagattagaccgaacaatggaacagatagtctttcccgtgcccagcatatgtgaattcctaaccaaggagtcaaaactacgaatttactatactacagagagagacgaacaaggcagcaaaatcaatgatttctttctgcggtctgaagacctcttcaatgaaatgaattggcagaagaaactgagagcccagcccgtgttgtactggtgtgcccgcaacatgtctttctggagcagcatttcgtttaacctggccgtcctgatgaacctgctggtggcgtttttctacccgtttaagggagtccgaggaggaaccctggagccccactggtcgggactcctgtggacagccatgctcatctctctggccatcgtcattgccctccccaagccccatggcatccgggccttaattgcctccacaattctacgactgatattttcagtcgggttacaacccacgttgtttcttctgggcgctttcaatgtatgcaataaaatcatctttctaatgagctttgtgggcaactgtgggacattcacaagaggctaccgagccatggttctggatgttgagttcctctatcatttgttgtatctggtgatctgtgccatggggctctttgtccatgaattcttctacagtctgctgctttttgatttagtgtacagagaagagactttgcttaatgtcattaaaagtgtcactcgcaatggacggtccatcatcctgacagcagttctggctctgatcctcgtttacctgttctcaatagtgggctatcttttcttcaaggatgactttatcttggaagtagataggctgcccaatgaaacagctgttccagaaaccggcgagagtttggcaagcgagttcctgttctccgatgtgtgtagggtggagagtggggagaactgctcctctcctgcacccagagaagagctggtccctgcagaagagacggaacaggataaagagcacacatgtgagacgctgctgatgtgcattgtcactgtgctgagtcacgggctgcggagcgggggtggagtaggagatgtactcaggaagccgtccaaagaggaacccctgtttgctgctagagttatttatgacctcttgttcttcttcatggtcatcatcattgttcttaacctgatttttggggttatcattgacacttttgctgacctgaggagtgagaagcagaagaaggaagagatcttgaagaccacgtgctttatctgtggcttggaaagagacaagtttgacaacaagactgtcacctttgaagagcacatcaaggaagaacacaacatgtggcactatctgtgcttcatcgtcctggtgaaagtaaaggactccaccgaatatactgggcctgagagttacgtggcagaaatgatcaaggaaagaaaccttgactggttccccaggatgagagccatgtcattggtcagcagtgattctgaaggagaacagaatgagctgagaaacctgcaggagaagctggagtccaccatgaaacttgtcacgaacctttctggccagctgtcggaattaaaggatcagatgacagaacaaaggaagcagaaacaaagaattggtcttctaggacatcctcctcacatgaatgtcaacccacaacaaccagcataagcaaatgaaagaaaggaattgtatttaccttttataattattattagtgtgggtatggctaatgagttctgattcacccacgaaggttacatttatgctgaatacatttgtaaatactcagttttatactgtatgtatatgattgctactctaaaggtttggatatatgtattgtaattagaattgttggcatgatgacatttcatttgtgccaaaaatattaaaaatgccttttttggaaggactaacagaaagcacctgatttgcacttgaaccagattatagatttaaaagtatatgacatgtattttgtatttaaaactagaatagccagtatttatgttttttataaaactgtgcaatacgaattatgcaatcacaatacatttgtagctcccgagtgtcctaaagggagtgcacttctttgaagctggtgtgttaatactatgtaataaatggttaactttcaaatgatgctgctgccaaaattatattaatagtgagtttcaggcccctgggcattttgtaccatgtaattatcctctggtgatgctgtttctcgttagtggcagtagtgcctccgtctcctagtgataatgctccaagtctatgaactgttaaatcagcattcattttaagaaaagcaactttagtttcaaagatacttttaagcttctaaattgatcatttaaactatttctttaaataagagagccaaattagaggctcatactttagcttgtgaagaagataatgaattttttaaagggaactttctatgcaatgttcaggataaatgcatactgctggccaatcagtgtcatctcctgggtaaattttgatgtcgcattataaagacatgcataattgatggtttctagattatctagtccaaacaatagagtttattttttcttcatctgaaccaacatgctacagtagctaagaagtattaaaactatatacatccatataaagatgaaatatgaactatctcattagaagtcatagttgaccacagacatgttattcttctgaaagagccacattttggttttatttcttgtcacatgatttcttttcttgatggatgaaaaatatgaaaggaaacttttatatctgttgcctagttttgtacatggatctcattttacaagagaatctctctgcaaaaaaaaaaaaaacagtttaaaaatgcattgaaagcagagttctgaaatgagtaaagtttgtaaatgcatatataaaaatatttaataaatgatgcagaatatacagtga

SEQ ID NO: 142787 - DNA, 9513 bp, Homo sapiens
  Payload ID: 8214
  Gene Symbol: ITPR1
  Gene Name: inositol 1,4,5-trisphosphate receptor, type 1
  Uniprot ID: Q14643
  ENST ID: ENST00000443694
  CDS Start-End: 1-8232
atgtctgacaaaatgtctagcttcctacatattggagacatttgttctctgtacgcggagggatcgacaaatggatttattagcaccttgggcctggttgatgatcgttgtgttgtacagccagaaaccggggaccttaacaatccacctaagaaattcagagactgcctctttaagctatgtcccatgaaccgctactctgcccaaaagcagttctggaaagccgctaagcctggggccaacagcaccacagacgcagtgctactcaacaaactgcaccacgctgcagacttggaaaagaagcagaatgagacagaaaacaggaaattgctggggaccgtaatccagtatggcaatgtgatccagctcctgcatttgaaaagtaataaatacctaacagtgaataagaggcttcctgctctgttggagaagaatgccatgagagtcacattggacgaggctggaaatgaagggtcctggttttatattcagccattctacaagctgcgatccattggagacagcgtggtcataggtgacaaggtggttctgaaccccgtcaatgctggtcagcccctacatgctagcagccatcaactggtagataacccaggctgcaatgaggtcaattccgtcaactgcaatacaagctggaaaatagtccttttcatgaaatggagtgataacaaagacgacatattaaaggggggtgacgtggtgaggctgtttcatgctgagcaggagaagtttctcacctgtgacgaacacaggaagaagcagcacgtcttcctgagaaccacgggccggcagtcggccacatctgccaccagttcaaaagccctgtgggaggtggaggtggtccagcatgacccatgtcggggcggagcagggtattggaacagccttttccgtttcaagcatctggccacggggcattacttggcagcagaggtggaccctgatcaggacgcctctcgaagtaggttgcggaatgcccaagaaaagatggtatactccctggtctctgtgcctgaaggcaatgacatctcctccattttcgagctagatcccaccactctgcgtggaggtgacagccttgtcccaaggaactcttatgttcggctcagacacctatgtactaatacctgggttcacagcacaaatattcctattgacaaggaagaagaaaagcccgtgatgctgaaaattggcacctctcctgtgaaggaggataaggaagcatttgccatagttccggtttctcctgctgaagttcgggacctggactttgccaatgatgccagcaaggtgctgggctccattgctgggaagctagagaagggcaccatcacccagaatgaaaggaggtctgtaaccaagctgctagaagatttggtttacttcgtcactggtggaactaattctggtcaagatgttctcgaagttgtcttctccaagcccaacagagaacggcagaaactgatgagagaacagaatattctcaagcagatcttcaagttgttacaagccccattcacagactgcggtgatggcccaatgcttcggctggaagagctcggggaccagcggcacgctcctttcagacacatctgccggctctgctacagggtgctgagacactcgcagcaagactacaggaagaaccaggagtatatagccaagcagtttggcttcatgcagaagcagattggctatgatgtgttggctgaagacactatcactgccctgctccacaataatcggaaactcctggaaaaacacattaccgcggcagagattgacacatttgtcagcctggtgcgaaagaacagggagcccagattcttagattacctctccgacctctgtgtctccatgaacaaatcaattccagtgacccaggaactgatatgtaaagctgtgctgaaccccaccaacgctgacatcctgattgagaccaagttggttctttctcgttttgaatttgaaggtgtctcttccactggagagaatgctctggaggcaggagaagacgaggaagaggtgtggctgttttggagggacagcaacaaagagattcgcagcaagagtgtgagggaattggctcaggatgctaaagaagggcagaaggaggaccgagacgttctcagctactacagatatcagctgaacctctttgcgaggatgtgtctggaccgccaatacctggccatcaacgaaatctcaggccagctggatgtcgatctcattctccgctgcatgtctgacgagaacctgccctatgacctcagggcgtccttctgccgcctcatgcttcacatgcatgtggaccgagatccccaggaacaagtcacccccgtgaaatatgcccgcctctggtcggagattccctcggagatcgccattgacgactatgatagtagtggagcttccaaagatgaaattaaggagagatttgctcagaccatggagtttgtggaggagtatttaagagatgtggtttgtcagaggttccctttctctgataaagagaagaataagcttacgtttgaggttgtaaatttagctaggaatctcatatactttggtttctacaacttctctgaccttctacgattaactaagatccttctggccatattggactgtgtacatgtgacaacaatcttccccattagcaagatggcgaaaggagaagagaataaaggtaacaatgatgtggagaagctgaagagcagtaacgtgatgagatctattcatggcgtgggagagctgatgacccaggtggtgctccggggaggaggctttttgcccatgactcccatggctgctgcccctgaaggcaatgtgaagcaggcagagcctgagaaggaggacatcatggtcatggacaccaagctgaagatcattgagatactccagtttattttgaatgtgaggttggattataggatctcctgcctcctgtgtatatttaagcgagagtttgatgaaagcaattcccagacttcagaaacatcctccggaaacagcagccaagaagggccaagtaatgtaccaggtgctcttgactttgaacacattgaagaacaagcagaaggcatctttggaggaagtgaggagaacaccccactggacttggatgaccacggcggcagaacctttctccgtgtcctgctccacttgacgatgcatgactacccacccctggtgtcaggggccctgcagctcctcttccggcacttcagccagaggcaggaggtgctccaggccttcaaacaggttcaactgctggttaccagccaagatgtggacaactacaaacagatcaaacaagacttggatcaactgaggtccatcgtggaaaagtcagagctttgggtgtacaaagggcagggccccgatgagactatggatggtgcatctggagaaaatgaacataagaaaacggaggagggaaataacaagccacaaaagcatgaaagcaccagcagctacaactacagagtggtcaaagagattttgattcggcttagcaaactctgtgttcaagagagtgcctcagtgagaaagagcaggaagcagcaacagcgtctgctccggaacatgggcgcgcacgccgtggtgctggagctgctgcagattccctatgagaaggccgaagataccaagatgcaagagataatgaggttggctcatgaatttttgcagaatttctgcgcaggcaaccagcagaatcaagctttgctacataaacacataaacctgtttctcaacccagggatcctggaggcagtaaccatgcagcacatcttcatgaacaatttccagctttgcagtgagatcaacgagagagttgttcagcacttcgttcactgcatagagactcacggtcggaatgtccagtatataaagttcttacagacaattgtcaaggcagaagggaaatttattaaaaaatgccaagacatggttatggccgagctggtcaattcgggagaggatgtcctcgtgttctacaacgacagagcctctttccagactctgatccagatgatgcggtcagaacgggatcggatggatgagaacagccctctcatgtaccacatccacttggtcgagctcctggctgtgtgcacggagggtaagaatgtctacacagagatcaagtgcaactccctgctcccgctggatgacatcgttcgcgtggtgacccacgaggactgcatccctgaggttaaaattgcatacattaacttcctgaatcactgctatgtggatacagaggtggaaatgaaggagatttataccagcaatcacatgtggaaattgtttgagaatttccttgtagacatctgcagggcctgtaacaacactagtgacaggaaacatgcagactcgattttggagaagtatgtcaccgaaatcgtcatgagtattgttactactttcttcagctctcccttctcagaccagagtacgactttgcagactcgccagcctgtctttgtgcaactgctgcaaggcgtgttcagggtttaccactgcaactggttaatgccaagccaaaaagcctccgtggagagctgtattcgggtgctgtctgatgtagccaagagccgggccattgccattcccgtggacctggacagccaagtcaacaacctctttctcaagtcccacagcattgtgcagaaaacagccatgaactggcggctctcagcccgcaatgccgcacgcagggactctgttctggcagcttccagagactaccggaatatcattgagagattgcaggacatcgtctccgcgctggaggaccgtctcaggcccctggtgcaggcagagttatctgtgctcgtggatgttctccacagacccgagctgcttttcccagagaacacagacgccagaaggaaatgtgaaagtggcggtttcatttgcaagttaataaagcatacaaaacagctgctagaagaaaatgaagagaagctctgcattaaggtcctacagaccctgagggaaatgatgaccaaagatagaggctatggagaaaagctaatttccattgatgaattggataatgctgagcttcctccagctccggattctgagaacgccactgaggagcttgaaccaagtccacccctgcggcagctggaagaccataaaaggggtgaggcgctcaggcaagttctggtcaaccgttactatggaaacgtcagaccttcgggacgaagagagagccttaccagctttggcaatggcccactgtcagcaggaggacccggcaagcccgggggaggagggggaggttccggatccagctctatgagcaggggtgagatgagtctggccgaggttcagtgtcaccttgacaaggagggggcttccaatctagttatcgacctcatcatgaacgcatccagtgaccgagtgttccatgaaagcattctcctggccattgcccttctggaaggaggcaacaccaccatccagcactcctttttctgtcgcttgacagaagataagaagtcagagaaattctttaaggtgttttatgaccggatgaaggtggcccagcaagaaatcaaagcaacagtgacagtgaacaccagtgacttgggaaataaaaagaaagacgatgaggtagacagggatgccccatcacggaaaaaagctaaagagcccacaacacagataacagaagaggtccgggatcagctcctggaggcctccgctgccaccaggaaagccttcaccactttcaggagggaggctgatcccgacgaccactaccagcctggagagggcacccaggccactgccgacaaggccaaggacgacctggagatgagcgcggtcatcaccatcatgcagcccatcctccgcttccttcagctcctgtgtgaaaaccacaaccgagacctgcagaacttcctccgttgccaaaataacaagaccaactacaatttggtatgtgagaccctgcagtttctggactgtatttgtggaagcacaactggaggccttggtcttctgggcttgtatataaatgaaaagaatgtagcgcttatcaaccaaaccctggaaagtctgaccgaatactgtcaaggaccttgccatgagaaccagaactgcatagccacccatgaatccaatggcattgacatcatcacagccctgatcctcaatgatatcaatcctttgggaaagaagaggatggaccttgtgttagaactgaagaacaatgcctcgaagttgctcctggccatcatggaaagcaggcacgacagtgaaaacgcagagaggatactttataacatgaggcccaaggaactggtggaagtgatcaagaaagcctacatgcaaggtgaagtggaatttgaggatggagaaaacggtgaggatggggcggcgtcccccaggaacgtggggcacaacatctacatattagcccatcagttggctcggcataacaaagaacttcagagcatgctgaaacctggtggccaagtggacggagatgaagccctggagttttatgccaagcacacggcgcagatagagattgtcagattagaccgaacaatggaacagatagtctttcccgtgcccagcatatgtgaattcctaaccaaggagtcaaaactacgaatttactatactacagagagagacgaacaaggcagcaaaatcaatgatttctttctgcggtctgaagacctcttcaatgaaatgaattggcagaagaaactgagagcccagcccgtgttgtactggtgtgcccgcaacatgtctttctggagcagcatttcgtttaacctggccgtcctgatgaacctgctggtggcgtttttctacccgtttaagggagtccgaggaggaaccctggagccccactggtcgggactcctgtggacagccatgctcatctctctggccatcgtcattgccctccccaagccccatggcatccgggccttaattgcctccacaattctacgactgatattttcagtcgggttacaacccacgttgtttcttctgggcgctttcaatgtatgcaataaaatcatctttctaatgagctttgtgggcaactgtgggacattcacaagaggctaccgagccatggttctggatgttgagttcctctatcatttgttgtatctggtgatctgtgccatggggctctttgtccatgaattcttctacagtctgctgctttttgatttagtgtacagagaagagactttgcttaatgtcattaaaagtgtcactcgcaatggacggtccatcatcctgacagcagttctggctctgatcctcgtttacctgttctcaatagtgggctatcttttcttcaaggatgactttatcttggaagtagataggctgcccaatgaaacagctgttccagaaaccggcgagagtttggcaagcgagttcctgttctccgatgtgtgtagggtggagagtggggagaactgctcctctcctgcacccagagaagagctggtccctgcagaagagacggaacaggataaagagcacacatgtgagacgctgctgatgtgcattgtcactgtgctgagtcacgggctgcggagcgggggtggagtaggagatgtactcaggaagccgtccaaagaggaacccctgtttgctgctagagttatttatgacctcttgttcttcttcatggtcatcatcattgttcttaacctgatttttggggttatcattgacacttttgctgacctgaggagtgagaagcagaagaaggaagagatcttgaagaccacgtgctttatctgtggcttggaaagagacaagtttgacaacaagactgtcacctttgaagagcacatcaaggaagaacacaacatgtggcactatctgtgcttcatcgtcctggtgaaagtaaaggactccaccgaatatactgggcctgagagttacgtggcagaaatgatcaaggaaagaaaccttgactggttccccaggatgagagccatgtcattggtcagcagtgattctgaaggagaacagaatgagctgagaaacctgcaggagaagctggagtccaccatgaaacttgtcacgaacctttctggccagctgtcggaattaaaggatcagatgacagaacaaaggaagcagaaacaaagaattggtcttctaggacatcctcctcacatgaatgtcaacccacaacaaccagcataagcaaatgaaagaaaggaattgtatttaccttttataattattattagtgtgggtatggctaatgagttctgattcacccacgaaggttacatttatgctgaatacatttgtaaatactcagttttatactgtatgtatatgattgctactctaaaggtttggatatatgtattgtaattagaattgttggcatgatgacatttcatttgtgccaaaaatattaaaaatgccttttttggaaggactaacagaaagcacctgatttgcacttgaaccagattatagatttaaaagtatatgacatgtattttgtatttaaaactagaatagccagtatttatgttttttataaaactgtgcaatacgaattatgcaatcacaatacatttgtagctcccgagtgtcctaaagggagtgcacttctttgaagctggtgtgttaatactatgtaataaatggttaactttcaaatgatgctgctgccaaaattatattaatagtgagtttcaggcccctgggcattttgtaccatgtaattatcctctggtgatgctgtttctcgttagtggcagtagtgcctccgtctcctagtgataatgctccaagtctatgaactgttaaatcagcattcattttaagaaaagcaactttagtttcaaagatacttttaagcttctaaattgatcatttaaactatttctttaaataagagagccaaattagaggctcatactttagcttgtgaagaagataatgaattttttaaagggaactttctatgcaatgttcaggataaatgcatactgctggccaatcagtgtcatctcctgggtaaattttgatgtcgcattataaagacatgcataattgatggtttctagattatctagtccaaacaatagagtttattttttcttcatctgaaccaacatgctacagtagctaagaagtattaaaactatatacatccatataaagatgaaatatgaactatctcattagaagtcatagttgaccacagacatgttattcttctgaaagagccacattttggttttatttcttgtcacatgatttcttttcttgatggatgaaaaatatgaaaggaaacttttatatctgttgcctagttttgtacatggatctcattttacaagagaatctctctgcaaaaaaaaaaaaaacagtttaaaaatgcattgaaagcagagttctgaaatgagtaaagtttgtaaatgcatatataaaaatatttaataaatgatgcagaatatacagtga

SEQ ID NO: 142788 - DNA, 4131 bp, Homo sapiens
  Payload ID: 8214
  Gene Symbol: ITPR1
  Gene Name: inositol 1,4,5-trisphosphate receptor, type 1
  ENST ID: ENST00000544951
  CDS Start-End: 351-2516
gcagtaaccatgtggatgtgctgctgaagcgtttcctcaagctcgctggggtgggaggagaggaggaggaggaggtggtggtggaggaggaggcagggggtggagagagagaaagcgcacgccgagaggaggtgtgggtgttccgcttccatcctaacggaacgagctccctcttcgcggacatgggattacccagcggctgctaacccctctcctcgccctgctcccccaaaccggcgtggctccccgggcaccaaggagctgactacagaggagcaggatttgcacccctcgctgggcttgctttggcaacagagtgcctgacccaggtcaggattttcaagaaagacatgtctgacaaaatgtctagcttcctacatattggagacatttgttctctgtacgcggagggatcgacaaatggatttattagcaccttgggcctggttgatgatcgttgtgttgtacagccagaaaccggggaccttaacaatccacctaagaaattcagagactgcctctttaagctatgtcccatgaaccgctactctgcccaaaagcagttctggaaagccgctaagcctggggccaacagcaccacagacgcagtgctactcaacaaactgcaccacgctgcagacttggaaaagaagcagaatgagacagaaaacaggaaattgctggggaccgtaatccagtatggcaatgtgatccagctcctgcatttgaaaagtaataaatacctaacagtgaataagaggcttcctgctctgttggagaagaatgccatgagagtcacattggacgaggctggaaatgaagggtcctggttttatattcagccattctacaagctgcgatccattggagacagcgtggtcataggtgacaaggtggttctgaaccccgtcaatgctggtcagcccctacatgctagcagccatcaactggtagataacccaggctgcaatgaggtcaattccgtcaactgcaatacaagctggaaaatagtccttttcatgaaatggagtgataacaaagacgacatattaaaggggggtgacgtggtgaggctgtttcatgctgagcaggagaagtttctcacctgtgacgaacacaggaagaagcagcacgtcttcctgagaaccacgggccggcagtcggccacatctgccaccagttcaaaagccctgtgggaggtggaggtggtccagcatgacccatgtcggggcggagcagggtattggaacagccttttccgtttcaagcatctggccacggggcattacttggcagcagaggtagaccctgactttgaggaagaatgcctggagtttcagccctcagtatgcaataaaatcatctttctaatgagctttgtgggcaactgtgggacattcacaagaggctaccgagccatggttctggatgttgagttcctctatcatttgttgtatctggtgatctgtgccatggggctctttgtccatgaattcttctacagtctgctgctttttgatttagtgtacagagaagagactttgcttaatgtcattaaaagtgtcactcgcaatggacggtccatcatcctgacagcagttctggctctgatcctcgtttacctgttctcaatagtgggctatcttttcttcaaggatgactttatcttggaagtagataggctgcccaatgaaacagctgttccagaaaccggcgagagtttggcaagcgagttcctgttctccgatgtgtgtagggtggagagtggggagaactgctcctctcctgcacccagagaagagctggtccctgcagaagagacggaacaggataaagagcacacatgtgagacgctgctgatgtgcattgtcactgtgctgagtcacgggctgcggagcgggggtggagtaggagatgtactcaggaagccgtccaaagaggaacccctgtttgctgctagagttatttatgacctcttgttcttcttcatggtcatcatcattgttcttaacctgatttttggggttatcattgacacttttgctgacctgaggagtgagaagcagaagaaggaagagatcttgaagaccacgtgctttatctgtggcttggaaagagacaagtttgacaacaagactgtcacctttgaagagcacatcaaggaagaacacaacatgtggcactatctgtgcttcatcgtcctggtgaaagtaaaggactccaccgaatatactgggcctgagagttacgtggcagaaatgatcaaggaaagaaaccttgactggttccccaggatgagagccatgtcattggtcagcagtgattctgaaggagaacagaatgagctgagaaacctgcaggagaagctggagtccaccatgaaacttgtcacgaacctttctggccagctgtcggaattaaaggatcagatgacagaacaaaggaagcagaaacaaagaattggtcttctaggacatcctcctcacatgaatgtcaacccacaacaaccagcataagcaaatgaaagaaaggaattgtatttaccttttataattattattagtgtgggtatggctaatgagttctgattcacccacgaaggttacatttatgctgaatacatttgtaaatactcagttttatactgtatgtatatgattgctactctaaaggtttggatatatgtattgtaattagaattgttggcatgatgacatttcatttgtgccaaaaatattaaaaatgccttttttggaaggactaacagaaagcacctgatttgcacttgaaccagattatagatttaaaagtatatgacatgtattttgtatttaaaactagaatagccagtatttatgttttttataaaactgtgcaatacgaattatgcaatcacaatacatttgtagctcccgagtgtcctaaagggagtgcacttctttgaagctggtgtgttaatactatgtaataaatggttaactttcaaatgatgctgctgccaaaattatattaatagtgagtttcaggcccctgggcattttgtaccatgtaattatcctctggtgatgctgtttctcgttagtggcagtagtgcctccgtctcctagtgataatgctccaagtctatgaactgttaaatcagcattcattttaagaaaagcaactttagtttcaaagatacttttaagcttctaaattgatcatttaaactatttctttaaataagagagccaaattagaggctcatactttagcttgtgaagaagataatgaattttttaaagggaactttctatgcaatgttcaggataaatgcatactgctggccaatcagtgtcatctcctgggtaaattttgatgtcgcattataaagacatgcataattgatggtttctagattatctagtccaaacaatagagtttattttttcttcatctgaaccaacatgctacagtagctaagaagtattaaaactatatacatccatataaagatgaaatatgaactatctcattagaagtcatagttgaccacagacatgttattcttctgaaagagccacattttggttttatttcttgtcacatgatttcttttcttgatggatgaaaaatatgaaaggaaacttttatatctgttgcctagttttgtacatggatctcattttacaagagaatctctctgcaaaaaaaaaaaaaacagtttaaaaatgcattgaaagcagagttctgaaatgagtaaagtttgtaaatgcatatataaaaatatttaataaatgatgcagaatatacagtgactggttggtggctttcatttggcatttgtgacttaactgctattccatttatgtactttctttaggatcagtttgaagtacagtcggtttgattaccaggttaattcagaaaatgtttacctgattatttaaaaaaacacttgctgttgttatgacagctctgaggagaattattagaacaaacattggggagtatttagtacaacattcattcattcttctggattagtgactgccagccaggctgtcgggagcgccctactaaatctcctgtctcttctgcttttactgggggatctttaatttgctgtgtgccatgtggaagtatcgggaa

SEQ ID NO: 142789 - DNA, 581 bp, Homo sapiens
  Payload ID: 8215
  Gene Symbol: ITPR2
  Gene Name: inositol 1,4,5-trisphosphate receptor, type 2
  Uniprot ID: Q14571
  ENST ID: ENST00000242737
  CDS Start-End: 1-546
atgactgagaaaatgtccagcttcctctacataggggacatcgtgtccctgtacgcggagggctcggtcaacggcttcatcagcaccttggggttagtggatgacagatgtgtggtgcacccagaggccggggaccttgccaaccctcccaagaagttcagagactgccttttcaaggtgtgccctatgaacagatattctgcccagaagcaatattggaaagcaaagcaagccaaacaagggaaccacaccgaggcagccttgctgaagaaactacagcacgctgcagaactggaacaaaaacaaaatgaatcggagaataagaaactgttgggagaaattgtaaaatacagtaatgttatacaactactgcatataaaaagcaacaaatatcttactgtcaacaagagattacctgctttactggagaagaatgccatgcgtgtgtccttggatgctgcaggaaatgaagggtcttggttttatattcatccgttctggaaactgagaagcgagggtgacaatgatgcaagcttctggatttaatttggttaataaattatctggtgatatcttccttt

SEQ ID NO: 142790 - DNA, 11405 bp, Homo sapiens
  Payload ID: 8215
  Gene Symbol: ITPR2
  Gene Name: inositol 1,4,5-trisphosphate receptor, type 2
  Uniprot ID: Q14571
  ENST ID: ENST00000381340
  CDS Start-End: 418-8523
cttccagctcccgccgggcggctgtgacggccgcagcgggtcgcagagcagggagtggacacggagtggggagcggagagggaaggaggaggaggaggagcaaaggtgttggagagaaaacttcagaaaggaacaggaaacctgccggggaggcggcggcggctgcggcttctctgggcgcctgggctgcgctcttcgcggggtgtccgcagctgcggcttggccccggtctggcttccccggcgcgcacgcacggctgagccgcgacgctcagtggctcgggccgtgccctccgccgcggctcttggccgctgtagtcccgcgatccgatccgcttctgccgcggcggctccctggagagagggcggcgagggcgcagggaagaagagggacgtccactgtggaacatgaagcagcatgactgagaaaatgtccagcttcctctacataggggacatcgtgtccctgtacgcggagggctcggtcaacggcttcatcagcaccttggggttagtggatgacagatgtgtggtgcacccagaggccggggaccttgccaaccctcccaagaagttcagagactgccttttcaaggtgtgccctatgaacagatattctgcccagaagcaatattggaaagcaaagcaagccaaacaagggaaccacaccgaggcagccttgctgaagaaactacagcacgctgcagaactggaacaaaaacaaaatgaatcggagaataagaaactgttgggagaaattgtaaaatacagtaatgttatacaactactgcatataaaaagcaacaaatatcttactgtcaacaagagattacctgctttactggagaagaatgccatgcgtgtgtccttggatgctgcaggaaatgaagggtcttggttttatattcatccgttctggaaactgagaagcgagggtgacaatattgttgtaggagataaagttgttttgatgcctgtgaatgcagggcagccactacatgccagcaacatagagcttcttgataacccagggtgtaaagaggtgaatgctgtcaattgcaacaccagctggaaaatcactttattcatgaaatatagttcctatcgagaggatgtattaaaaggaggggacgttgttagattatttcatgcggaacaagagaagtttttgacttgtgatgaatatgagaaaaaacagcacattttccttcgtacgaccttgcgccaatcagctacttctgctactagttctaaagcactctgggaaatagaggtggttcatcatgacccatgccgtgggggtgcaggacagtggaacagcttgttcagatttaagcatcttgcaactggaaactatttagctgcagagcttaatcctgattatcgagatgcccaaaatgaaggaaaaaatgtgagagatggagtccctccaacttcaaagaaaaaacgccaggcaggggagaagatcatgtatactttggtttcagtcccgcatggcaatgacattgcatccctttttgaactagatgccacaactcttcagagagctgactgcctggttccaaggaactcatatgttcggttaaggcatttatgcaccaacacatgggtaaccagtactagtatccccatagacacagatgaagagaggcctgttatgttaaagattggaacctgccaaaccaaagaagataaagaagcgttcgcaatcgtgtctgttccactgtctgaagttcgagacttagactttgccaatgatgccaataaagtactagcgaccacagttaaaaagctagaaaacggcacaataactcagaatgaaaggaggtttgtaaccaaattattggaagatctcatattctttgttgctgatgtgcctaataatggacaagaagttctggatgtggttatcactaagccaaaccgagagcgtcaaaaattgatgagggaacaaaacatactggcacaggtatttggaattcttaaagcaccctttaaagagaaagcaggagaaggctcgatgctgagacttgaagatctgggggatcaaagatatgcaccctacaagtacatgctgcggctctgttaccgcgtcctgagacactcgcagcaggattaccggaaaaatcaggaatatattgctaagaatttctgtgtcatgcagtcccagattggctatgatattttggcagaagatactatcacagctttgttgcacaacaacagaaaactactagagaaacatatcacagcaaaagaaatagaaacatttgtcagtttactcaggagaaatcgggagccaaggtttttggattatttgtcagatctgtgtgtgtctaataccactgctatccctgtaactcaagaactcatctgtaaatttatgttgagtccaggcaatgcagacattctcattcaaactaaggtggtctcaatgcaagcagacaaccccatggagagctccatcctttcagatgacattgatgatgaagaagtttggctctattggattgacagcaacaaggaacctcatggcaaagctatcaggcaccttgctcaagaggcaaaagaaggcaccaaagctgacttagaagttcttacctattacaggtaccagctaaacctctttgcaaggatgtgcttggatcgccagtatctggccataaaccagatttctacacagctgtctgtagacctgatcctgcggtgtgtgtcggatgagagcctgccgttcgacctccgagcgtccttctgtcgcctcatgctccacatgcacgttgaccgggatccccaggagtccgtggtgcctgttcgctatgccaggctctggacagaaatccccacaaagatcacaattcatgaatatgattctataacagactcttccagaaatgatatgaagaggaaatttgccctgacaatggaatttgttgaagaatatttgaaagaagttgtaaaccagccctttccttttggggataaagaaaaaaataaactgacatttgaggtggtccacttggctcggaatcttatatactttggattttatagtttcagtgagttattaaggctaacaagaacacttctggctattttagacattgtacaggcccccatgtcatcatactttgaaagattaagcaaatttcaagatggaggaaacaatgtgatgagaaccattcatggggtgggagagatgatgacccagatggtactcagtagaggctccatcttccccatgagcgtgccggatgtgccacccagcatccacccgagcaagcaagggagccccaccgagcacgaggatgtgactgtgatggacaccaagctgaagatcattgagattttgcagtttatcctgagtgtcagactggattataggatctcatatatgctgtcaatatataagaaggagtttggagaggacaatgacaatgcggagacatctgccagtggatctccagacactttactaccatcagctattgttcctgatatagatgaaattgcagctcaggcagaaactatgtttgcgggaagaaaagaaaaaaatccagttcaacttgacgatgaaggaggcaggacgtttttacgggtcctcattcatctgatcatgcacgactacccgcctttgctgtctggagccctgcagctgttgtttaagcacttcagccagagggcagaggttttacaggcatttaagcaggtgcaattactggtgtctaatcaagacgtagataactacaagcaaatcaaggcagatctagaccagcttcgactgacagtagaaaagtctgagctatgggtggagaagagcagcaactatgagaatggagaaataggggaaagtcaagtgaaaggtggtgaagagccaattgaggaatcaaacattttaagtccagtgcaggatggaacaaagaaacctcagattgacagcaacaagagcaataactaccggattgtaaaggagattttgatcaggctaagtaaactctgtgtgcagaataaaaagtgtcggaatcaacatcaacgattactgaaaaatatgggggcgcattcggtggtgttggatcttctgcagataccctatgaaaagaatgatgaaaagatgaatgaagtaatgaatctagcccatacatttctgcagaatttctgtcgaggaaatccacagaatcaagttcttcttcataaacatctgaatttgtttttaactccaggtctccttgaagcagaaaccatgcggcacatcttcatgaacaattaccatctgtgcaacgaaattagcgagagagttgtacaacactttgtgcactgcattgagacacatggccgccacgtggagtacctgaggtttttgcaaacaattgtaaaagcagatggtaaatatgtgaagaaatgccaggatatggtaatgacagagttgataaatgggggtgaagacgtgctgatattttacaatgatagagcatcatttccaatccttctccatatgatgtgttcagagagagaccgaggggatgagagtggccccttagcctaccacatcaccctggtggagttgctggcagcatgcacagaggggaaaaatgtctacactgaaatcaagtgtaattcccttctcccgctggacgacatagtgagggtggtgacccatgacgactgcatccctgaggttaaaattgcttatgtgaactttgttaatcactgttatgttgacactgaagtggaaatgaaagaaatctatacaagtaaccacatttggaaattatttgagaacttcttggtggatatggcaagggtttgcaacacaactacagacaggaaacatgcagacatctttttggaaaagtgtgttactgagtcaataatgaatattgtgagcggcttctttaattctcccttttcagacaatagtaccagcctccagacacatcagccagtttttattcagctactgcaatctgccttcagaatttacaattgcacctggccaaacccagcgcagaaagcctcagtggaatcctgtatcagaactttggctgaagtggcaaaaaatcgtggaattgccattccagtggatttggacagccaagttaatactcttttcatgaagagccattcaaatatggtgcagagagcagcaatgggttggagactatcagctcgctctgggccacgctttaaggaagctcttggagggcctgcttgggattacagaaatattattgaaaagttacaggatgtagtggcctccttggagcaccagttcagcccaatgatgcaggctgaattctcagtgttggttgatgtattgtacagtccagaactgctgttccctgagggaagcgatgcaagaataagatgtggcgctttcatgtcgaagttgattaatcatacaaagaaactaatggagaaagaagaaaaactgtgcattaaaattcttcagacattacgagaaatgttagagaagaaagacagctttgtggaagagggtaacacattaagaaagatacttctgaatcgatactttaaaggtgattatagtattggtgtgaatggacacctatcaggagcctactccaaaactgcacaggtgggaggaagcttttctggacaagattcagataagatggggatatcaatgtcagacattcagtgtctgctggataaagaaggtgcatcagaacttgtcatcgatgttatagtgaacaccaaaaatgacagaattttttcagaaggcattttcctcggcattgccttgcttgaaggaggaaatacacaaacacagtattctttctaccagcagttgcatgaacaaaaaaagtcagaaaaattctttaaagttctctatgatcgaatgaaggctgctcagaaagaaataagatcaacagtgacagttaataccatagatttaggtaacaaaaaaagggacgatgacaatgaattgatgacatctggtccacgaatgagagtaagagattcaacactacatttaaaagagggaatgaaagggcaattaacagaagcttcttcagcaacatccaaagcatattgtgtatacagaagagaaatggatccagaaatagacattatgtgcacaggaccagaagcgggaaacactgaggaaaaatccgcagaggaagtaacaatgagtcccgcaattgccatcatgcagccaatactgagatttcttcagttactgtgtgagaatcacaaccgggaattgcagaacttcttgaggaatcaaaacaacaaaacaaattacaacctagtctgtgagacccttcagtttctggactgcatttgtggaagtacaaccggtggcctgggcctgttgggtctctacatcaatgagaagaatgtagcgctggtcaaccagaacctggagagcttgactgagtattgccagggcccttgccatgaaaatcagacctgtatcgctacacatgagtctaatgggattgatatcatcattgctttgattctgaatgacataaaccctcttggtaaataccgaatggacctggtgctccagctaaagaacaatgcatctaaacttttgctggccattatggaaagcagacatgacagtgagaatgcagaaagaattctttttaacatgagacccagagaactggtggatgtgatgaagaatgcctataaccaaggattggaatgtgaccatggggatgatgagggtggagatgatggtgtttctccaaaagatgttggacacaatatctatattctggcccatcagttggcccgccacaataaactgttgcagcagatgctcaaaccaggatcggatccagatgaaggagatgaagccttaaagtattatgccaaccacactgcacagattgagattgtccggcatgataggaccatggaacaaatagtttttcctgtccccaatatatgtgaatacctcactcgagaatccaagtgccgtgtgttcaatacaactgaaagggatgaacaaggaagtaaagtgaatgactttttccagcaaacagaagatctctacaatgaaatgaagtggcagaagaaaatcaggaataaccctgcactgttctggttctcgaggcacatctctctctgggggagcatttccttcaacctggctgtgttcatcaatttagctgttgctctcttctacccatttggggatgatggagatgaaggtacactttctccattgttctcggttcttctttggatagcagttgcgatctgcacatctatgctgtttttcttctccaagcctgtgggtattcggccgtttcttgtatcaataatgctcagatcaatatatacaataggtcttgggcctacattaatacttcttggtgcagctaatctttgtaataaaattgtttttctggtgagttttgttggaaatcgtggcacgttcacccgtgggtaccgagcagtcatcctggatatggcctttctctatcacgtggcgtatgtcctggtttgcatgctgggcctttttgtccatgaattcttctatagcttcctgctttttgatttggtgtacagggaagagactttgctgaatgtcataaaaagtgtcacacgaaatggccgctctattattctaactgcagtcctggctctcatcctcgtctacctgttttccattattgggttcctttttttgaaggatgacttcactatggaagttgataggctgaaaaaccgaactcctgttacaggcagtcatcaagtgcctactatgactttaactaccatgatggaagcatgtgccaaggagaactgttcacccacaattccagcttcaaatacagctgatgaagagtatgaagatggaattgaaaggacgtgtgacactctccttatgtgcattgtcaccgtgctgaaccagggcctcaggaatggcggtggtgtgggggatgtgctaagaaggccatcgaaagatgagcccttgtttgctgcccgagtggtttatgaccttcttttttatttcattgttatcattattgttctgaacttgatttttggtgttatcatcgatacttttgctgatctcagaagcgaaaaacagaaaaaagaagaaattctaaagacaacttgtttcatctgtggacttgagagagacaagtttgataataaaacggtttcatttgaggagcacattaagtcagaacacaatatgtggcattatttgtacttcatagtcctggtgaaagttaaagacccaacagaatacactggacctgaaagttatgtggctcaaatgattgtggagaagaatttggattggtttcctcggatgcgagccatgtccctcgttagcaatgaaggcgacagtgagcaaaatgaaattcggagccttcaggagaagttggaatcgaccatgagtctggtcaaacagctgtcgggtcagctggcggagctcaaggagcagatgacagaacaaaggaagaataagcagagactgggcttcctcggatcaaacacaccccatgtgaatcatcacatgccaccacactgataccatggggggaagccgtgactagcctttcatcagtgtcctgcctgatcactgaataaagaactgagatggaggggagtgaacagtgcctattgttgaaaagttaaaaacaaccaagtgccaagatgttgagtgggttagctccgagaacaatttataactgtgttttcatggttgcgaagacctaacctcaaatgcatctgctagaaagcgtacatcacacattcgcaatgcatcaggaagaaaaggcttgcccaaaaggctggagagggcagggagcggcaggatggaaggagacacggggcagggagaactctcttctgctaaatcgataggagtcagttttgtcttaaatgctgactacagccactgacatggttggctggaatttctttcttttaattgtggcatataggtttgtgacacaagaagtcatactttggtggctaagttttactaaggaaaataactgaaaagattaaaagtgagagctgaaaagagaaatgataatgcttccaaactgtagctgtcacagggcaatttctttatttataacatgaagcacaatggatttacagctctaggaacttagtactttggagcttttgcctctcacactgacaacataacaggatgtgattgccttctctgggattcagacaggctctgtcaatgtggagcacaaaaggagattttcatataacttgttaaaaacatgttctaagtcatgtataggctaagattttaagaagatctgggggaataaaaagccaacagtaagccccaggaaagggttttttgagaccatatgtatgctattaaaatatattgagattaatacatgaaaatgcttaaaagtgataggaattattgagaaacttatgatggtggcattgccttttataaacatggagtgaaagccatttgactcaacgtttgctgtgcttaaagaattgcttcaggacccgagcgtttttatgtatgctgttcctgcagttaggaaaaaaaaatccaagaaatgtattgaatactcaagaaaatgccacatttcaattacatatttaaaactgtatctgtaagggcttttcaaaatgtagcaagataaaaatctcttattcaaattgtttttgtattaaatcatgcactcagaatttgtcgagggagagaataacctggtgtgttcaggttattcttagagactacacatttggaatagcagagcaaaatatggataatgaaagtgttgggaaaaaagtgatgtgacagggagtgaagacacttgataccagactctgggagatactctgcaagttgacctggcctctcccccacaggaacaaaacactgcctccagagtctttaaattctcagttatcaacgccaaggtttaaggtctagatagggtttgctatagggtttgctctgacaatttttaaagcttttggattgttctaacatagcttaagctattggttcctaaaaatcccaaatcaagatctatgtagaatataaaggaagcctgaaccaatccttccacatactgttaagatgtagacttggaacaaagctgttgggacccagagcaatgaatttttgaactgaagctactggtactccccagcaccacctcatactaagaattcctcactctgacatgacagtattttttctgaccaggagctgaaagaccctgacattcatgatccaaagatataagaaattttgatatgtctgcatgcagcacagaactttgaacctaggaggcagtcaataaatacatgagaaattcagctgtcattcagttactcttaattctttataaaactttaaatgataccacatatttgtttgtttaaaatggctttcccaaaatcaaagtagactaaagcagccatctttaaaatccaggatcatcaatgctattaacagtatcaggtaaaaagtacactttaaaatattttaatcaggcagagttttatggatagagaatagaagagaaaggtagtaaatattgaacatattccaatataggaacctatctctgttttagtacaaaatatttctgacatctgaactagaggtcaagagaataaattcatttgtatacatctgagcaacctgtctttcagatgataaagtatctagccttttctgacaccataatagttcattttgtagggaataagccattaggtgtatataattgctttctagaaatgacctaatgtccccaaccactttgtagtggcagatcactgtttcacagcatattttctcccaaggaaagtattcaaaagagactgcaactaacaagactcttatttcatcaaaatttaaatatttctgagttgtatttttaatgcctctttcttttctgcctaaatgcttagaaattataaagcaaaaaaaaaaaaaacagcaacaaaaaatcgaagcagacaaaaaaggcacttttcagaacatcaaattcctaatgaagaagaggagaagataatggggaaatttgacatttgatataaatttatatttgttatgtgtatgtttgttaatgcaactggaatatttgacttaggtgagtatcagttaacatccttgtatttatatagtgacatcaaaataaatgcaatcatcttgaactttgatgttaagggagattttgaaaaaatatttagttatttcaaattcatattggttcaaaagtatcagtttctgctgaataatatttttaatttcaaaagggttttgttccctctgtgctccattctgaggctcaagagcttaatgccagtatgttttctgagttaaaataacacttttagatgagaaaatgcttgtatcatacagggctataatataaataaataaattgtatgtatgcaaaa

SEQ ID NO: 142791 - DNA, 2577 bp, Homo sapiens
  Payload ID: 8215
  Gene Symbol: ITPR2
  Gene Name: inositol 1,4,5-trisphosphate receptor, type 2
  ENST ID: ENST00000451599
  CDS Start-End: 1-309
aacaccaaaaatgacagaattttttcagaaggcattttcctcggcattgccttgcttgaaggaggaaatacacaaacacagtattctttctaccagcagttgcatgaacaaaaaaagtcagaaaaattctttaaagttctctatgatcgaatgaaggctgctcagaaagaaataagatcaacagtgacagttaataccatagatttaggtaacaaaaaaagggacgatgacaatgaattgatgacatctggtccacgaatgagagaattttggtcatggggtgaccctaaaacggctctgcaggactaaacttaaatgagacataatcagtgcaaagcaaccaacggcatgaaagatgtttgatttcattgtggcatgcatgtaagagattcaacactacatttaaaagagggaatgaaagggcaattaacagaagcttcttcagcaacatccaaagcatattgtgtatacagaagagaaatggatccagaaatagacattatgtgcacaggaccagaagcgggaaacactgaggaaaaatccgcagaggaagtaacaatgagtcccgcaattgccatcatgcagccaatactgagatttcttcagttactgtgtgagaatcacaaccgggaattgcagaacttcttgaggaatcaaaacaacaaaacaaattacaacctagtctgtgagacccttcagtttctggactgcatttgtggaagtacaaccggtggcctgggcctgttgggtctctacatcaatgagaagaatgtagcgctggtcaaccagaacctggagagcttgactgagtattgccagggcccttgccatgaaaatcagacctgtatcgctacacatgagtctaatgggattgatatcatcattgctttgattctgaatgacataaaccctcttggtaaataccgaatggacctggtgctccagctaaagaacaatgcatctaaacttttgctggccattatggaaagcagacatgacagtgagaatgcagaaagaattctttttaacatgagacccagagaactggtggatgtgatgaagaatgcctataaccaaggattggaatgtgaccatggggatgatgagggtggagatgatggtgtttctccaaaagatgttggacacaatatctatattctggcccatcagttggcccgccacaataaactgttgcagcagatgctcaaaccaggatcggatccagatgaaggagatgaagccttaaagtattatgccaaccacactgcacagattgagattgtccggcatgataggaccatggaacaaatagtttttcctgtccccaatatatgtgaatacctcactcgagaatccaagtgccgtgtgttcaatacaactgaaagggatgaacaaggaagtaaagtgaatgactttttccagcaaacagaagatctctacaatgaaatgaagtggcagaagaaaatcaggaataaccctgcactgttctggttctcgaggcacatctctctctgggggagcatttccttcaacctggctgtgttcatcaatttagctgttgctctcttctacccatttggggatgatggagatgaaggtacactttctccattgttctcggttcttctttggatagcagttgcgatctgcacatctatgctgtttttcttctccaagcctgtgggtattcggccgtttcttgtatcaataatgctcagatcaatatatacaataggtcttgggcctacattaatacttcttggtgcagctaatctttgtaataaaattgtttttctggtgagttttgttggaaatcgtggcacgttcacccgtgggtaccgagcagtcatcctggatatggcctttctctatcacgtggcgtatgtcctggtttgcatgctgggcctttttgtccatgaattcttctatagcttcctgctttttgatttggtgtacagggaagagactttgctgaatgtcataaaaagtgtcacacgaaatggccgctctattattctaactgcagtcctggctctcatcctcgtctacctgttttccattattgggttcctttttttgaaggatgacttcactatggaagttgataggctgaaaaaccgaactcctgttacaggcagtcatcaagtgcctactatgactttaactaccatgatggaagcatgtgccaaggagaactgttcacccacaattccagcttcaaatacagctgatgaagagtatgaagatggaattgaaaggacgtgtgacactctccttatgtgcattgtcaccgtgctgaaccagggcctcaggaatggcggtggtgtgggggatgtgctaagaaggccatcgaaagatgagcccttgtttgctgcccgagtggtttatgaccttcttttttatttcattgttatcattattgttctgaacttgatttttggtgttatcatcgatacttttgctgatctcagaagcgaaaaacagaaaaaagaagaaattctaaagacaacttgtttcatctgtggacttgagagagacaagtttgataataaaacggtttcatttgaggagcacatt

SEQ ID NO: 142792 - DNA, 540 bp, Homo sapiens
  Payload ID: 8215
  Gene Symbol: ITPR2
  Gene Name: inositol 1,4,5-trisphosphate receptor, type 2
  ENST ID: ENST00000545235
  CDS Start-End: 6-245
gcagcatgactgagaaaatgtccagcttcctctacataggggacatcgtgtccctgtacgcggagggctcggtcaacggcttcatcagcaccttgggactgccttttcaaggtgtgccctatgaacagatattctgcccagaagcaatattggaaagcaaagcaagccaaacaagggaaccacaccgaggcagccttgctgaagaaactacagcacgctgcagaactggaacaaaaacaaaatgaatcggagaataagaaactgttgggagaaattgtaaaatacagtaatgttatacaactactgcatataaaaagcaacaaatatcttactgtcaacaagagattacctgctttactggagaagaatgccatgcgtgtgtccttggatgctgcaggaaatgaagggtcttggttttatattcatccgttctggaaactgagaagcgagggtgacaatattgttgtaggagataaagttgttttgatgcctgtgaatgcagggcagccactacatgccagcaacatagagcttcttgat

SEQ ID NO: 142793 - DNA, 9870 bp, Homo sapiens
  Payload ID: 8216
  Gene Symbol: ITPR3
  Gene Name: inositol 1,4,5-trisphosphate receptor, type 3
  Uniprot ID: Q14573
  ENST ID: ENST00000374316
  CDS Start-End: 1061-9076
ggcaccctatcttaggcgttcaaataaaggactaggaagcaaacacccaagcaccggggaacagaacagaaagaaagacggaaggagccaagagttttggagccaactcctggagagggagcggctgaactgattcggaagttggatctctttgtacacaggaatgcggagagaaaaaaaacaaaacccaccccattgcttcatttcccctccaagcctgagcactttctattgtgcaatgaaaaggcttttcacgttgagaaaaatgaatcccgaatttgctctgcaaagggatgagcgcgcctctgggcgccagcctgctctcagctgggcgcggagaccgcgcggtggccgcagggcggccgcggccagggcgctccagggcgcgccctccgcgagcggctccggggtgacgcccgccggagagctggactcccccttccgcgggcgcctgcactggctcttagccagccgagggcccgggtgcagatagtccgggaaccccgagggcggagagctccccactacgcctgggcctcccagggatggcagctccgagagccccctagacccggtgccttgcaggacgcctctggagatcaggagggctggcggcgcattcggcgtccgggaggccgggccccggacgcgcgaggagcgcggggcgcgggaaggcaggcgggtgcacatgggtgccggcgggcgagctgcggggggagggggggcggggtgtggcctccccgcctcccgggcgggatttgcatgtgtgtggtggccccagacttcctgctccttctacgctgcaggtacgcgcgggccgggcggggcgggcgggcggcgggcgcgccaagacgtgggcacctcctcacccggaccccgggccccgccgagccgcctcctggctcccgtggccgccagcccgccccggccgcaccgagcgtcgggatccgaggtgggagcgtacccctccccgctccccggacgcctcagtcctccgcactgagcttggccacgcgcccctaggcgccccccacgccctgggccccggagggccgcagccatgagtgaaatgtccagctttcttcacatcggggacatcgtctccctgtacgccgagggctccgtcaatggcttcatcagcactttggggctggtggatgaccgctgtgtggtggagcccgcggccggggacctggacaacccccctaagaagttccgtgactgcctcttcaaggtgtgccccatgaaccgctactcggcccagaagcagtactggaaggccaagcagactaagcaggacaaggagaagatcgctgatgtggtgttgctgcagaagctgcagcatgcggcgcagatggagcagaagcaaaatgacacggagaacaagaaggtgcatggggatgtcgtgaagtatggcagtgtgatccagctcctgcacatgaagagcaacaagtacctgacagtgaacaagcggcttccggccttgctggagaagaacgccatgcgggtgactctggatgccacaggcaacgagggttcctggctcttcatccagcccttctggaagctgcggagcaacggggacaacgtggtcgtgggggacaaggtgatcctgaatcctgtcaatgccgggcagcctctgcatgccagcaattacgagctcagcgacaacgccggctgcaaggaggtcaattctgtgaactgcaacaccagctggaagatcaacctgtttatgcagtttcgggaccacctggaggaggtgttgaaagggggagacgtggtgcggctgttccatgcggagcaggagaagttcctgacgtgtgacgagtacaagggcaagctgcaggtgttcctgcgaactacactgcgccagtctgccacctcggccaccagctccaatgctctctgggaggtggaggtggtccaccacgacccctgccgtggaggagctgggcactggaatggcttgtaccgcttcaagcacctggctacaggcaactacctggctgctgaggagaaccccagttacaaaggtgatgcctcagatcccaaggcagcaggaatgggggcacagggccgcacaggccgcaggaatgctggggagaagatcaagtactgcctggtggctgtgcctcatggcaatgacatcgcctctctctttgagctggaccccaccaccttgcagaaaaccgactctttcgtgccccggaactcgtacgtccggctgcggcacctctgcaccaacacgtggattcagagcaccaatgtgcccattgacatcgaggaggagcggcccatccggctcatgctgggcacctgccccaccaaggaggacaaggaggcctttgccatcgtgtcagtgcccgtgtctgagatccgagacctggactttgccaatgacgccagctccatgctggccagtgccgtggagaaactcaacgagggcttcatcagccagaatgaccgcaggtttgtcatccagctgctggaagacctggtgttctttgtcagcgatgtccccaacaatgggcagaatgtcctggacatcatggtcactaagcccaaccgggaacggcagaagctgatgagggagcagaacatcctcaaacaggtctttggcattctgaaggccccgttccgtgagaaggggggtgaaggtcccctggtgcggctggaggagctgtcagaccagaagaacgccccctaccagcacatgttccgcctgtgctaccgcgtgttgcggcattcccaggaggactaccgcaagaaccaggagcacattgccaagcagtttgggatgatgcagtcccagattggctacgacatcctggccgaggacaccatcactgccctgctgcacaacaaccgcaagctcctggaaaagcacatcaccaagaccgaggtggagaccttcgtcagccttgtgcgcaagaaccgggagcccaggttcctggactacctctctgacctgtgtgtgtccaaccacatcgccatccccgtcacccaagagctcatctgcaagtgtgtgctggaccccaagaacagtgacattctcatccggaccgagcttcggcccgtgaaggagatggcccaatcccacgagtacctgagcatcgagtactcagaagaggaagtgtggctcacgtggactgacaagaataacgagcatcatgagaagagtgtgaggcagctggcccaggaggcgcgggccggcaacgcccacgacgagaatgtgctcagctactacaggtaccagctgaagctctttgcccgcatgtgcttggaccgccagtacttggccatcgacgagatctcccagcagctgggcgtggacctgattttcctgtgcatggcagacgagatgctgccctttgacctgcgcgcctccttctgccacctgatgctgcacgtgcacgtggaccgtgacccccaggagctggtcacgccggtcaagtttgcccgtctctggactgagatccccacagccatcaccatcaaggactatgattccaacctcaacgcgtcccgagatgacaagaagaacaagtttgccaacaccatggagttcgtggaggactacctcaacaatgtagtcagcgaggccgtgccctttgccaacgaggagaagaacaagctcacttttgaggtggtcagcctggcgcacaatctcatctacttcggcttctacagcttcagcgagctgctgcggctcactcgcacactgctgggcatcatcgactgtgtgcaggggcccccggccatgctgcaggcctatgaggaccccggtggcaagaatgtgcggcggtccatccagggcgtggggcacatgatgtccaccatggtgctgagccgcaagcagtccgtcttcagtgcccccagcctgtctgctggggccagtgctgctgagccgctggacagaagcaagtttgaggagaatgaggacattgtggtgatggagaccaagctgaagatcctggaaatccttcagttcatcctcaatgtccgcctggattaccgcatatcctacctgctgtctgtcttcaagaaggagtttgtggaggtgtttcccatgcaggacagtggggctgatggcacagcccctgccttcgactctaccactgccaacatgaacctggatcgcatcggggagcaggcggaggccatgtttggagtggggaagacaagcagcatgctggaggtggatgacgagggcggccgcatgttcctgcgcgtgctcatccacctcaccatgcacgactatgcgccgctggtctcgggtgccctgcagctgctcttcaagcacttcagccagcgccaggaggccatgcacaccttcaagcaggttcagctgctgatctcagcgcaggacgtggagaactacaaggtgatcaagtcggagctggaccggctgcggaccatggtggagaagtcagagctgtgggtggacaagaagggcagtggcaagggtgaggaggtggaggcaggcgccgccaaggacaagaaagagcgtcccacggacgaggagggctttctgcacccaccaggggagaaaagcagtgagaactaccagatcgtcaagggcatcctggaaaggctgaacaagatgtgcggggttggggagcaaatgaggaagaagcagcaacggctgctgaagaacatggatgcccacaaggtcatgctggacctgctgcagatcccctatgacaagggtgatgccaagatgatggagatcctgcgctacacgcaccagttcctgcagaagttctgtgcagggaaccccggcaaccaggccctgctgcacaaacacctgcacctcttcctcacgccagggctcctggaggcagagaccatgcagcacatcttcctgaacaactatcagctctgctccgagatcagcgagcctgtgttgcagcacttcgtgcacctgctggccacgcacgggcgccatgtgcagtacctggacttcctgcacaccgtcattaaggccgagggcaagtacgtcaagaagtgccaggacatgatcatgactgagctgaccaatgcaggtgacgatgtggtcgtgttctacaatgataaggcatcgctggcccacctgctggacatgatgaaggccgcccgcgacggcgtggaggaccacagccccctcatgtaccacatttccctggtggacctgctggccgcctgtgccgagggcaaaaacgtctacactgagatcaagtgcacctccctgctgccgctggaggacgtggtgtctgtggtgacgcatgaggactgcatcactgaggtgaaaatggcctatgtgaacttcgtgaaccactgctacgtggacacggaggtggagatgaaggagatctacaccagcaaccacatctggacgctctttgagaacttcaccctggacatggcccgggtctgcagcaagcgtgagaagcgcgtggctgaccccaccttggagaagtacgtgctgagcgttgtgctggacaccatcaacgccttcttcagctccccattctctgagaacagcacttccctgcagacacaccagacgattgtggtgcagctgctgcagtctaccacacgcctcctcgagtgtccgtggctacagcagcagcacaagggctccgtggaggcctgcatccggaccctcgccatggtggccaagggccgggccatcttgctgcccatggacctggatgcccacatcagctcgatgctcagcagtggagccagctgtgcagctgccgcccagcggaacgcctccagctacaaggcaaccacgcgggccttcccccgcgtcacccccaccgccaaccagtgggactacaagaacatcattgagaagctgcaggacatcatcacagccctggaggagcggctgaagcccctggtacaggctgagctgtccgtgctggtggatgtcctgcactggcctgagctgctcttcctggagggcagtgaggcctaccagcgctgcgagagtgggggcttcctgtccaagctgatccagcacaccaaggacctcatggagtcggaggagaagctgtgcatcaaggtgctgcggaccctgcagcagatgctgctcaagaagaccaagtacggggaccggggcaaccagctgcgcaagatgctgctgcaaaactacctccagaaccggaagtccacctcgcggggggaccttcccgaccccataggcactggcctggacccagactggtcggcaatcgcagccacccagtgccggctggacaaggagggggccaccaagttggtatgcgacctcatcaccagcaccaagaacgagaagatcttccaggagagcatcggcctggccatccacctgctggatggtggcaacacagagatccagaaatccttccacaacctgatgatgagtgacaagaagtcagagcgcttcttcaaggtgctgcacgaccgcatgaagcgggcccagcaggagaccaagtccacggtggcagtcaacatgaatgacctgggcagccagccacatgaggaccgcgagccagtcgaccccaccaccaaaggccgcgtggcctccttctcgatacctggctcctcatcccgctactcgctgggccccagcctgcgccgggggcacgaggtgagcgaacgtgtgcagagcagtgagatgggcacatccgtgctcatcatgcagcccatcctgcgctttctgcagctgctgtgtgagaaccacaaccgggacctgcagaacttcctgcgctgtcagaacaacaaaaccaactacaacttggtatgcgagacgctgcagttcctggacatcatgtgcggcagcaccacgggcggcctggggctgctggggctctacatcaatgaggacaacgtgggcctcgtcatccagaccttggagaccctcactgagtactgccagggcccctgccatgagaaccagacttgcattgtgactcacgagtccaatggcatagacatcatcaccgcactgatcctcaatgacatcagccccctgtgcaagtaccgcatggatctggtgctgcagctcaaggacaatgcctccaagctgctcctggctctgatggagagccggcatgacagtgaaaatgctgagcgaatcctcatcagcctgcggccccaggagctggtggacgtcatcaagaaggcctacctgcaggaggaagagcgtgagaactcggaggtgagcccacgtgaagtgggccataacatctatatcctggcgctgcagctctccaggcacaataaacagctgcagcacctgctgaagccggtgaagcgcattcaagaggaggaggccgagggtatctcttccatgctcagcctcaacaacaagcagctgtcacagatgctcaagtcctcagcgccagcacaggaggaggaggaagaccccctggcctactatgagaaccacacgtcccagatcgagattgtgcggcaggaccgcagcatggagcagatcgtgttcccagtgcccggcatctgccagttcctgacggaggaaaccaagcaccggctcttcaccactactgagcaggacgagcagggcagcaaagtgagcgacttcttcgaccagtcctccttcctgcacaacgagatggagtggcagcgcaagctccgcagcatgccgctgatctactggttctcccgccgcatgaccctgtggggcagcatctccttcaacctggccgtgtttatcaacatcatcattgccttcttctacccttacatggagggcgcgtccacaggcgtgctggactcccctctcatctcattgctcttctggatcctcatctgcttctccatcgcggccctgttcaccaagcgctacagcatccgccccctcatcgtggcgctcatcctgcgctccatctactatctgggcatcgggcccacactcaacatcctgggtgccctcaatctgaccaacaagatcgtgtttgtggtgagcttcgtgggcaaccgtggcaccttcatccggggctataaggccatggtcatggacatggaattcctctaccacgtgggctacatcctgaccagtgtcctgggcctctttgctcatgagctgttctacagcatcctgctctttgacctcatctaccgcgaggagacgctgttcaacgtcatcaagagtgtgacccgcaatggccgctccatcctgctgacagccctgctggccctcatcctggtctacctcttctccatcgtcggcttcctcttcctcaaggatgacttcattctcgaggtcgaccggctgcccaacaaccactccacagccagccccctggggatgccacatggagctgctgcatttgtggacacctgcagtggggacaagatggactgtgtctcagggctctcggtgcctgaggtcctggaagaggacagggagctggacagcacagagcgggcctgtgacactctgttgatgtgcatcgtcactgtcatgaaccatgggctacgcaacggtggtggcgtgggcgacattctccgcaagccctccaaagatgagtctctcttcccagcccgagtggtctatgacctcctgttcttcttcatcgtcatcatcattgtgctgaacctcatctttggggtaatcatcgacaccttcgctgacctgcgtagtgagaagcagaagaaggaggagattcttaagacgacatgcttcatctgtggtctggagagggacaagtttgataacaagacagtgtcatttgaggaacacatcaagctggagcacaacatgtggaactacttgtacttcattgtgctggtccgcgtgaagaacaagaccgactacacgggccctgagagctacgtggcccagatgatcaagaacaagaacctggactggttcccccggatgcgggccatgtcccttgtcagcaatgagggcgagggggagcagaatgagattcggattctccaggacaagctcaactccaccatgaagctggtgtcccacctcactgcccagctcaacgagctcaaggagcagatgacggagcagcggaaacgcaggcaacgcctaggctttgtggatgtccagaactgcattagccgctgaggagagccaccgaaggccccaacaggggatgctcatcactggagactgcgactgggaagaacactgccccctccctcgggttgggtggcccagccagctggccagcctccactcccactctgccagacaccctgacacccacccaggctttgaagagcatggagggggagcctcagagctgacagtcctgcttagagcccttaaaaagacttgaaagttcactgggactcagtttaccttaatgccttagcagaagataaatcctacctagagacctttgttccttaaagcaataactgacaactctttgtagtcctccttgtgggtagttaagagtggggtcacccctttaactccaagcactacattttggcggctgccggcctctgggggaggtggcagttatgctgttactagtgattttagggctttgttatttaacttatttcaagggtgctgtgctcagccctgcccatggctgtgcagctccctccgtgcctcagatctgctgtagccagtgcagacctcactgtcgtgtccatgccacccccggcatggctccaggtggcctggtgactccatgatggacgatcttgctcccaggacctgcctcttcccaggcttcctggggaagagttgtacgcccaggcaacaagggctgagctgcgcttgcgtggctgtttcatgaccgcttgtttttctccttttggtgtaatgttttacaaatcctttggcctgagaactaatatgttaattgccttaaataaattaatagaaatctagtccgttaaaaa

SEQ ID NO: 142794 - DNA, 9029 bp, Homo sapiens
  Payload ID: 8216
  Gene Symbol: ITPR3
  Gene Name: inositol 1,4,5-trisphosphate receptor, type 3
  Uniprot ID: Q14573
  ENST ID: ENST00000605930
  CDS Start-End: 225-8240
ggcgggcgcgccaagacgtgggcacctcctcacccggaccccgggccccgccgagccgcctcctggctcccgtggccgccagcccgccccggccgcaccgagcgtcgggatccgaggtgggagcgtacccctccccgctccccggacgcctcagtcctccgcactgagcttggccacgcgcccctaggcgccccccacgccctgggccccggagggccgcagccatgagtgaaatgtccagctttcttcacatcggggacatcgtctccctgtacgccgagggctccgtcaatggcttcatcagcactttggggctggtggatgaccgctgtgtggtggagcccgcggccggggacctggacaacccccctaagaagttccgtgactgcctcttcaaggtgtgccccatgaaccgctactcggcccagaagcagtactggaaggccaagcagactaagcaggacaaggagaagatcgctgatgtggtgttgctgcagaagctgcagcatgcggcgcagatggagcagaagcaaaatgacacggagaacaagaaggtgcatggggatgtcgtgaagtatggcagtgtgatccagctcctgcacatgaagagcaacaagtacctgacagtgaacaagcggcttccggccttgctggagaagaacgccatgcgggtgactctggatgccacaggcaacgagggttcctggctcttcatccagcccttctggaagctgcggagcaacggggacaacgtggtcgtgggggacaaggtgatcctgaatcctgtcaatgccgggcagcctctgcatgccagcaattacgagctcagcgacaacgccggctgcaaggaggtcaattctgtgaactgcaacaccagctggaagatcaacctgtttatgcagtttcgggaccacctggaggaggtgttgaaagggggagacgtggtgcggctgttccatgcggagcaggagaagttcctgacgtgtgacgagtacaagggcaagctgcaggtgttcctgcgaactacactgcgccagtctgccacctcggccaccagctccaatgctctctgggaggtggaggtggtccaccacgacccctgccgtggaggagctgggcactggaatggcttgtaccgcttcaagcacctggctacaggcaactacctggctgctgaggagaaccccagttacaaaggtgatgcctcagatcccaaggcagcaggaatgggggcacagggccgcacaggccgcaggaatgctggggagaagatcaagtactgcctggtggctgtgcctcatggcaatgacatcgcctctctctttgagctggaccccaccaccttgcagaaaaccgactctttcgtgccccggaactcgtacgtccggctgcggcacctctgcaccaacacgtggattcagagcaccaatgtgcccattgacatcgaggaggagcggcccatccggctcatgctgggcacctgccccaccaaggaggacaaggaggcctttgccatcgtgtcagtgcccgtgtctgagatccgagacctggactttgccaatgacgccagctccatgctggccagtgccgtggagaaactcaacgagggcttcatcagccagaatgaccgcaggtttgtcatccagctgctggaagacctggtgttctttgtcagcgatgtccccaacaatgggcagaatgtcctggacatcatggtcactaagcccaaccgggaacggcagaagctgatgagggagcagaacatcctcaaacaggtctttggcattctgaaggccccgttccgtgagaaggggggtgaaggtcccctggtgcggctggaggagctgtcagaccagaagaacgccccctaccagcacatgttccgcctgtgctaccgcgtgttgcggcattcccaggaggactaccgcaagaaccaggagcacattgccaagcagtttgggatgatgcagtcccagattggctacgacatcctggccgaggacaccatcactgccctgctgcacaacaaccgcaagctcctggaaaagcacatcaccaagaccgaggtggagaccttcgtcagccttgtgcgcaagaaccgggagcccaggttcctggactacctctctgacctgtgtgtgtccaaccacatcgccatccccgtcacccaagagctcatctgcaagtgtgtgctggaccccaagaacagtgacattctcatccggaccgagcttcggcccgtgaaggagatggcccaatcccacgagtacctgagcatcgagtactcagaagaggaagtgtggctcacgtggactgacaagaataacgagcatcatgagaagagtgtgaggcagctggcccaggaggcgcgggccggcaacgcccacgacgagaatgtgctcagctactacaggtaccagctgaagctctttgcccgcatgtgcttggaccgccagtacttggccatcgacgagatctcccagcagctgggcgtggacctgattttcctgtgcatggcagacgagatgctgccctttgacctgcgcgcctccttctgccacctgatgctgcacgtgcacgtggaccgtgacccccaggagctggtcacgccggtcaagtttgcccgtctctggactgagatccccacagccatcaccatcaaggactatgattccaacctcaacgcgtcccgagatgacaagaagaacaagtttgccaacaccatggagttcgtggaggactacctcaacaatgtagtcagcgaggccgtgccctttgccaacgaggagaagaacaagctcacttttgaggtggtcagcctggcgcacaatctcatctacttcggcttctacagcttcagcgagctgctgcggctcactcgcacactgctgggcatcatcgactgtgtgcaggggcccccggccatgctgcaggcctatgaggaccccggtggcaagaatgtgcggcggtccatccagggcgtggggcacatgatgtccaccatggtgctgagccgcaagcagtccgtcttcagtgcccccagcctgtctgctggggccagtgctgctgagccgctggacagaagcaagtttgaggagaatgaggacattgtggtgatggagaccaagctgaagatcctggaaatccttcagttcatcctcaatgtccgcctggattaccgcatatcctacctgctgtctgtcttcaagaaggagtttgtggaggtgtttcccatgcaggacagtggggctgatggcacagcccctgccttcgactctaccactgccaacatgaacctggatcgcatcggggagcaggcggaggccatgtttggagtggggaagacaagcagcatgctggaggtggatgacgagggcggccgcatgttcctgcgcgtgctcatccacctcaccatgcacgactatgcgccgctggtctcgggtgccctgcagctgctcttcaagcacttcagccagcgccaggaggccatgcacaccttcaagcaggttcagctgctgatctcagcgcaggacgtggagaactacaaggtgatcaagtcggagctggaccggctgcggaccatggtggagaagtcagagctgtgggtggacaagaagggcagtggcaagggtgaggaggtggaggcaggcgccgccaaggacaagaaagagcgtcccacggacgaggagggctttctgcacccaccaggggagaaaagcagtgagaactaccagatcgtcaagggcatcctggaaaggctgaacaagatgtgcggggttggggagcaaatgaggaagaagcagcaacggctgctgaagaacatggatgcccacaaggtcatgctggacctgctgcagatcccctatgacaagggtgatgccaagatgatggagatcctgcgctacacgcaccagttcctgcagaagttctgtgcagggaaccccggcaaccaggccctgctgcacaaacacctgcacctcttcctcacgccagggctcctggaggcagagaccatgcagcacatcttcctgaacaactatcagctctgctccgagatcagcgagcctgtgttgcagcacttcgtgcacctgctggccacgcacgggcgccatgtgcagtacctggacttcctgcacaccgtcattaaggccgagggcaagtacgtcaagaagtgccaggacatgatcatgactgagctgaccaatgcaggtgacgatgtggtcgtgttctacaatgataaggcatcgctggcccacctgctggacatgatgaaggccgcccgcgacggcgtggaggaccacagccccctcatgtaccacatttccctggtggacctgctggccgcctgtgccgagggcaaaaacgtctacactgagatcaagtgcacctccctgctgccgctggaggacgtggtgtctgtggtgacgcatgaggactgcatcactgaggtgaaaatggcctatgtgaacttcgtgaaccactgctacgtggacacggaggtggagatgaaggagatctacaccagcaaccacatctggacgctctttgagaacttcaccctggacatggcccgggtctgcagcaagcgtgagaagcgcgtggctgaccccaccttggagaagtacgtgctgagcgttgtgctggacaccatcaacgccttcttcagctccccattctctgagaacagcacttccctgcagacacaccagacgattgtggtgcagctgctgcagtctaccacacgcctcctcgagtgtccgtggctacagcagcagcacaagggctccgtggaggcctgcatccggaccctcgccatggtggccaagggccgggccatcttgctgcccatggacctggatgcccacatcagctcgatgctcagcagtggagccagctgtgcagctgccgcccagcggaacgcctccagctacaaggcaaccacgcgggccttcccccgcgtcacccccaccgccaaccagtgggactacaagaacatcattgagaagctgcaggacatcatcacagccctggaggagcggctgaagcccctggtacaggctgagctgtccgtgctggtggatgtcctgcactggcctgagctgctcttcctggagggcagtgaggcctaccagcgctgcgagagtgggggcttcctgtccaagctgatccagcacaccaaggacctcatggagtcggaggagaagctgtgcatcaaggtgctgcggaccctgcagcagatgctgctcaagaagaccaagtacggggaccggggcaaccagctgcgcaagatgctgctgcaaaactacctccagaaccggaagtccacctcgcggggggaccttcccgaccccataggcactggcctggacccagactggtcggcaatcgcagccacccagtgccggctggacaaggagggggccaccaagttggtatgcgacctcatcaccagcaccaagaacgagaagatcttccaggagagcatcggcctggccatccacctgctggatggtggcaacacagagatccagaaatccttccacaacctgatgatgagtgacaagaagtcagagcgcttcttcaaggtgctgcacgaccgcatgaagcgggcccagcaggagaccaagtccacggtggcagtcaacatgaatgacctgggcagccagccacatgaggaccgcgagccagtcgaccccaccaccaaaggccgcgtggcctccttctcgatacctggctcctcatcccgctactcgctgggccccagcctgcgccgggggcacgaggtgagcgaacgtgtgcagagcagtgagatgggcacatccgtgctcatcatgcagcccatcctgcgctttctgcagctgctgtgtgagaaccacaaccgggacctgcagaacttcctgcgctgtcagaacaacaaaaccaactacaacttggtatgcgagacgctgcagttcctggacatcatgtgcggcagcaccacgggcggcctggggctgctggggctctacatcaatgaggacaacgtgggcctcgtcatccagaccttggagaccctcactgagtactgccagggcccctgccatgagaaccagacttgcattgtgactcacgagtccaatggcatagacatcatcaccgcactgatcctcaatgacatcagccccctgtgcaagtaccgcatggatctggtgctgcagctcaaggacaatgcctccaagctgctcctggctctgatggagagccggcatgacagtgaaaatgctgagcgaatcctcatcagcctgcggccccaggagctggtggacgtcatcaagaaggcctacctgcaggaggaagagcgtgagaactcggaggtgagcccacgtgaagtgggccataacatctatatcctggcgctgcagctctccaggcacaataaacagctgcagcacctgctgaagccggtgaagcgcattcaagaggaggaggccgagggtatctcttccatgctcagcctcaacaacaagcagctgtcacagatgctcaagtcctcagcgccagcacaggaggaggaggaagaccccctggcctactatgagaaccacacgtcccagatcgagattgtgcggcaggaccgcagcatggagcagatcgtgttcccagtgcccggcatctgccagttcctgacggaggaaaccaagcaccggctcttcaccactactgagcaggacgagcagggcagcaaagtgagcgacttcttcgaccagtcctccttcctgcacaacgagatggagtggcagcgcaagctccgcagcatgccgctgatctactggttctcccgccgcatgaccctgtggggcagcatctccttcaacctggccgtgtttatcaacatcatcattgccttcttctacccttacatggagggcgcgtccacaggcgtgctggactcccctctcatctcattgctcttctggatcctcatctgcttctccatcgcggccctgttcaccaagcgctacagcatccgccccctcatcgtggcgctcatcctgcgctccatctactatctgggcatcgggcccacactcaacatcctgggtgccctcaatctgaccaacaagatcgtgtttgtggtgagcttcgtgggcaaccgtggcaccttcatccggggctataaggccatggtcatggacatggaattcctctaccacgtgggctacatcctgaccagtgtcctgggcctctttgctcatgagctgttctacagcatcctgctctttgacctcatctaccgcgaggagacgctgttcaacgtcatcaagagtgtgacccgcaatggccgctccatcctgctgacagccctgctggccctcatcctggtctacctcttctccatcgtcggcttcctcttcctcaaggatgacttcattctcgaggtcgaccggctgcccaacaaccactccacagccagccccctggggatgccacatggagctgctgcatttgtggacacctgcagtggggacaagatggactgtgtctcagggctctcggtgcctgaggtcctggaagaggacagggagctggacagcacagagcgggcctgtgacactctgttgatgtgcatcgtcactgtcatgaaccatgggctacgcaacggtggtggcgtgggcgacattctccgcaagccctccaaagatgagtctctcttcccagcccgagtggtctatgacctcctgttcttcttcatcgtcatcatcattgtgctgaacctcatctttggggtaatcatcgacaccttcgctgacctgcgtagtgagaagcagaagaaggaggagattcttaagacgacatgcttcatctgtggtctggagagggacaagtttgataacaagacagtgtcatttgaggaacacatcaagctggagcacaacatgtggaactacttgtacttcattgtgctggtccgcgtgaagaacaagaccgactacacgggccctgagagctacgtggcccagatgatcaagaacaagaacctggactggttcccccggatgcgggccatgtcccttgtcagcaatgagggcgagggggagcagaatgagattcggattctccaggacaagctcaactccaccatgaagctggtgtcccacctcactgcccagctcaacgagctcaaggagcagatgacggagcagcggaaacgcaggcaacgcctaggctttgtggatgtccagaactgcattagccgctgaggagagccaccgaaggccccaacaggggatgctcatcactggagactgcgactgggaagaacactgccccctccctcgggttgggtggcccagccagctggccagcctccactcccactctgccagacaccctgacacccacccaggctttgaagagcatggagggggagcctcagagctgacagtcctgcttagagcccttaaaaagacttgaaagttcactgggactcagtttaccttaatgccttagcagaagataaatcctacctagagacctttgttccttaaagcaataactgacaactctttgtagtcctccttgtgggtagttaagagtggggtcacccctttaactccaagcactacattttggcggctgccggcctctgggggaggtggcagttatgctgttactagtgattttagggctttgttatttaacttatttcaagggtgctgtgctcagccctgcccatggctgtgcagctccctccgtgcctcagatctgctgtagccagtgcagacctcactgtcgtgtccatgccacccccggcatggctccaggtggcctggtgactccatgatggacgatcttgctcccaggacctgcctcttcccaggcttcctggggaagagttgtacgcccaggcaacaagggctgagctgcgcttgcgtggctgtttcatgaccgcttgtttttctccttttggtgtaatgttttacaaatcctttggcctgagaactaatatgttaattgccttaaataaattaatagaaatctagtccgtt

SEQ ID NO: 142795 - DNA, 4456 bp, Homo sapiens
  Payload ID: 8217
  Gene Symbol: IP6K1
  Gene Name: inositol hexakisphosphate kinase 1
  Uniprot ID: Q92551
  ENST ID: ENST00000321599
  CDS Start-End: 303-1628
gttgatccgtacccagtgggcagcgccgggagctggaccaagcggccggtgagaggccgctgtagcggtgctcagccacctgtgctgcctgccagggggcgggccgaaacctggaggcccggggggcccagctcccgtagggagccgtgggcgctcggtgcccgggccgggcaggacagaataataagctgaatagaatctgaccattggctttcacctggccaggaccttctatgtagctctccttttgtggcccatgtgctgcatcctctgccctcagtgtgcaactggcccccaacgcaatgtgtgtttgtcaaaccatggaagtggggcagtatggcaagaatgcaagtcgggctggagaccggggagtcctcctggagcccttcatccaccaagtaggcggacacagcagcatgatgcgttacgacgatcacactgtgtgcaagcccctcatctcccgggaacagcgcttttacgagtccctccctcccgaaatgaaggagttcacccctgaatacaaaggcgtggtatctgtctgttttgagggggacagtgatggttacatcaacttagtggcctatccttatgtggaaagtgagactgtggaacaggatgacacaacagaacgggagcaacctcggcgcaaacactcccgccggagcctgcaccggtcaggcagtggcagtgaccacaaggaggagaaagccagcctgtcccttgagacctctgagagctcacaggaggcaaagagtccgaaggtggagctgcacagccactcagaggtccctttccagatgctagatggcaacagtggcttgagttctgagaagatcagccacaacccctggagcctgcgttgtcacaagcagcagctgagccgcatgcgctccgagtccaaggaccgaaagctctacaagttcctcctgcttgagaacgtggtgcaccacttcaagtacccctgcgtgttggacctgaagatgggcacgcggcagcatggcgatgacgcgtcagctgagaaggcagcccggcagatgcggaaatgcgagcagagcacatcagccacgctgggcgtcagggtctgcggcatgcaggtgtaccagctggacacagggcattacctctgcaggaacaagtactatggccgtgggctctccattgaaggcttccgcaatgccctctatcaatatctgcacaatggcctggacctgcgacgtgacctgtttgagcctatcctgagcaaactgcggggcctgaaagctgtgctggagcggcaggcctcttaccgcttctactccagttccctgcttgtcatctatgatggcaaggagtgccgggctgagtcctgcctggaccgccggtctgagatgcgtctcaagcacctggacatggtgctccctgaggtggcgtcatcctgtggccccagcaccagccccagcaacaccagccccgaggcgggtccctcctctcagcccaaggtggatgtccgcatgattgactttgcacacagcacattcaagggcttccgggatgaccccaccgtgcatgatgggccagacagaggctacgtgtttggcctggagaacctcatcagcatcatggaacagatgcgggacgagaaccagtaggccctgttctgggcccccagaaccccttcctctccactgcaggcagggaccattgttctgaacttgccgtgaggacacacagacttgcttttaaagggttatatttctctttggtgtaaactaaaagaaatgtttttagctgtagcctggaatccatatatataaagtgaaggagggcagaccacacgccctctcagccaggctcctcagctttgtggctctgactggtgtgtccaggctgccttaggaaggaagaggtgcccctggtgggcttggcagcagggacagggtgcccttggacattggtttctcttgtctagatctttgagatctgtggctgcagggccctgctgattgtaaggtaaagccctgggctggtgcagggcccctccacgcccactcttcccttgttccccagaagtagagggctctgggtgcccatttcttgggggctttccagtcttatgctgtgggtgtcagctagctctttaataggtgccctcagggcaccacagggctgactgcacaaagctggacccatccttcggtctgaccttagcatggggctagattaatgaagctgggctgaggccaacttatggcagagggcggcgcctgggttccccaggcacctgttggcacgtgacaggttggcacctgtcctattcctgaaacagcctctctcaccaagttcccttgcctaagaaggccactccctcccaccccactgaagtgggggatagtcggtgtcctagcaggcctcagggcctctggtggctctggcccagacagtatttgcagttcttgtgctatgggtgggagtcttcttcctcaagtttcggcagctgtgctgctgctggatgggctgctcctcccagggctcaagggctgtggtccgctcagggtctcatttccccaggccaagttcaaggcagcagccctttgtgaggcgctcttggccctgggcctggagggagaactttaagcttttttgctcacagggacgtggtatgggccctgggtgcaggtgcccacattctgctaatgagagctttgtctgatcagtcctgggtccatcagtttgtccatgtgtccggctgccagcccgtcccttgggatccttcccctggggtgtagccttgttcattagtatatactcattccttcatgctttcctcagcagaacacttccacttctgaggtgagcttttgccccatgcccttcctccacaggtgttgcctttttataaagacctgatagcagaataaattggtgtttccctgttgacccagcaccatttctgtgggcctagaatatggccctcaacccttagagtggggcagtgagggcttgaggagtgacccttcctttctcatggttttagtcattttggctgccagcccttaatggcacagatctgctgcttctaacagatggccaggaggtgacaccgatttcagccattgccaaggttagcaccctctcctttgagcctagggccacactgttcattgtcactttaggcaagtgcctgtttggctttaaaggtaagcctgccagctgtgagaagccttggtaactgatggactcatttcctggtccttaaagatgcagcctcttaagggctccttgatggatgccatctctcctagcccccagccctggtgccactggtgggcaggttcccattctttggggctgggagggacagcttgcctgtttctggtcacaaattacagtcttctctcctgtaccattctgtggcttcagccatgggggcagtagcccttcattagtgtagatagtcattccctggtagggtggagggtaagacatagggtctggaactgtttgggaccttttggggatgtcctgtgcctcccagattcctcgattctgggaggagaggctgccgcattctgctgctcctcacagcgagcaaagctgcacccacttacattcagtattttcctggcactacaaagagtgggaaggcctgggatttgctgctgctcccttagagcagggcccctcttttcagcactttggacacctggagacccagccctgttatttaatggtagtgggcaagtgtgtgtgcatactgtctgccactgctttctccctgccccatgccagagagccctgtccctgccaggcccagccttcttagccccaacttgggaacaaagtgcaacatgggatcatgggttggggtgctcaggtgagccctctctatagtgcttccctgggccaagctgacaccagcccctgagggtggggtgggacgggtggtgcttaaaagaggaaggggaccagtgtagcaacttgccagggaccccacccctccctctctgggcctgtgcagtgagcatggggattcccatcaaggggcctggcacctgtgctagttacgtagccgctgctcacgcgctcactcctgaccacatgcacgttccctagatgcagactgctttgaactttaaagctgtacaatttggttatgtttgtgctgacttaaaatatattttaatgaggaaaaaataatggagaaccctgggaaggacctggttcttttgcttctcggggaactgtaagccctcgcgttctgggaatcgctctctgctgctctttcctggaagctaagcctgtctccaccgcccgaggcctgcgccggtggctcccgccgcagttgcgtttgctttggaccttgcgtgcgggggagggggtgctcggtccgagcccgctcctttctgtacacctagcgctgcccgccccgcttgtgtctgaggtcgtgtatgtcaaaaataaagccgctagaaacgga

SEQ ID NO: 142796 - DNA, 4117 bp, Homo sapiens
  Payload ID: 8217
  Gene Symbol: IP6K1
  Gene Name: inositol hexakisphosphate kinase 1
  Uniprot ID: Q92551
  ENST ID: ENST00000395238
  CDS Start-End: 460-1290
ccgccatcttgttgttgatccgtacccagtgggcagcgccgggagctggaccaagcggccggtgagaggccgctgtagcggtgctcagccacctgtgctgcctgccagggggcgggccgaaacctggaggcccggggggcccagctcccgtagggagccgtgggcgctcggtgcccgggccgggcaggcgtggtatctgtctgttttgagggggacagtgatggttacatcaacttagtggcctatccttatgtggaaagtgagactgtggaacaggatgacacaacagaacgggagcaacctcggcgcaaacactcccgccggagcctgcaccggtcaggcagtggcagtgaccacaaggaggagaaagccagcctgtcccttgagacctctgagagctcacaggaggcaaagagtccgaaggtggagctgcacagccactcagaggtccctttccagatgctagatggcaacagtggcttgagttctgagaagatcagccacaacccctggagcctgcgttgtcacaagcagcagctgagccgcatgcgctccgagtccaaggaccgaaagctctacaagttcctcctgcttgagaacgtggtgcaccacttcaagtacccctgcgtgttggacctgaagatgggcacgcggcagcatggcgatgacgcgtcagctgagaaggcagcccggcagatgcggaaatgcgagcagagcacatcagccacgctgggcgtcagggtctgcggcatgcaggtgtaccagctggacacagggcattacctctgcaggaacaagtactatggccgtgggctctccattgaaggcttccgcaatgccctctatcaatatctgcacaatggcctggacctgcgacgtgacctgtttgagcctatcctgagcaaactgcggggcctgaaagctgtgctggagcggcaggcctcttaccgcttctactccagttccctgcttgtcatctatgatggcaaggagtgccgggctgagtcctgcctggaccgccggtctgagatgcgtctcaagcacctggacatggtgctccctgaggtggcgtcatcctgtggccccagcaccagccccagcaacaccagccccgaggcgggtccctcctctcagcccaaggtggatgtccgcatgattgactttgcacacagcacattcaagggcttccgggatgaccccaccgtgcatgatgggccagacagaggctacgtgtttggcctggagaacctcatcagcatcatggaacagatgcgggacgagaaccagtaggccctgttctgggcccccagaaccccttcctctccactgcaggcagggaccattgttctgaacttgccgtgaggacacacagacttgcttttaaagggttatatttctctttggtgtaaactaaaagaaatgtttttagctgtagcctggaatccatatatataaagtgaaggagggcagaccacacgccctctcagccaggctcctcagctttgtggctctgactggtgtgtccaggctgccttaggaaggaagaggtgcccctggtgggcttggcagcagggacagggtgcccttggacattggtttctcttgtctagatctttgagatctgtggctgcagggccctgctgattgtaaggtaaagccctgggctggtgcagggcccctccacgcccactcttcccttgttccccagaagtagagggctctgggtgcccatttcttgggggctttccagtcttatgctgtgggtgtcagctagctctttaataggtgccctcagggcaccacagggctgactgcacaaagctggacccatccttcggtctgaccttagcatggggctagattaatgaagctgggctgaggccaacttatggcagagggcggcgcctgggttccccaggcacctgttggcacgtgacaggttggcacctgtcctattcctgaaacagcctctctcaccaagttcccttgcctaagaaggccactccctcccaccccactgaagtgggggatagtcggtgtcctagcaggcctcagggcctctggtggctctggcccagacagtatttgcagttcttgtgctatgggtgggagtcttcttcctcaagtttcggcagctgtgctgctgctggatgggctgctcctcccagggctcaagggctgtggtccgctcagggtctcatttccccaggccaagttcaaggcagcagccctttgtgaggcgctcttggccctgggcctggagggagaactttaagcttttttgctcacagggacgtggtatgggccctgggtgcaggtgcccacattctgctaatgagagctttgtctgatcagtcctgggtccatcagtttgtccatgtgtccggctgccagcccgtcccttgggatccttcccctggggtgtagccttgttcattagtatatactcattccttcatgctttcctcagcagaacacttccacttctgaggtgagcttttgccccatgcccttcctccacaggtgttgcctttttataaagacctgatagcagaataaattggtgtttccctgttgacccagcaccatttctgtgggcctagaatatggccctcaacccttagagtggggcagtgagggcttgaggagtgacccttcctttctcatggttttagtcattttggctgccagcccttaatggcacagatctgctgcttctaacagatggccaggaggtgacaccgatttcagccattgccaaggttagcaccctctcctttgagcctagggccacactgttcattgtcactttaggcaagtgcctgtttggctttaaaggtaagcctgccagctgtgagaagccttggtaactgatggactcatttcctggtccttaaagatgcagcctcttaagggctccttgatggatgccatctctcctagcccccagccctggtgccactggtgggcaggttcccattctttggggctgggagggacagcttgcctgtttctggtcacaaattacagtcttctctcctgtaccattctgtggcttcagccatgggggcagtagcccttcattagtgtagatagtcattccctggtagggtggagggtaagacatagggtctggaactgtttgggaccttttggggatgtcctgtgcctcccagattcctcgattctgggaggagaggctgccgcattctgctgctcctcacagcgagcaaagctgcacccacttacattcagtattttcctggcactacaaagagtgggaaggcctgggatttgctgctgctcccttagagcagggcccctcttttcagcactttggacacctggagacccagccctgttatttaatggtagtgggcaagtgtgtgtgcatactgtctgccactgctttctccctgccccatgccagagagccctgtccctgccaggcccagccttcttagccccaacttgggaacaaagtgcaacatgggatcatgggttggggtgctcaggtgagccctctctatagtgcttccctgggccaagctgacaccagcccctgagggtggggtgggacgggtggtgcttaaaagaggaaggggaccagtgtagcaacttgccagggaccccacccctccctctctgggcctgtgcagtgagcatggggattcccatcaaggggcctggcacctgtgctagttacgtagccgctgctcacgcgctcactcctgaccacatgcacgttccctagatgcagactgctttgaactttaaagctgtacaatttggttatgtttgtgctgacttaaaatatattttaatgaggaaaaaataatggagaaccctgggaaggacctggttcttttgcttctcggggaactgtaagccctcgcgttctgggaatcgctctctgctgctctttcctggaagctaagcctgtctccaccgcccgaggcctgcgccggtggctcccgccgcagttgcgtttgctttggaccttgcgtgcgggggagggggtgctcggtccgagcccgctcctttctgtacacctagcgctgcccgccccgcttgtgtctgaggtcgtgtatgtcaaaaataaagccgctagaaacgg

SEQ ID NO: 142797 - DNA, 1815 bp, Homo sapiens
  Payload ID: 8217
  Gene Symbol: IP6K1
  Gene Name: inositol hexakisphosphate kinase 1
  ENST ID: ENST00000468463
  CDS Start-End: 316-1140
ccgccatcttgttgttgatccgtacccagtgggcagcgccgggagctggaccaagcggccggtgagaggccgctgtagcggtgctcagccacctgtgctgcctgccagggggcgggccgaaacctggaggcccggggggcccagctcccgtagggagccgtgggcgctcggtgcccgggccgggcaggacagaataataagctgaatagaatctgaccattggctttcacctggccaggaccttctatgtagctctccttttgtggcccatgtgctgcatcctctgccctcagtgtgcaactggcccccaacgcaatgtgtgtttgtcaaaccatggaagtggggcagtatggcaagaatgcaagtcgggctggagaccggggagtcctcctggagcccttcatccaccaagtaggcggacacagcagcatgatgcgttacgacgatcacactgtgtgcaagcccctcatctcccgggaacagcgcttttacgagtccctccctcccgaaatgaaggagttcacccctgaatacaaaggcgtggtatctgtctgttttgagggggacagtgatggttacatcaacttagtggcctatccttatgtggaaagtgagactgtggaacaggatgacacaacagaacgggagcaacctcggcgcaaacactcccgccggagcctgcaccggtcaggcagtggcagtgaccacaaggaggagaaagccagcctgtcccttgagacctctgagagctcacaggaggcaaagagtccgaaggtggagctgcacagccactcagaggtccctttccagatgctagatggcaacagtggcttgagttctgagaagatcagccacaacccctggagcctgcgttgtcacaagcagcagctgagccgcatgcgctccgagtccaaggaccgaaagctctacaagttcctcctgcttgagaacgtggtgcaccacttcaagtacccctgcgtgttggacctgaagatgggcacgcggcagcatggcgatgacgcgtcagctgagaaggcagcccggcagatgcggaaatgcgagcagagcacatcagccacgctgggcgtcagggtctgcggcatgcaggaacaagtactatggccgtgggctctccattgaaggcttccgcaatgccctctatcaatatctgcacaatggcctggacctgcgacgtgacctgtttgagcctatcctgagcaaactgcggggcctgaaagctgtgctggagcggcaggcctcttaccgcttctactccagttccctgcttgtcatctatgatggcaaggagtgccgggctgagtcctgcctggaccgccggtctgagatgcgtctcaagcacctggacatggtgctccctgaggtggcgtcatcctgtggccccagcaccagccccagcaacaccagccccgaggcgggtccctcctctcagcccaaggtggatgtccgcatgattgactttgcacacagcacattcaagggcttccgggatgaccccaccgtgcatgatgggccagacagaggctacgtgtttggcctggagaacctcatcagcatcatggaacagatgcgggacgagaaccagtaggccctgttctgggcccccagaaccccttcctctccactgcaggcagggaccattgttctgaacttgccgtgaggacacacagacttgcttttaaagggttatatttctctttggtgtaaactaaaagaaatgtttttagctgtagcctggaatccatatatataaagtgaaggagggcagaccacacgccctctcagccaggctcctca

SEQ ID NO: 142798 - DNA, 1260 bp, Homo sapiens
  Payload ID: 8217
  Gene Symbol: IP6K1
  Gene Name: inositol hexakisphosphate kinase 1
  Uniprot ID: Q92551
  ENST ID: ENST00000460540
  CDS Start-End: 336-1166
agccgccatcttgttgttgatccgtacccagtgggcagcgccgggagctggaccaagcggccggcgtggtatctgtctgttttgagggggacagtgatggttacatcaacttagtggcctatccttatgtggaaagtgagactgtggaacaggatgacacaacagaacgggagcaacctcggcgcaaacactcccgccggagcctgcaccggtcaggcagtggcagtgaccacaaggaggagaaagccagcctgtcccttgagacctctgagagctcacaggaggcaaagagtccgaaggtggagctgcacagccactcagaggtccctttccagatgctagatggcaacagtggcttgagttctgagaagatcagccacaacccctggagcctgcgttgtcacaagcagcagctgagccgcatgcgctccgagtccaaggaccgaaagctctacaagttcctcctgcttgagaacgtggtgcaccacttcaagtacccctgcgtgttggacctgaagatgggcacgcggcagcatggcgatgacgcgtcagctgagaaggcagcccggcagatgcggaaatgcgagcagagcacatcagccacgctgggcgtcagggtctgcggcatgcaggtgtaccagctggacacagggcattacctctgcaggaacaagtactatggccgtgggctctccattgaaggcttccgcaatgccctctatcaatatctgcacaatggcctggacctgcgacgtgacctgtttgagcctatcctgagcaaactgcggggcctgaaagctgtgctggagcggcaggcctcttaccgcttctactccagttccctgcttgtcatctatgatggcaaggagtgccgggctgagtcctgcctggaccgccggtctgagatgcgtctcaagcacctggacatggtgctccctgaggtggcgtcatcctgtggccccagcaccagccccagcaacaccagccccgaggcgggtccctcctctcagcccaaggtggatgtccgcatgattgactttgcacacagcacattcaagggcttccgggatgaccccaccgtgcatgatgggccagacagaggctacgtgtttggcctggagaacctcatcagcatcatggaacagatgcgggacgagaaccagtaggccctgttctgggcccccagaaccccttcctctccactgcaggcagggaccattgttctgaacttgccgtgaggacacacagacttgcttttaa

SEQ ID NO: 142799 - DNA, 4806 bp, Homo sapiens
  Payload ID: 8217
  Gene Symbol: IP6K1
  Gene Name: inositol hexakisphosphate kinase 1
  Uniprot ID: Q92551
  ENST ID: ENST00000613416
  CDS Start-End: 654-1979
agatgctggcaccgaagccggggggacagccggtgtggaggacggagagcgccagtgcctgagggttggccggctagtagcgggaaaccagcttctctgaccgaagctctggactccgctgatccggagcgctaaagtgtgtccggtgccaccctgatgctctcctgggagttatgttgctcctggctgagaaatagacttacctctttcttagatagcgttcctgcgagtgattttcaggacgctggatgctaagactagacgaagcaagccaaagcccccgcgagccaggcaggccggtgtcacggccctatgattatggcaagggggaccctctgcctggctgctgcttcctgagacccgttcggaacctcacgtgtacctcgaagctcaccgttttcctcgcaaagaacctggttaaatgtccataatggctgagttttattttggaacataatttctttggttcttcaccaccactttttggagagtggtaatgtcttcctctttttgctttaggagaaagacagaataataagctgaatagaatctgaccattggctttcacctggccaggaccttctatgtagctctccttttgtggcccatgtgctgcatcctctgccctcagtgtgcaactggcccccaacgcaatgtgtgtttgtcaaaccatggaagtggggcagtatggcaagaatgcaagtcgggctggagaccggggagtcctcctggagcccttcatccaccaagtaggcggacacagcagcatgatgcgttacgacgatcacactgtgtgcaagcccctcatctcccgggaacagcgcttttacgagtccctccctcccgaaatgaaggagttcacccctgaatacaaaggcgtggtatctgtctgttttgagggggacagtgatggttacatcaacttagtggcctatccttatgtggaaagtgagactgtggaacaggatgacacaacagaacgggagcaacctcggcgcaaacactcccgccggagcctgcaccggtcaggcagtggcagtgaccacaaggaggagaaagccagcctgtcccttgagacctctgagagctcacaggaggcaaagagtccgaaggtggagctgcacagccactcagaggtccctttccagatgctagatggcaacagtggcttgagttctgagaagatcagccacaacccctggagcctgcgttgtcacaagcagcagctgagccgcatgcgctccgagtccaaggaccgaaagctctacaagttcctcctgcttgagaacgtggtgcaccacttcaagtacccctgcgtgttggacctgaagatgggcacgcggcagcatggcgatgacgcgtcagctgagaaggcagcccggcagatgcggaaatgcgagcagagcacatcagccacgctgggcgtcagggtctgcggcatgcaggtgtaccagctggacacagggcattacctctgcaggaacaagtactatggccgtgggctctccattgaaggcttccgcaatgccctctatcaatatctgcacaatggcctggacctgcgacgtgacctgtttgagcctatcctgagcaaactgcggggcctgaaagctgtgctggagcggcaggcctcttaccgcttctactccagttccctgcttgtcatctatgatggcaaggagtgccgggctgagtcctgcctggaccgccggtctgagatgcgtctcaagcacctggacatggtgctccctgaggtggcgtcatcctgtggccccagcaccagccccagcaacaccagccccgaggcgggtccctcctctcagcccaaggtggatgtccgcatgattgactttgcacacagcacattcaagggcttccgggatgaccccaccgtgcatgatgggccagacagaggctacgtgtttggcctggagaacctcatcagcatcatggaacagatgcgggacgagaaccagtaggccctgttctgggcccccagaaccccttcctctccactgcaggcagggaccattgttctgaacttgccgtgaggacacacagacttgcttttaaagggttatatttctctttggtgtaaactaaaagaaatgtttttagctgtagcctggaatccatatatataaagtgaaggagggcagaccacacgccctctcagccaggctcctcagctttgtggctctgactggtgtgtccaggctgccttaggaaggaagaggtgcccctggtgggcttggcagcagggacagggtgcccttggacattggtttctcttgtctagatctttgagatctgtggctgcagggccctgctgattgtaaggtaaagccctgggctggtgcagggcccctccacgcccactcttcccttgttccccagaagtagagggctctgggtgcccatttcttgggggctttccagtcttatgctgtgggtgtcagctagctctttaataggtgccctcagggcaccacagggctgactgcacaaagctggacccatccttcggtctgaccttagcatggggctagattaatgaagctgggctgaggccaacttatggcagagggcggcgcctgggttccccaggcacctgttggcacgtgacaggttggcacctgtcctattcctgaaacagcctctctcaccaagttcccttgcctaagaaggccactccctcccaccccactgaagtgggggatagtcggtgtcctagcaggcctcagggcctctggtggctctggcccagacagtatttgcagttcttgtgctatgggtgggagtcttcttcctcaagtttcggcagctgtgctgctgctggatgggctgctcctcccagggctcaagggctgtggtccgctcagggtctcatttccccaggccaagttcaaggcagcagccctttgtgaggcgctcttggccctgggcctggagggagaactttaagcttttttgctcacagggacgtggtatgggccctgggtgcaggtgcccacattctgctaatgagagctttgtctgatcagtcctgggtccatcagtttgtccatgtgtccggctgccagcccgtcccttgggatccttcccctggggtgtagccttgttcattagtatatactcattccttcatgctttcctcagcagaacacttccacttctgaggtgagcttttgccccatgcccttcctccacaggtgttgcctttttataaagacctgatagcagaataaattggtgtttccctgttgacccagcaccatttctgtgggcctagaatatggccctcaacccttagagtggggcagtgagggcttgaggagtgacccttcctttctcatggttttagtcattttggctgccagcccttaatggcacagatctgctgcttctaacagatggccaggaggtgacaccgatttcagccattgccaaggttagcaccctctcctttgagcctagggccacactgttcattgtcactttaggcaagtgcctgtttggctttaaaggtaagcctgccagctgtgagaagccttggtaactgatggactcatttcctggtccttaaagatgcagcctcttaagggctccttgatggatgccatctctcctagcccccagccctggtgccactggtgggcaggttcccattctttggggctgggagggacagcttgcctgtttctggtcacaaattacagtcttctctcctgtaccattctgtggcttcagccatgggggcagtagcccttcattagtgtagatagtcattccctggtagggtggagggtaagacatagggtctggaactgtttgggaccttttggggatgtcctgtgcctcccagattcctcgattctgggaggagaggctgccgcattctgctgctcctcacagcgagcaaagctgcacccacttacattcagtattttcctggcactacaaagagtgggaaggcctgggatttgctgctgctcccttagagcagggcccctcttttcagcactttggacacctggagacccagccctgttatttaatggtagtgggcaagtgtgtgtgcatactgtctgccactgctttctccctgccccatgccagagagccctgtccctgccaggcccagccttcttagccccaacttgggaacaaagtgcaacatgggatcatgggttggggtgctcaggtgagccctctctatagtgcttccctgggccaagctgacaccagcccctgagggtggggtgggacgggtggtgcttaaaagaggaaggggaccagtgtagcaacttgccagggaccccacccctccctctctgggcctgtgcagtgagcatggggattcccatcaaggggcctggcacctgtgctagttacgtagccgctgctcacgcgctcactcctgaccacatgcacgttccctagatgcagactgctttgaactttaaagctgtacaatttggttatgtttgtgctgacttaaaatatattttaatgaggaaaaaataatggagaaccctgggaaggacctggttcttttgcttctcggggaactgtaagccctcgcgttctgggaatcgctctctgctgctctttcctggaagctaagcctgtctccaccgcccgaggcctgcgccggtggctcccgccgcagttgcgtttgctttggaccttgcgtgcgggggagggggtgctcggtccgagcccgctcctttctgtacacctagcgctgcccgccccgcttgtgtctgaggtcgtgtatgtcaaaaataaagccgctagaaacgg

SEQ ID NO: 142800 - DNA, 1775 bp, Homo sapiens
  Payload ID: 8218
  Gene Symbol: IP6K2
  Gene Name: inositol hexakisphosphate kinase 2
  Uniprot ID: Q9UHH9
  ENST ID: ENST00000328631
  CDS Start-End: 225-1505
aggtgcagggggcggggctcggcctggccgcagccattttggtgcgagagaaacaataggacggaaacgccgaggaacccggctgaggcggcagcagagcatcctggccagaacaagccaaggagccaagacgagagggacacacggacaaacaacagacagaagacgtactggccgctggactccgctgcctcccccatctccccgccatctgcgcccggaggatgagcccagccttcagggccatggatgtggagccccgcgccaaaggcgtccttctggagccctttgtccaccaggtcggggggcactcatgcgtgctccgcttcaatgagacaaccctgtgcaagcccctggtcccaagggaacatcagttctacgagaccctccctgctgagatgcgcaaattcactccccagtacaaaggtgtggtatctgtgcgctttgaagaagatgaagacaggaacttgtgtctaatagcatatccattgaaaggggaccatggaattgtggacattgtagataattcagactgtgaaccaaaaagtaagctcctaaggtggacaacaaacaaaaaacatcatgtcttagaaacagaaaagacccctaaggactgggtgcgtcagcaccgtaaagaggagaaaatgaagagccataagttagaagaagaatttgagtggctaaagaaatctgaagtcttgtactacactgtagagaagaaggggaatataagttcccagcttaaacactataacccttggagcatgaaatgtcaccagcaacagttacagagaatgaaggagaatgcaaagcatcggaaccagtacaaatttatcttactggaaaacctgacttcccgctacgaggtgccttgtgtccttgacctcaagatgggcacacgacaacatggtgatgatgcttcagaggagaaggcagccaaccagatccgaaaatgtcagcagagcacatctgcagtcattggtgtgcgtgtgtgtggcatgcaggtgtaccaagcaggcagtgggcagctcatgttcatgaacaagtaccatggacggaagctatcggtgcagggcttcaaggaggcacttttccagttcttccacaatgggcggtacctgcgccgtgaactcctgggccctgtgctcaagaagctgactgagctcaaggcagtgttggagcgacaggagtcctaccgcttctactcaagctccctgctggtcatttatgatggcaaggagcggcccgaagtggtcctggactcagatgctgaggatttggaggacctgtcagaggaatcagctgatgagtctgctggtgcctatgcctacaaacccatcggcgccagctctgtagatgtgcgcatgatcgactttgcacacaccacctgcaggctgtatggcgaggacaccgtggtgcatgagggccaggatgctggctatatcttcgggctccagagcctgatagacattgtcacagagataagtgaggagagtggggagtgagcttgctagctgctccagtacttgagagcgactctgtgtcccaggcacagctgtgctgcgtcagggaggaagccagtatggccaggtggtggctcctgcagcctggagctgatgtgcagtggcctctgtgagccccagcctgagccagtcccagctgtgcttggagtctttatttattttaactatttcttcaacattccacatttgatgatgatacctctttcttccctgagtgtatatgttctaatacaaatctttttgtttattgta

SEQ ID NO: 142801 - DNA, 1185 bp, Homo sapiens
  Payload ID: 8218
  Gene Symbol: IP6K2
  Gene Name: inositol hexakisphosphate kinase 2
  Uniprot ID: Q9UHH9
  ENST ID: ENST00000340879
  CDS Start-End: 191-484
cattttggtgcgagagaaacaataggacggaaacgccgaggaacccggctgaggcggcagcagagcatcctggccagaacaagccaaggagccaagacgagagggacacacggacaaacaacagacagaagacgtactggccgctggactccgctgcctcccccatctccccgccatctgcgcccggaggatgagcccagccttcagggccatggatgtggagccccgcgccaaaggcgtccttctggagccctttgtccaccaggtcggggggcactcatgcgtgctccgcttcaatgagacaaccctgtgcaagcccctggtcccaagggaacatcagttctacgagaccctccctgctgagatgcgcaaattcactccccagtacaaaggacaaagccaaaggccccttgttagctggccatccctgccccattttttcccctggtcctttcccctgtggccacagggaagtgtggcctgaataccccaccccggctcctctgcacccagagctgggggccacctcagaagtgtcatctctctctgagcacgcattcccctgcagcagtcgaggactgagcagattgagtgatgctggggcagagaggcctgggaggaaaggtgttcagccagtcgtttgtaaggcgctcgtcggcacctgctgaaacgcccccacctgacagccccatcctcaaagactgtcttaattactcatggcaggttctagagacttaaggggaaaagctgctttcaaggccaccacatgtctgtgctccccaaccagctctatctgccttgtgttcattttgttattttgtgacgtgagactgcaaagaccaataaaaacatattttataagaacaaaaggcctgggtgcctacccgtgtgggggcactgtgggaagcctttgctagggtgtcttgtgctgtgtggtttgttttgtttgcccctttattttgctttgcttacccagtcttcccttactcttggatgcttcttaaccctcaggcaaacctgtgttccccctgtattcaggctctgctttaaagcaagccatgaggctgttggagtttctgtttagggcattaaaaattcccgcaaactataaagagcaatgttttcagtcttttaggattagaagaattacataaaaattaataaacattttcaatgatggaaaaa

SEQ ID NO: 142802 - DNA, 571 bp, Homo sapiens
  Payload ID: 8218
  Gene Symbol: IP6K2
  Gene Name: inositol hexakisphosphate kinase 2
  ENST ID: ENST00000453202
  CDS Start-End: 152-544
ctgccggagaaggcgggggccaagagcatcctggccagaacaagccaaggagccaagacgagagggacacacggacaaacaacagacagaagacgtactggccgctggactccgctgcctcccccatctccccgccatctgcgcccggaggatgagcccagccttcagggccatggatgtggagccccgcgccaaaggcgtccttctggagccctttgtccaccaggtcggggggcactcatgcgtgctccgcttcaatgagacaaccctgtgcaagcccctggtcccaagggaacatcagttctacgagaccctccctgctgagatgcgcaaattcactccccagtacaaaggtaagtcccagctgctggaggggttgccacactggcgaggagatgtgagagatcgtggccatggaaggccctggcagccatccctggagccctcactccctcccactctgtgctttccctccctctcctccttctcctcctcctggccctcagcccagcatctcacaccctcagttttcaatccctggtaagattgctcaattctgttttgttgtgtg

SEQ ID NO: 142803 - DNA, 1260 bp, Homo sapiens
  Payload ID: 8218
  Gene Symbol: IP6K2
  Gene Name: inositol hexakisphosphate kinase 2
  Uniprot ID: Q9UHH9
  ENST ID: ENST00000416707
  CDS Start-End: 175-387
gagaaacaataggacggaaacgccgaggaacccggctgaggcggcagagcatcctggccagaacaagccaaggagccaagacgagagggacacacggacaaacaacagacagaagacgtactggccgctggactccgctgcctcccccatctccccgccatctgcgcccggaggatgagcccagccttcagggccatggatgtggagccccgcgccaaaggcgtccttctggagccctttgtccaccaggtcggggggcactcatgcgtgctccgcttcaatgagacaaccctgtgcaagcccctggtcccaagggaacatcagttctacgagaccctccctgctgagatgcgcaaattcactccccagtacaaaggtgtctcttgatcacagtaacccatagtcccccactggggggacggtgggggaagactttgggaggattttacccagaatacttgccgcctgctttttgtcctccaggaaaccagaagcccgggtaattaggacaaagccaaaggccccttgttagctggccatccctgccccattttttcccctggtcctttcccctgtggccacagggaagtgtggcctgaataccccaccccggctcctctgcacccagagctgggggccacctcagaagtgtcatctctctctgagcacgcattcccctgcagcagtcgaggactgagcagattgagtgatgctggggcagagaggcctgggaggaaaggtgttcagccagtcgtttgtaaggcgctcgtcggcacctgctgaaacgcccccacctgacagccccatcctcaaagactgtcttaattactcatggcaggttctagagacttaaggggaaaagctgctttcaaggccaccacatgtctgtgctccccaaccagctctatctgccttgtgttcattttgttattttgtgacgtgagactgcaaagaccaataaaaacatattttataagaacaaaaggcctgggtgcctacccgtgtgggggcactgtgggaagcctttgctagggtgtcttgtgctgtgtggtttgttttgtttgcccctttattttgctttgcttacccagtcttcccttactcttggatgcttcttaaccctcaggcaaacctgtgttccccctgtattcaggctctgctttaaagcaagccatgaggctgttggagtttctgtttagggcattaaaaattcccgcaaactataaagagcaatgttttcagtcttttaggattagaaga

SEQ ID NO: 142804 - DNA, 1124 bp, Homo sapiens
  Payload ID: 8218
  Gene Symbol: IP6K2
  Gene Name: inositol hexakisphosphate kinase 2
  ENST ID: ENST00000417896
  CDS Start-End: 178-570
cgagagaaacaataggacggaaacgccgaggaacccggctgaggcggcagagcatcctggccagaacaagccaaggagccaagacgagagggacacacggacaaacaacagacagaagacgtactggccgctggactccgctgcctcccccatctccccgccatctgcgcccggaggatgagcccagccttcagggccatggatgtggagccccgcgccaaaggcgtccttctggagccctttgtccaccaggtcggggggcactcatgcgtgctccgcttcaatgagacaaccctgtgcaagcccctggtcccaagggaacatcagttctacgagaccctccctgctgagatgcgcaaattcactccccagtacaaaggtaagtcccagctgctggaggggttgccacactggcgaggagatgtgagagatcgtggccatggaaggccctggcagccatccctggagccctcactccctcccactctgtgctttccctccctctcctccttctcctcctcctggccctcagcccagcatctcacaccctcagttttcaatccctggtaagattgctcaattctgttttgttgtgtggatttgagtttgattttggtagaagtgtagttgtgttttatgttcaggtgtctcttgatcacagtaacccatagtcccccactggggggacggtgggggaagactttgggaggattttacccagaatacttgccgcctgctttttgtcctccaggaaaccagaagcccgggtaattaggtaggccggggagcagcgttgagtcagatggaatgcaggagtgggaggcctgtgctgattagcccaagccctttgctgttacagaatgtccccaaaattgctatatgaaagcaacccttcgattcacatatgataattttttatttctttttataatgtattttataggggacatcagcagccaccagcatggtggggtctttgttggggagtgggggagtcttttgtaaatcaagtaagaatccattaaagaaattaattttaaatgtgcattacctggttacataaaggactctagaacaacttaggttcttttgggactgttgaaacattgtctttaaggacagaa

SEQ ID NO: 142805 - DNA, 560 bp, Homo sapiens
  Payload ID: 8218
  Gene Symbol: IP6K2
  Gene Name: inositol hexakisphosphate kinase 2
  ENST ID: ENST00000434860
  CDS Start-End: 399-560
cattttggtgcgagagaaacaataggacggaaacgccgaggaacccggctgaggcggcaggtctttgggctgcctctgcccttcgtagattctctgctgggcctttggaactaacacagcaacttccagggtctcatgttgaagactttatggggtctcgctctgtcacccaggctggagtacagtcatgtgatcacggctcactgcagccttgacctcccaggctccagtgacccttccatctcagcctcccaagtagctgggaccacagagcatcctggccagaacaagccaaggagccaagacgagagggacacacggacaaacaacagacagaagacgtactggccgctggactccgctgcctcccccatctccccgccatctgcgcccggaggatgagcccagccttcagggccatggatgtggagccccgcgccaaaggcgtccttctggagccctttgtccaccaggtcggggggcactcatgcgtgctccgcttcaatgagacaaccctgtgcaagcccctggtcccaagggaacatcagttctacgagacc

SEQ ID NO: 142806 - DNA, 750 bp, Homo sapiens
  Payload ID: 8218
  Gene Symbol: IP6K2
  Gene Name: inositol hexakisphosphate kinase 2
  ENST ID: ENST00000412795
  CDS Start-End: 186-572
ggtgcagggggcggggctcggcctggccgcagccattttggtgcgagagaaacaataggacggaaacgccgaggaacccggctgaggcggcagcttcctaggtgacagacaggtacactgtatgctagccctgtatctgtctgagcagtggaatgtgccaggaaagaaggagcaaccactgactgatgaacctttgccagtctcccttccaagagggatgccagagccttctagcatcctggccagaacaagccaaggagccaagacgagagggacacacggacaaacaacagacagaagacgtactggccgctggactccgctgcctcccccatctccccgccatctgcgcccggaggatgagcccagccttcagggccatggatgtggagccccgcgccaaaggcgtccttctggagccctttgtccaccaggtcggggggcactcatgcgtgctccgcttcaatgagacaaccctgtgcaagcccctggtcccaagggaacatcagttctacgagaccctccctgctgagatgcgcaaattcactccccagtacaaaggtgtctcttgatcacagtaacccatagtcccccactggggggacggtgggggaagactttgggaggattttacccagaatacttgccgcctgctttttgtcctccaggaaaccagaagcccgggacaaagccaaaggccccttgttagctggccatccctgccccattttttcccctggtcctttcccc

SEQ ID NO: 142807 - DNA, 579 bp, Homo sapiens
  Payload ID: 8218
  Gene Symbol: IP6K2
  Gene Name: inositol hexakisphosphate kinase 2
  ENST ID: ENST00000443853
  CDS Start-End: 279-579
ttttggtgcgagagaaacaataggacggaaacgccgaggaacccggctgaggcggcaggtctttgggctgcctctgcccttcgtagattctctgctgggcctttggaactaacacagcaacttccagggtctcatgttgaagactttatggagcatcctggccagaacaagccaaggagccaagacgagagggacacacggacaaacaacagacagaagacgtactggccgctggactccgctgcctcccccatctccccgccatctgcgcccggaggatgagcccagccttcagggccatggatgtggagccccgcgccaaaggcgtccttctggagccctttgtccaccaggtcggggggcactcatgcgtgctccgcttcaatgagacaaccctgtgcaagcccctggtcccaagggaacatcagttctacgagaccctccctgctgagatgcgcaaattcactccccagtacaaaggtgtggtatctgtgcgctttgaagaagatgaagacaggaacttgtgtctaatagcatatccattgaaaggggaccatggaattgtggacattgtagata

SEQ ID NO: 142808 - DNA, 1673 bp, Homo sapiens
  Payload ID: 8218
  Gene Symbol: IP6K2
  Gene Name: inositol hexakisphosphate kinase 2
  ENST ID: ENST00000449610
  CDS Start-End: 167-559
ggacggaaacgccgaggaacccggctgaggcggcagcagagcatcctggccagaacaagccaaggagccaagacgagagggacacacggacaaacaacagacagaagacgtactggccgctggactccgctgcctcccccatctccccgccatctgcgcccggaggatgagcccagccttcagggccatggatgtggagccccgcgccaaaggcgtccttctggagccctttgtccaccaggtcggggggcactcatgcgtgctccgcttcaatgagacaaccctgtgcaagcccctggtcccaagggaacatcagttctacgagaccctccctgctgagatgcgcaaattcactccccagtacaaaggtaagtcccagctgctggaggggttgccacactggcgaggagatgtgagagatcgtggccatggaaggccctggcagccatccctggagccctcactccctcccactctgtgctttccctccctctcctccttctcctcctcctggccctcagcccagcatctcacaccctcagttttcaatccctggtaagattgctcaattctgttttgttgtgtggatttgagtttgattttggtagaagtgtagttgtgttttatgttcaggtgtctcttgatcacagtaacccatagtcccccactggggggacggtgggggaagactttgggaggattttacccagaatacttgccgcctgctttttgtcctccaggaaaccagaagcccgggtaattaggtaggccggggagcagcgttgagtcagatggaatgcaggagtgggaggcctgtgctgattagcccaagccctttgctgttacagaatgtccccaaaattgctatatgaaagcaacccttcgattcacatatgataattttttatttctttttataatgtattttataggggacatcagcagccaccagcatggtggggtctttgttggggagtgggggagtcttttgtaaatcaagtaagaatccattaaagaaattaattttaaatgtgcattacctggttacataaaggactctagaacaacttaggttcttttgggactgttgaaacattgtctttaaggacagaatgtactgggtgcctttctctgtactctgaatatgcatgtgtattgcggtggggatgggggagttgggggccctcacttggtccttctctgttgtttttttccaggacaaagccaaaggccccttgttagctggccatccctgccccattttttcccctggtcctttcccctgtggccacagggaagtgtggcctgaataccccaccccggctcctctgcacccagagctgggggccacctcagaagtgtcatctctctctgagcacgcattcccctgcagcagtcgaggactgagcagattgagtgatgctggggcagagaggcctgggaggaaaggtgttcagccagtcgtttgtaaggcgctcgtcggcacctgctgaaacgcccccacctgacagccccatcctcaaagactgtcttaattactcatggcaggttctagagacttaaggggaaaagctgctttcaaggccaccacatgtctgtgctccccaaccagctctatctgccttgtgttcattttgttattttgtgacgtgagactgcaaagaccaataaaa

SEQ ID NO: 142809 - DNA, 537 bp, Homo sapiens
  Payload ID: 8218
  Gene Symbol: IP6K2
  Gene Name: inositol hexakisphosphate kinase 2
  ENST ID: ENST00000440424
  CDS Start-End: 374-537
ggaaacgccgaggaacccggctgaggcggcaggtctttgggctgcctctgcccttcgtagattctctgctgggcctttggaactaacacagcaacttccagggtctcatgttgaagactttatggggtctcgctctgtcacccaggctggagtacagtcatgtgatcacggctcactgcagccttgacctcccaggctccagtgacccttccatctcagcctcccaagtagctgggaccacagcagagcatcctggccagaacaagccaaggagccaagacgagagggacacacggacaaacaacagacagaagacgtactggccgctggactccgctgcctcccccatctccccgccatctgcgcccggaggatgagcccagccttcagggccatggatgtggagccccgcgccaaaggcgtccttctggagccctttgtccaccaggtcggggggcactcatgcgtgctccgcttcaatgagacaaccctgtgcaagcccctggtcccaagggaacatcagttctacgagaccct

SEQ ID NO: 142810 - DNA, 689 bp, Homo sapiens
  Payload ID: 8218
  Gene Symbol: IP6K2
  Gene Name: inositol hexakisphosphate kinase 2
  ENST ID: ENST00000450045
  CDS Start-End: 69-524
cccttccaagagggatgccagagccttctgtaagctcctgagatgtcactggtatctaggcaacagggatgagcctgaacctccctgaggccagcttactgagagcatcctggccagaacaagccaaggagccaagacgagagggacacacggacaaacaacagacagaagacgtactggccgctggactccgctgcctcccccatctccccgccatctgcgcccggaggatgagcccagccttcagggccatggatgtggagccccgcgccaaaggcgtccttctggagccctttgtccaccaggtcggggggcactcatgcgtgctccgcttcaatgagacaaccctgtgcaagcccctggtcccaagggaacatcagttctacgagaccctccctgctgagatgcgcaaattcactccccagtacaaaggacaaagccaaaggccccttgttagctggccatccctgccccattttttcccctggtcctttcccctgtggccacagggaagtgtggcctgaataccccaccccggctcctctgcacccagagctgggggccacctcagaagtgtcatctctctctgagcacgcattcccctgcagcagtcgaggactgagcagattgagtgatgctggggcagagaggcctgggaggaaaggtgttcagccagtcgtttgtaaggc

SEQ ID NO: 142811 - DNA, 543 bp, Homo sapiens
  Payload ID: 8218
  Gene Symbol: IP6K2
  Gene Name: inositol hexakisphosphate kinase 2
  ENST ID: ENST00000412850
  CDS Start-End: 283-543
attttggtgcgagagaaacaataggacggaaacgccgaggaacccggctgaggcggcaggtctttgggctgcctctgcccttcgtagattctctgctgggcctttggaactaacacagcaacttccagggtctcatgttgaagactttatggcagagcatcctggccagaacaagccaaggagccaagacgagagggacacacggacaaacaacagacagaagacgtactggccgctggactccgctgcctcccccatctccccgccatctgcgcccggaggatgagcccagccttcagggccatggatgtggagccccgcgccaaaggcgtccttctggagccctttgtccaccaggtcggggggcactcatgcgtgctccgcttcaatgagacaaccctgtgcaagcccctggtcccaagggaacatcagttctacgagaccctccctgctgagatgcgcaaattcactccccagtacaaaggtgtggtatctgtgcgctttgaagaagatgaagacaggaacttgtgtctaatagcatat

SEQ ID NO: 142812 - DNA, 792 bp, Homo sapiens
  Payload ID: 8218
  Gene Symbol: IP6K2
  Gene Name: inositol hexakisphosphate kinase 2
  Uniprot ID: Q9UHH9
  ENST ID: ENST00000413298
  CDS Start-End: 303-596
ggtgcgagagaaacaataggacggaaacgccgaggaacccggctgaggcggcagggtctcgctctgtcacccaggctggagtacagtcatgtgatcacggctcactgcagccttgacctcccaggctccagtgacccttccatctcagcctcccaagtagctgggaccacagcagagcatcctggccagaacaagccaaggagccaagacgagagggacacacggacaaacaacagacagaagacgtactggccgctggactccgctgcctcccccatctccccgccatctgcgcccggaggatgagcccagccttcagggccatggatgtggagccccgcgccaaaggcgtccttctggagccctttgtccaccaggtcggggggcactcatgcgtgctccgcttcaatgagacaaccctgtgcaagcccctggtcccaagggaacatcagttctacgagaccctccctgctgagatgcgcaaattcactccccagtacaaaggacaaagccaaaggccccttgttagctggccatccctgccccattttttcccctggtcctttcccctgtggccacagggaagtgtggcctgaataccccaccccggctcctctgcacccagagctgggggccacctcagaagtgtcatctctctctgagcacgcattcccctgcagcagtcgaggactgagcagattgagtgatgctggggcagagaggcctgggaggaaaggtgttcagccagtcgtttgtaaggcgctcgtcggcacctgctgaaacgcccccacc

SEQ ID NO: 142813 - DNA, 2490 bp, Homo sapiens
  Payload ID: 8218
  Gene Symbol: IP6K2
  Gene Name: inositol hexakisphosphate kinase 2
  ENST ID: ENST00000433104
  CDS Start-End: 1108-1500
agataagcaaaccagcactttagagtataacatccagtgatggtcaaactgttcactttcattctgaaactgctggcgtgggcacgagtggacagctgcagtacacactcccatgtctgctgtgagctgagtcttggcctgtggccagctgtgtacgaagatggcaggcttatgggaggatgtccactcccactgaccctggcattgcctgagtcccttgcctacctgggctgggccaagacccaactgcaatcaattgtctggggtccactcgctgctgtggtctctgcctttgtgctcacctcaagactcttgccccctccacctttggaggtcctctttggggatcagaggcccatctctgccaggggcctgaagacctacatcctggagggtacctcccttgggagatcaatcccctgtcctcctgctctttgctccatgagaaggatccacctacgacctccagtcctcaaaccaaccagcccaaggaacatctcaccgattttaaatcgggctgatgtgtgcagaacagactgaaggcatcaggggcagcaagaggagaccaggaggcagctgtgacattgcactcaagagaaatggtggcagtttggactcagtgaaagctatgctgacattcactcaggtatcctgctgtccatcggcccgcagctagtctatccacccaaccgcccgtcagacctccggcccaccctcccagacggaggacaatgctccgccctctctggccccgcccccagtcaccgccttttccggaagctgctgcagcgaatcctggcaccctagcaacagcgcctttcaggctgtccagtccgcgtgcgcagctcctaggacgagccaatagtgaggggcaccgggagcgaggtgcagggggcggggctcggcctggccgcagccattttggtgcgagagaaacaataggacggaaacgccgaggaacccggctgaggcggcagcagagcatcctggccagaacaagccaaggagccaagacgagagggacacacggacaaacaacagacagaagacgtactggccgctggactccgctgcctcccccatctccccgccatctgcgcccggaggatgagcccagccttcagggccatggatgtggagccccgcgccaaaggcgtccttctggagccctttgtccaccaggtcggggggcactcatgcgtgctccgcttcaatgagacaaccctgtgcaagcccctggtcccaagggaacatcagttctacgagaccctccctgctgagatgcgcaaattcactccccagtacaaaggtaagtcccagctgctggaggggttgccacactggcgaggagatgtgagagatcgtggccatggaaggccctggcagccatccctggagccctcactccctcccactctgtgctttccctccctctcctccttctcctcctcctggccctcagcccagcatctcacaccctcagttttcaatccctggtaagattgctcaattctgttttgttgtgtggatttgagtttgattttggtagaagtgtagttgtgttttatgttcaggtgtctcttgatcacagtaacccatagtcccccactggggggacggtgggggaagactttgggaggattttacccagaatacttgccgcctgctttttgtcctccaggaaaccagaagcccgggtaattaggacaaagccaaaggccccttgttagctggccatccctgccccattttttcccctggtcctttcccctgtggccacagggaagtgtggcctgaataccccaccccggctcctctgcacccagagctgggggccacctcagaagtgtcatctctctctgagcacgcattcccctgcagcagtcgaggactgagcagattgagtgatgctggggcagagaggcctgggaggaaaggtgttcagccagtcgtttgtaaggcgctcgtcggcacctgctgaaacgcccccacctgacagccccatcctcaaagactgtcttaattactcatggcaggttctagagacttaaggggaaaagctgctttcaaggccaccacatgtctgtgctccccaaccagctctatctgccttgtgttcattttgttattttgtgacgtgagactgcaaagaccaataaaaacatattttataagaacaaaaggcctgggtgcctacccgtgtgggggcactgtgggaagcctttgctagggtgtcttgtgctgtgtggtttgttttgtttgcccctttattttgctttgcttacccagtcttcccttactcttggatgcttcttaaccctcaggcaaacctgtgttccccctgtattcaggctctgctttaaagcaagccatgaggctgttggagtttctgtttagggcattaaaaattcccgcaaactataaagagcaatgttttcagtcttttaggattagaagaattacataaaaattaataaacattttcaatga

SEQ ID NO: 142814 - DNA, 1565 bp, Homo sapiens
  Payload ID: 8218
  Gene Symbol: IP6K2
  Gene Name: inositol hexakisphosphate kinase 2
  Uniprot ID: Q9UHH9
  ENST ID: ENST00000446860
  CDS Start-End: 151-717
ttttggtgcgagagaaacaataggacggaaacgccgaggaacccggctgaggcggcagcttcctaggtgacagacaggtacactgtatgctagccctgtatctgtctgagcagtggaatgtgccaggaaagaaggagcaaccactgactgatgaacctttgccagtctcccttccaagagggatgccagagccttctagcatcctggccagaacaagccaaggagccaagacgagagggacacacggacaaacaacagacagaagacgtactggccgctggactccgctgcctcccccatctccccgccatctgcgcccggaggatgagcccagccttcagggccatggatgtggagccccgcgccaaaggcgtccttctggagccctttgtccaccaggtcggggggcactcatgcgtgctccgcttcaatgagacaaccctgtgcaagcccctggtcccaagggaacatcagttctacgagaccctccctgctgagatgcgcaaattcactccccagtacaaaggtaagtcccagctgctggaggggttgccacactggcgaggagatgtgagagatcgtggccatggaaggccctggcagccatccctggagccctcactccctcccactctgtgctttccctccctctcctccttctcctcctcctggccctcagcccagcatctcacaccctcagttttcaatccctggtaagattgctcaattctgttttgttgtgtggatttgagtttgattttggtagaagtgtagttgtgttttatgttcaggtgtctcttgatcacagtaacccatagtcccccactggggggacggtgggggaagactttgggaggattttacccagaatacttgccgcctgctttttgtcctccaggaaaccagaagcccgggtaattaggtaggccggggagcagcgttgagtcagatggaatgcaggagtgggaggcctgtgctgattagcccaagccctttgctgttacagaatgtccccaaaattgctatatgaaagcaacccttcgattcacatatgataattttttatttctttttataatgtattttataggggacatcagcagccaccagcatggtggggtctttgttggggagtgggggagtcttttgtaaatcaagtaagaatccattaaagaaattaattttaaatgtgcattacctggttacataaaggactctagaacaacttaggttcttttgggactgttgaaacattgtctttaaggacagaatgtactgggtgcctttctctgtactctgaatatgcatgtgtattgcggtggggatgggggagttgggggccctcacttggtccttctctgttgtttttttccaggacaaagccaaaggccccttgttagctggccatccctgccccattttttcccctggtcctttcccctgtggccacagggaagtgtggcctgaataccccaccccggctcctctgcacccagagctgggggccacctcagaagtgtcatctctctctgagcacgcattcccctgcagcagtcgaggactga

SEQ ID NO: 142815 - DNA, 1309 bp, Homo sapiens
  Payload ID: 8218
  Gene Symbol: IP6K2
  Gene Name: inositol hexakisphosphate kinase 2
  Uniprot ID: Q9UHH9
  ENST ID: ENST00000432678
  CDS Start-End: 253-516
gagccaatagtgaggggcaccgggagcgaggtgcagggggcggggctcggcctggccgcagccattttggtgcgagagaaacaataggacggaaacgccgaggaacccggctgaggcggcagcagagcatcctggccagaacaagccaaggagccaagacgagagggacacacggacaaacaacagacagaagacgtactggccgctggactccgctgcctcccccatctccccgccatctgcgcccggaggatgagcccagccttcagggccatggatgtggagccccgcgccaaaggcgtccttctggagccctttgtccaccaggtcggggggcactcatgcgtgctccgcttcaatgagacaaccctgtgcaagcccctggtcccaagggaacatcagttctacgagaccctccctgctgagatgcgcaaattcactccccagtacaaaggggacatcagcagccaccagcatggtggggtctttgttggggagtgggggagtcttttgtaaatcaagacaaagccaaaggccccttgttagctggccatccctgccccattttttcccctggtcctttcccctgtggccacagggaagtgtggcctgaataccccaccccggctcctctgcacccagagctgggggccacctcagaagtgtcatctctctctgagcacgcattcccctgcagcagtcgaggactgagcagattgagtgatgctggggcagagaggcctgggaggaaaggtgttcagccagtcgtttgtaaggcgctcgtcggcacctgctgaaacgcccccacctgacagccccatcctcaaagactgtcttaattactcatggcaggttctagagacttaaggggaaaagctgctttcaaggccaccacatgtctgtgctccccaaccagctctatctgccttgtgttcattttgttattttgtgacgtgagactgcaaagaccaataaaaacatattttataagaacaaaaggcctgggtgcctacccgtgtgggggcactgtgggaagcctttgctagggtgtcttgtgctgtgtggtttgttttgtttgcccctttattttgctttgcttacccagtcttcccttactcttggatgcttcttaaccctcaggcaaacctgtgttccccctgtattcaggctctgctttaaagcaagccatgaggctgttggagtttctgtttagggcattaaaaattcccgcaaactataaagagcaatgttttcagtcttttaggattagaagaattacataaaaattaataaacattttcaatgatgg

SEQ ID NO: 142816 - DNA, 576 bp, Homo sapiens
  Payload ID: 8218
  Gene Symbol: IP6K2
  Gene Name: inositol hexakisphosphate kinase 2
  ENST ID: ENST00000437427
  CDS Start-End: 304-576
ttttggtgcgagagaaacaataggacggaaacgccgaggaacccggctgaggcggcagggtctcgctctgtcacccaggctggagtacagtcatgtgatcacggctcactgcagccttgacctcccaggctccagtgacccttccatctcagcctcccaagtagctgggaccacagagcatcctggccagaacaagccaaggagccaagacgagagggacacacggacaaacaacagacagaagacgtactggccgctggactccgctgcctcccccatctccccgccatctgcgcccggaggatgagcccagccttcagggccatggatgtggagccccgcgccaaaggcgtccttctggagccctttgtccaccaggtcggggggcactcatgcgtgctccgcttcaatgagacaaccctgtgcaagcccctggtcccaagggaacatcagttctacgagaccctccctgctgagatgcgcaaattcactccccagtacaaaggtgtggtatctgtgcgctttgaagaagatgaagacaggaacttgtgtctaatagcatatccattgaaaggg

SEQ ID NO: 142817 - DNA, 568 bp, Homo sapiens
  Payload ID: 8218
  Gene Symbol: IP6K2
  Gene Name: inositol hexakisphosphate kinase 2
  ENST ID: ENST00000424035
  CDS Start-End: 284-568
attttggtgcgagagaaacaataggacggaaacgccgaggaacccggctgaggcggcaggattgtattcgttctcatatatcaactaagctacactagcagaaaacttcctaggtgacagacaggtacactgtatgctagccctgtatctgtctgagcagtggaatgtgccaggaaagaaggagcaaccactgactgatgaacctttgccagtctcccttccaagagggatgccagagccttctgtaagctcctgagatgtcactggtatctaggcaacagggatgagcctgaacctccctgaggccagcttactgagagcatcctggccagaacaagccaaggagccaagacgagagggacacacggacaaacaacagacagaagacgtactggccgctggactccgctgcctcccccatctccccgccatctgcgcccggaggatgagcccagccttcagggccatggatgtggagccccgcgccaaaggcgtccttctggagccctttgtccaccaggtcggggggcactcatgcgtgctccgcttcaatgagacaaccctgtgc

SEQ ID NO: 142818 - DNA, 539 bp, Homo sapiens
  Payload ID: 8218
  Gene Symbol: IP6K2
  Gene Name: inositol hexakisphosphate kinase 2
  ENST ID: ENST00000455545
  CDS Start-End: 95-539
agcttcctaggtgacagacaggtacactgtatgctagccctgtatctgtctgagcagtggaatgtgccaggaaagaaggagcaaccactgactgatgaacctttgccagtctcccttccaagagggatgccagagccttctagcatcctggccagaacaagccaaggagccaagacgagagggacacacggacaaacaacagacagaagacgtactggccgctggactccgctgcctcccccatctccccgccatctgcgcccggaggatgagcccagccttcagggccatggatgtggagccccgcgccaaaggcgtccttctggagccctttgtccaccaggtcggggggcactcatgcgtgctccgcttcaatgagacaaccctgtgcaagcccctggtcccaagggaacatcagttctacgagaccctccctgctgagatgcgcaaattcactccccagtacaaaggacaaagccaaaggccccttgttagctggccatccctgccccattttttcccctggtcctttcccctgt

SEQ ID NO: 142819 - DNA, 973 bp, Homo sapiens
  Payload ID: 8218
  Gene Symbol: IP6K2
  Gene Name: inositol hexakisphosphate kinase 2
  ENST ID: ENST00000443964
  CDS Start-End: 129-698
ggacggaaacgccgaggaacccggctgaggcggcagcttcctaggtgacagacaggtacactgtatgctagccctgtatctgtctgagcagtggaatgtgccaggaaagaaggagcaaccactgactgatgaacctttgccagtctcccttccaagagggatgccagagccttctcagagcatcctggccagaacaagccaaggagccaagacgagagggacacacggacaaacaacagacagaagacgtactggccgctggactccgctgcctcccccatctccccgccatctgcgcccggaggatgagcccagccttcagggccatggatgtggagccccgcgccaaaggcgtccttctggagccctttgtccaccaggtcggggggcactcatgcgtgctccgcttcaatgagacaaccctgtgcaagcccctggtcccaagggaacatcagttctacgagaccctccctgctgagatgcgcaaattcactccccagtacaaaggtaagtcccagctgctggaggggttgccacactggcgaggagatgtgagagatcgtggccatggaaggccctggcagccatccctggagccctcactccctcccactctgtgctttccctccctctcctccttctcctcctcctggccctcagcccagcatctcacaccctcagttttcaatccctggtaagattgctcaattctgttttgttgtgtggatttgagtttgattttggtagaagtgtagttgtgttttatgttcaggtgtctcttgatcacagtaacccatagtcccccactggggggacggtgggggaagactttgggaggattttacccagaatacttgccgcctgctttttgtcctccaggaaaccagaagcccgggtaattaggtaggccggggagcagcgttgagtcagatggaatgcaggagtgggaggcctgtgctgattagcccaagcc

SEQ ID NO: 142820 - DNA, 580 bp, Homo sapiens
  Payload ID: 8218
  Gene Symbol: IP6K2
  Gene Name: inositol hexakisphosphate kinase 2
  ENST ID: ENST00000449563
  CDS Start-End: 189-580
ttttggtgcgagagaaacaataggacggaaacgccgaggaacccggctgaggcggcagcagagcatcctggccagaacaagccaaggagccaagacgagagggacacacggacaaacaacagacagaagacgtactggccgctggactccgctgcctcccccatctccccgccatctgcgcccggaggatgagcccagccttcagggccatggatgtggagccccgcgccaaaggcgtccttctggagccctttgtccaccaggtcggggggcactcatgcgtgctccgcttcaatgagacaaccctgtgcaagcccctggtcccaagggaacatcagttctacgagaccctccctgctgagatgcgcaaattcactccccagtacaaagctgttttgatatttgttaagtttgcagatgagtttggggcctctggcaacatagagactaaggaactgggtgtggtatctgtgcgctttgaagaagatgaagacaggaacttgtgtctaatagcatatccattgaaaggggaccatggaattgtggacattgtagataattcagactgtgaaccaaaaag

SEQ ID NO: 142821 - DNA, 631 bp, Homo sapiens
  Payload ID: 8218
  Gene Symbol: IP6K2
  Gene Name: inositol hexakisphosphate kinase 2
  ENST ID: ENST00000454335
  CDS Start-End: 211-631
ggaaacgccgaggaacccggctgaggcggcagcttcctaggtgacagacaggtacactgtatgctagccctgtatctgtctgagcagtggaatgtgccaggaaagaaggagcaaccactgactgatgaacctttgccagtctcccttccaagagggatgccagagccttctgtaagctcctgagatgtcactggtatctaggcaacagggatgagcctgaacctccctgaggccagcttactgagagcatcctggccagaacaagccaaggagccaagacgagagggacacacggacaaacaacagacagaagacgtactggccgctggactccgctgcctcccccatctccccgccatctgcgcccggaggatgagcccagccttcagggccatggatgtggagccccgcgccaaaggcgtccttctggagccctttgtccaccaggtcggggggcactcatgcgtgctccgcttcaatgagacaaccctgtgcaagcccctggtcccaagggaacatcagttctacgagaccctccctgctgagatgcgcaaattcactccccagtacaaaggtgtggtatctgtgcgctttgaagaagatgaagacaggaacttgtgtctaatagcat

SEQ ID NO: 142822 - DNA, 2174 bp, Homo sapiens
  Payload ID: 8218
  Gene Symbol: IP6K2
  Gene Name: inositol hexakisphosphate kinase 2
  Uniprot ID: Q9UHH9
  ENST ID: ENST00000431721
  CDS Start-End: 239-796
cattttggtgcgagagaaacaataggacggaaacgccgaggaacccggctgaggcggcagcttcctaggtgacagacaggtacactgtatgctagccctgtatctgtctgagcagtggaatgtgccaggaaagaaggagcaaccactgactgatgaacctttgccagtctcccttccaagagggatgccagagccttctgtaagctcctgagatgtcactggtatctaggcaacagggatgagcctgaacctccctgaggccagcttactgagcagagcatcctggccagaacaagccaaggagccaagacgagagggacacacggacaaacaacagacagaagacgtactggccgctggactccgctgcctcccccatctccccgccatctgcgcccggaggatgagcccagccttcagggccatggatgtggagccccgcgccaaaggcgtccttctggagccctttgtccaccaggtcggggggcactcatgcgtgctccgcttcaatgagacaaccctgtgcaagcccctggtcccaagggaacatcagttctacgagaccctccctgctgagatgcgcaaattcactccccagtacaaaggtaagtcccagctgctggaggggttgccacactggcgaggagatgtgagagatcgtggccatggaaggccctggcagccatccctggagccctcactccctcccactctgtgctttccctccctctcctccttctcctcctcctggccctcagcccagcatctcacaccctcagttttcaatccctggtaagattgctcaattctgttttgttgtgtggatttgagtttgattttggtagaagtgtagttgtgttttatgttcaggtgtctcttgatcacagtaacccatagtcccccactggggggacggtgggggaagactttgggaggattttacccagaatacttgccgcctgctttttgtcctccaggaaaccagaagcccgggtaattaggtaggccggggagcagcgttgagtcagatggaatgcaggagtgggaggcctgtgctgattagcccaagccctttgctgttacagaatgtccccaaaattgctatatgaaagcaacccttcgattcacatatgataattttttatttctttttataatgtattttataggggacatcagcagccaccagcatggtggggtctttgttggggagtgggggagtcttttgtaaatcaagtaagaatccattaaagaaattaattttaaatgtgcattacctggttacataaaggactctagaacaacttaggttcttttgggactgttgaaacattgtctttaaggacagaatgtactgggtgcctttctctgtactctgaatatgcatgtgtattgcggtggggatgggggagttgggggccctcacttggtccttctctgttgtttttttccaggacaaagccaaaggccccttgttagctggccatccctgccccattttttcccctggtcctttcccctgtggccacagggaagtgtggcctgaataccccaccccggctcctctgcacccagagctgggggccacctcagaagtgtcatctctctctgagcacgcattcccctgcagcagtcgaggactgagcagattgagtgatgctggggcagagaggcctgggaggaaaggtgttcagccagtcgtttgtaaggcgctcgtcggcacctgctgaaacgcccccacctgacagccccatcctcaaagactgtcttaattactcatggcaggttctagagacttaaggggaaaagctgctttcaaggccaccacatgtctgtgctccccaaccagctctatctgccttgtgttcattttgttattttgtgacgtgagactgcaaagaccaataaaaacatattttataagaacaaaaggcctgggtgcctacccgtgtgggggcactgtgggaagcctttgctagggtgtcttgtgctgtgtggtttgttttgtttgcccctttattttgctttgcttacccagtcttcccttactcttggatgcttcttaaccctcaggcaaacctgtgttccccctgtattcaggctctgctttaaagcaagccatgaggctgttggagtttctgtttagggcattaaaaattcccgcaaactataaa

SEQ ID NO: 142823 - DNA, 553 bp, Homo sapiens
  Payload ID: 8218
  Gene Symbol: IP6K2
  Gene Name: inositol hexakisphosphate kinase 2
  ENST ID: ENST00000413654
  CDS Start-End: 240-553
gaggcggcaggtaaagctcgcgtcctatggccctagtgcccgaggagctttgagggagattttttcaggctactgggaaacgggatctctgatcattggagtctcccagcagagcatcctggccagaacaagccaaggagccaagacgagagggacacacggacaaacaacagacagaagacgtactggccgctggactccgctgcctcccccatctccccgccatctgcgcccggaggatgagcccagccttcagggccatggatgtggagccccgcgccaaaggcgtccttctggagccctttgtccaccaggtcggggggcactcatgcgtgctccgcttcaatgagacaaccctgtgcaagcccctggtcccaagggaacatcagttctacgagaccctccctgctgagatgcgcaaattcactccccagtacaaaggtgtggtatctgtgcgctttgaagaagatgaagacaggaacttgtgtctaatagcatatccattgaaaggggaccatggaattgtggacattgtagataattcagactgtga

SEQ ID NO: 142824 - DNA, 2610 bp, Homo sapiens
  Payload ID: 8219
  Gene Symbol: IP6K3
  Gene Name: inositol hexakisphosphate kinase 3
  Uniprot ID: Q96PC2
  ENST ID: ENST00000293756
  CDS Start-End: 328-1560
agacctcccgcaccagggctctggtgaacagcaaatgctccacgctgggacgggccattgcctgatgcctgtacatggtgggcactgagagacaagattcctgggccctgccttccatacactccccacgatctcggaggaagctctgaggaccccgctgagaacccacagacaggaggacaactgcgctatgacagcaataaaggccaagaaggagaaagttgaggaccgctgacagccccgtgtgctgttgggagctgccctttctacttcaaaccttcctctagcagactgtgcagggaccccccaccaccaccatctgccgccatggttgtgcaaaacagcgcagacgccggggacatgagggcaggcgtgcagctggagcccttcctgcaccaggtcggggggcacatgagcgtgatgaagtatgacgagcatacggtgtgcaagcccctcgtctcccgggagcagaggttctatgaatccctgccgctggccatgaagcggttcaccccacagtacaaaggtaccgtcacagtgcacctctggaaagacagcacaggccatctcagcttggttgccaacccagtgaaggagagccaggagcccttcaaggtctccacagagtcggcggcggtggccatatggcagacgctccagcagaccaccggcagcaatggcagcgactgcacccttgcccagtggccgcatgcccagctggcacgctcacccaaggagagcccggccaaggctcttctgaggtccgagccccacctcaacactccagccttctcgctggtggaagacaccaacggaaaccaggttgagaggaagagcttcaacccgtggggcctgcaatgccaccaggcccacctgacccgcctgtgctccgagtacccagagaacaagcggcatcggttcttgttgctggaaaatgtagtgtcacagtacacgcatccctgtgtcctggatctgaagatggggacccggcagcacggcgatgatgcatcggaggagaagaaggcccgccacatgaggaagtgtgcgcagagcacctcagcctgcctgggtgtgcgcatctgcggcatgcaggtttatcaaacagataagaagtactttctctgcaaagacaagtactatggaagaaaactctcagtggaggggttcagacaagccctctatcagttcctacataatggaagccacctccggagggagctcctggagcccatcctgcaccagctccgggccctcctctctgtcattaggagccagagttcataccgcttctattccagctctctccttgtcatctatgatgggcaggaaccaccagaaagagccccaggcagcccgcatcctcacgaggctccccaggcagcccacggtagctctcccggtggtctcaccaaggttgacatccgcatgattgactttgctcataccacatacaagggctactggaatgagcacaccacctacgatggaccagaccctggctatatttttggcctggaaaacctcatcaggatcctgcaggatatccaagagggagaatgaaacttcctgggcttatctggattcttctgggctatagatctcaaatagagacctgttggttgctagggtagtccagacaccccttagatgtcttcataatagtcctatctaccttcaaaaaccatctctatatatggcagactatattaacagctgctgaacaaatcagctctggaggtgattccacatcccctggcattatgctctaatgctgctcatcggagaacagacagccaggataaagtggcaccttctggagtacactggagggggcagcccaagttagaggccagcattgctgacattctggaatatttgcatctaaaaatgtttactcgttgccatgctgcagtccgcacaagctgtgaggcagaaaacttgacttgaagcagccttgaagagtgagttcatgagctcatggtttttctccttgtatggactgctcgctccaagggcaggcagagctcatgaatgcctcttatcttcctaagcggagttttaggtgacacaggatgaagcagaagagatctacccatctcatctgctctgcacccagcttctaagtggacaaagccaagcccaggcatgagctctggcaaagcaagaccccagattctccatttttgcctgtggaaaggagggtccctttacaggcttttttttcctttttttcccccaaaatctcttaaaatgaggaatctcttagcagactttggagttccccattctgccacattctgaccatgagacgcggcttgcagtgggggtgaacgcacataaaaagggaccactgacgtcctgctctactctctgctttctatttatttattttgggggtgggttggggagtcagaagaacctggaggacggaggaaaccaggggcaatgtttacaagactggtggacaagtgtaaatatggaataagaacaaacagttctaattaattccttcttctgcagtatggaaacctattacgatgcccttgagtcaagcactgagatacgttacccaattagggaaataaatttgttaataaaattgctgaggtc

SEQ ID NO: 142825 - DNA, 2012 bp, Homo sapiens
  Payload ID: 8219
  Gene Symbol: IP6K3
  Gene Name: inositol hexakisphosphate kinase 3
  Uniprot ID: Q96PC2
  ENST ID: ENST00000451316
  CDS Start-End: 457-1689
agacctcccgcaccagggctctggtgaacagcaaatgctccacgctgggacgggccattgcctgatgcctgtacatggtgggcactgagagacaagattcctgggccctgccttccatacactccccacgatctcggaggaagctctggctggctacctggtagacaatcgctgccaatccgtccaagtccaggggcaagggagtttccactgctgtgccacaggctgcactgaaggcccaggggtcttccctgctcacactgcgctctctgaggagaggaccccgctgagaacccacagacaggaggacaactgcgctatgacagcaataaaggccaagaaggagaaagttgaggaccgctgacagccccgtgtgctgttgggagctgccctttctacttcaaaccttcctctagcagactgtgcagggaccccccaccaccaccatctgccgccatggttgtgcaaaacagcgcagacgccggggacatgagggcaggcgtgcagctggagcccttcctgcaccaggtcggggggcacatgagcgtgatgaagtatgacgagcatacggtgtgcaagcccctcgtctcccgggagcagaggttctatgaatccctgccgctggccatgaagcggttcaccccacagtacaaaggtaccgtcacagtgcacctctggaaagacagcacaggccatctcagcttggttgccaacccagtgaaggagagccaggagcccttcaaggtctccacagagtcggcggcggtggccatatggcagacgctccagcagaccaccggcagcaatggcagcgactgcacccttgcccagtggccgcatgcccagctggcacgctcacccaaggagagcccggccaaggctcttctgaggtccgagccccacctcaacactccagccttctcgctggtggaagacaccaacggaaaccaggttgagaggaagagcttcaacccgtggggcctgcaatgccaccaggcccacctgacccgcctgtgctccgagtacccagagaacaagcggcatcggttcttgttgctggaaaatgtagtgtcacagtacacgcatccctgtgtcctggatctgaagatggggacccggcagcacggcgatgatgcatcggaggagaagaaggcccgccacatgaggaagtgtgcgcagagcacctcagcctgcctgggtgtgcgcatctgcggcatgcaggtttatcaaacagataagaagtactttctctgcaaagacaagtactatggaagaaaactctcagtggaggggttcagacaagccctctatcagttcctacataatggaagccacctccggagggagctcctggagcccatcctgcaccagctccgggccctcctctctgtcattaggagccagagttcataccgcttctattccagctctctccttgtcatctatgatgggcaggaaccaccagaaagagccccaggcagcccgcatcctcacgaggctccccaggcagcccacggtagctctcccggtggtctcaccaaggttgacatccgcatgattgactttgctcataccacatacaagggctactggaatgagcacaccacctacgatggaccagaccctggctatatttttggcctggaaaacctcatcaggatcctgcaggatatccaagagggagaatgaaacttcctgggcttatctggattcttctgggctatagatctcaaatagagacctgttggttgctagggtagtccagacaccccttagatgtcttcataatagtcctatctaccttcaaaaaccatctctatatatggcagactatattaacagctgctgaacaaatcagctctggaggtgattccacatcccctggcattatgctctaatgctgctcatcggagaacagacagccaggataaagtggcaccttctggagtacactggagggggcagcccaagttagaggccagcattgctgacattctggaatatttgcatct

SEQ ID NO: 142826 - DNA, 546 bp, Homo sapiens
  Payload ID: 8219
  Gene Symbol: IP6K3
  Gene Name: inositol hexakisphosphate kinase 3
  ENST ID: ENST00000634274
  CDS Start-End: 317-546
ttgcctgatgcctgtacatggtgggcactgagagacaagattcctgggccctgccttccatacactccccacgatctcggaggaagctctggctggccaggagtctgccccacggaggtgccagcgtcttcgtggagaggaccccgctgagaacccacagacaggaggacaactgcgctatgacagcaataaaggccaagaaggagaaagttgaggaccgctgacagccccgtgtgctgttgggagctgccctttctacttcaaaccttcctctagcagactgtgcagggaccccccaccaccaccatctgccgccatggttgtgcaaaacagcgcagacgccggggacatgagggcaggcgtgcagctggagcccttcctgcaccaggtcggggggcacatgagcgtgatgaagtatgacgagcatacggtgtgcaagcccctcgtctcccgggagcagaggttctatgaatccctgccgctggccatgaagcggttcaccccacagtacaaaggtaccgtcacagtgcacctctggaaagacag

SEQ ID NO: 142827 - DNA, 7199 bp, Homo sapiens
  Payload ID: 8220
  Gene Symbol: IMPAD1
  Gene Name: inositol monophosphatase domain containing 1
  Uniprot ID: Q9NX62
  ENST ID: ENST00000262644
  CDS Start-End: 260-1339
ggaagtcggaccagccggccggcggaagaacctagagcgcgctgcctggcgagtcaggcgcgcggggcggcgttggtggtcttcgcggcgcaactcggcctttcctgggagggagtgatggggcgcaccggggccggggagcgggcgccagtgtagcccgcgcggcgcctggcccggagcgcggcggctgcggcggcggcggcggcgggcgctggaggcctgtgagagccgcagcccggagcgcccggcttcccacgccatggcccccatgggcatccgcctttccccactgggggtggcagtgttttgcctgctggggctcggcgtgctctaccacctctactcgggcttcttggccggccgcttcagcctcttcggcctgggcggcgagcctggcggcggcgcggcggggcccgcggccgcggccgatgggggcaccgtggacttgcgcgagatgctggctgtgtcagtgctggccgcagtccgcggcggcgacgaggtgaggcgcgtccgcgagagcaacgtcctccacgagaagtccaaggggaagacgcgcgagggagccgaggacaagatgaccagcggcgacgtgctgtccaaccgcaagatgttctacctgctcaagaccgccttccccagcgtccagattaatactgaggaacacgtggatgcagctgatcaggaggttatcttgtgggatcataagattcctgaggatatcctaaaggaagtaactactcctaaagaggtaccagcagaaagtgttactgtctggattgacccacttgatgctacacaggaatatacagaggatcttcgaaagtacgtcactactatggtgtgtgtggctgtaaatggtaaacccatgctaggagttatacataagccattttccgaatatacagcttgggcaatggtagatggtggttcaaatgtgaaagcccgctcttcctacaatgagaagaccccaaggatcgttgtgtctcgttcccattcagggatggtcaaacaggtcgctcttcagacttttggaaaccagactacaattatcccagctggtggtgctggttataaagttttagcacttttggatgtgcctgataagagtcaagaaaaagctgatttatacatccatgtgacatacatcaaaaagtgggatatatgtgctggtaatgccatcttaaaagccctaggggggcatatgactaccctgagtggtgaagaaatcagttacactggttcagacggcattgaagggggactccttgctagcatcagaatgaaccaccaggccctggtcagaaaactcccagatctagaaaagacaggacataaatgagcataactgattacagggtacagttcttcacagctgaaatggttagcctgagatgctggaagcttcaaaggattggtggagactatgcatggttaaggccatcccgaactttttaaagtatttatgaagcatcagagacttattttccctgtaatagaatgcaaaatcagggaaaatgggttgctttgtgtctcaagtattgtctttatttttgagactattttcatacagttgtcatacacaaggcgcatatatatatttgtgaattaaaatctgtagctgagtctacattgttatgagtcaccattttcacacaacatcatgaatcttcactgttagtactttcatatagaattcggttgaaggaaagattgatttttgtgtagatgtttaatataactttacaactatatctcattgaaaataaagtcattggggatttttacctctaatttggatggaaagcacaagaagccacacattcattaatatgcaacaaatgttgtatttatgttactgaatatttctatggattaaaatagaaaaagtttaattgattttttcttttaaattttaataacaggttcaccagctggtagaaaatagagacacatgatgatttgcattgtaataatttctgtgtgtatgtgtgtgtgttgttttgtttttataaagaaaagtgtgtttgtacccatgagttcagcatttctgccatcttgctattttcattttccctgtggaagatgcatggttgcatccttttccttctgaccaacacttagtctttaactttgtaaggttcggtttaaggtttcagggttagcactatagttttggttcattttctcattaacgataaaatatgctgtaaggcactataagaatataaatgattctattacaattgaaagttacttgacattacatgaattgaactgcctttcattatcttcagacactttgttttagtatttttttttaatttgctaggtttgtatatagaagatcctttcattatcaagaatgagtatggttgcttttgccatggttgcttttactattaataaatgtatctagcctacccaaactctgtagtaacttttgagattctcttaatttcccctcagattaaaatagagaaggttgaaggtactttttgatgaaatttttttctagtctggttagaaaaaaaaagttgtgacatattcattgtgttaccgtaactagaaccttgctttgtgaactgtctttcattgggatgtatggtttctctcaatgtgaaatctggaaacttcatgtaaactacccatgccgttatttcatgtgactccagtgcccttgtattccataacatgctgatgagagggatttctcacggtttctttctttgctaaattttttaaccataaagcagcttaccctttattttcccatcttggaagtaaaattgaccaaagaatgtacgttctagcctggtggaatgtgcatactttaggtttgtatgttacattgtccaaagccctttactttcttattagtaaactgaatctaatatgacacaaatgttttcacccaatctcttgcaactggtcaaattcgagaaggtgttgggccttagcagtaggccttttcagtgaaaattcattcaaagttttggtaggtggaacacttgatatttaaataggacttgaaaattttgaaaagagtatcagagacctcatttttttcctttgcaataagctgaagaaactttctttttcaggagagatggcaaaggtatatgctgttgccagagtcctgtggtataagcatctgtttttattatagtatgtcaaagttagggaaatgggactggcaagtaaaaaatggaatttaatttcaatgttttatgggaactctgatttaatgggaagcaaactagttcatattagcaggaattattttattttttcgagacagagtttcactctcgttggccaggctggagtgcaatggcgtgatctcggctcaccgcaacctctgcttcccgggttcaagcgattctcctgcctcagcctcccaagtagctgggattacaggcatacaccaccacacccagctaatttttttgtatttttgttagagacagggtttctccatgttggtcaggctggtctcgaactcccgacctcaggtgatccgcccacctcggcctcccaaagtgatgattttatttttatttttaattgtattaatctgcatctagataatgactttgtgaagggtgtgtgttgtgtgcaaaacttaaggtattggttgagagttaaatacattatttttataatatgttgggtatagtctagttactaatgattttttttaagtacttttataaaaagttcatttttaaaattgtttgtttttaaaagccaatatacgttgcagaattaggaacagtatttatatttatttacacaagacattgtgccatagcatcctagtaaaacaccttcatgaatgagtaatgttatctcccagaattacattaaaattatttctaaaaagtagcaaagtcattaccttttgcttttaatgacccacacctcaccagctcctggtcttttcttcactgttgcccttattttgaggcaatttttcttaaaatatgacttttatgcaccacatttagtagaggcagtgacatcagtgatctcagtacccatcagctgtccccctcctctgcccttcttcatctcttctaccttgtgaccatttcccttaccggttcatgttctcctttatctctgcttttctttcttagccaggatacttccctcacaactctcactcccaaattcttttagatatacatttttctggatattggctgctgaaatctgaagctctggtaaagttcctagtatcagagatcaatcctggaggaggcctagttcactattagattacaaagactcctcacaaagtaaaggaaaatcaccttcaaaaccacaaccctttatgttgtcaagtctaatatgagtgtttttacgaagtatttctttctacccattgttcaagaatgtaaatgtaaaaaaaaatacaagagagttgggtagatatgcatgcttgaggaaacttgcttttactgttttcctacttgtatccccagttcagttgaatttacaaggacctacaagatggtcatgtttgtcttggtatgtgctaccccaattttagtgtttctttctttattttaaatcagtaattattcagttgattgtttatactatataatgaagtaacaaaaacattttggtttgtatgttttaagtaacagttgtgcaaattcctcttgtttgttaggtgctccctttgaatattttgtgaactgtgtcagagggagaggggtggtggctaggaagagggtcagaaagaagctagagggaggtcaggagaagggtaacagggaggatgcaaagcagacatctaccctggtcaccccaggatcaggatatctgtccttgtttcatgttgaattcaaaaattggatctcacttaggctttgaaggtgacagccatctctgatagctgagcataagtaaagaaaggtggagtgccgatgcagaaaggaaaatattcagctttcctctcttagatcgcactttgaagatggccttttggagacaatctgacaggttaaaacaggaactgttggaattattctagctgtaactacctattggctatgtgttgattgatcctagaaagaaaaaataatttttcattttagatcttgattgaatttaagatgtatttatatgcctacaaaaggtctgtcttgtaactgttgtataaaataaacctaatctatggtttcatttttaatctaaaaaaagttgtgccttaacaatagggcattgtatgttaataagggaaaacaacctttttagtagatgggggaaaataggaactttttgccattaaaacttaagttcttttgatgtttttaatattatagttgggggagattcattaaaattaaattgaaataaaattatttttgcataacctagcatttacaactaaagtatgttttttataagaactggcatcttgatgtatataggtctgaaataatatttcatcttttgatttttaattttaataatattagaccaggatagatcacagttttacaaatcttagttttaaataaattatttcagtgtgctgttagtcctctacagtcattttggtttaaaaagtgactatttatttatggtagcatatcaataatttattaatgttaaaaaatactgtgtatgacattacaaaccagaacagttcctgggggagaggattctaattgattggcagttctgagagggcaagaagaatggaactttatacttcaaaaggaggttttggttttaccaggtactgcttatgtaaatcgtttatttttatttcatcaaagcctggcaagtatatgcattccaatttaccattggcaaagctttatttatttttaaggttggatgttgaattaattttgtgggaaaatgagatttgtaagtagttttctttctagataagataacataaaccaaactttcagaagttaaggatgatgaataatattgaaatgacttgttatatattgtaagggttcccttaagtatcataattaacaatttgtggaaattgaaaaagcataaactgtgttatttgattagtaatatgttcccttaaaattcattttgaggtgtatgttatacacacagtaaatttttgttcaggaatgacttgctcattctgtgtttttaaaaataggaaataaggcatagtgagtcatcattacatcaattaaccaaaaaatatttcatcccctccgtcactgaaattatctacttcagccacctttcttattctcgtgttaggagggcacgtttatggactttttaatttccatgtgccatattgtccactaccggcagtagccaaagctagctgtttcagtcccacagaagagacagtgctctgccatgatgacagggcactgctagggctggtttttcttgtttttcccttttggcagtgtggacttcaggaactagatgtatatgcacaagggattgagtttacactaaaactaggaaatggagttttcaatctatgttcttgcctcttcatacttttatttattttttgtcatcctgccttatactgggctaacaatgagataaaataaaaatacctttgaatactcttttccctttcatgcatttaaagccatggaggaactagaccattagctgttgccgtcacatgcttagacaccagtttacttagcgtgttatgaccttcctcacccatactaccaaatttaaatgggtcccgacttcaccctctggaaggaagtaaactcttctctccccatggtttcagagcagtttttacctgcaagcaccatctctgtatgtgctcttactagattatacagttcttgagagggattgcatcttagtgtttttgtatttccacctcacccccagcacatagcccagtctcttgcacaaattaagtacttaatgtgtgttgagctaaattgaataaaggattattagcattagcatattttgtgccttggttgtataagctggttgtttgttttgttacctttgcaaatatttatgattatcacccccccacatactaaattgtttttaaaagttttgcctttccttcagatactaccccaggcaatttgctgtagataatgtgattgcttccaatgacataattatcccaaactctctgccccggatatactttgccaaacgaaatttgaattctctgaataaattggtcatgtctaaaa

SEQ ID NO: 142828 - DNA, 584 bp, Homo sapiens
  Payload ID: 8220
  Gene Symbol: IMPAD1
  Gene Name: inositol monophosphatase domain containing 1
  ENST ID: ENST00000520392
  CDS Start-End: 1-248
taactactcctaaagaggtaccagcagaaagtgttactgtctggattgacccacttgatgctacacaggaatatacagaggatcttcgaaagtacgtcactactatggtgtgtgtggctgtaaatggtaaacccatgctaggagttatacataagccattttccgaatatacagccagaaataagctggtgatgcagctggtttcattactagccatggtggactatatcttgccctgtagtgagtgactgctaaaacaacaatctaattgggataattctgacttgggcaatggtagatggtggttcaaatgtgaaagcccgctcttcctacaatgagaagaccccaaggatcgttgtgtctcgttcccattcagggatggtcaaacaggtcgctcttcagacttttggaaaccagactacaattatcccagctggtggtgctggttataaagttttagcacttttggatgtgcctgataagagtcaagaaaaagctgatttatacatccatgtgacatacatcaaaaagtgggatatatgtgctggtaatgccatcttaaaagccctaggggggcatatgac

SEQ ID NO: 142829 - DNA, 487 bp, Homo sapiens
  Payload ID: 8220
  Gene Symbol: IMPAD1
  Gene Name: inositol monophosphatase domain containing 1
  ENST ID: ENST00000517461
  CDS Start-End: 1-249
cgcggcggcgacgaggtgaggcgcgtccgcgagagcaacgtcctccacgagaagtccaaggggaagacgcgcgagggagccgaggacaagatgaccagcggcgacgtgctgtccaaccgcaagatgttctacctgctcaagaccgccttccccagcgtccagattaatactgaggaacacgtggatgcagctgatcaggaggctggggcaggagaatcgcttgaacccgagaggtggaggttgcagtgagccaagatcgcgctgttgcactccagcctgagtgacagagcgagactctgtctcaaaaaataaataaataaataaaaataaacaataagttactttgcaatgtatttttgttctgagtttaatgtttatacagttactttaaaatttttttaatttgaaataattttaaacttaagcagttgcagagactgcagcaagctcctgcacactccatcctgctattttaacaggatactta

SEQ ID NO: 142830 - DNA, 6133 bp, Homo sapiens
  Payload ID: 8221
  Gene Symbol: IPMK
  Gene Name: inositol polyphosphate multikinase
  Uniprot ID: Q8NFU5
  ENST ID: ENST00000373935
  CDS Start-End: 324-1574
gccgtcagggccccagggagcgcggggcgccgctgctgctgttcttcggctcggttctgtctaccgggcagcgccggggccggcggctgcggcggcagaggaacaggagccgggagccgcgttccgccgagagttgggcagaggagcgcccgcgccccggcggcgtcatgggccccctccccgcgcttcagagggcaccagccgcgggaacccccgggcctcctcgcgcccgagcctgagcgaccctcgggttctccggcgccccctccctcgccctattttttttcctactctcgctgccgttaccgcttctgctctccgttatggcaacagagccaccatcccccctccgggtcgaggcgccgggccccccagaaatgcggacctcaccggcgatcgagtccacccctgagggcaccccgcagccggcgggcggcagactccgcttcctcaacggctgcgtgcccctctcgcatcaggtggccgggcacatgtacgggaaggacaaagtgggtatactgcaacatccagatggcacagttttgaaacagttacaaccacctccaaggggcccaagagagctggaattctataatatggtttatgctgctgactgttttgatggtgttcttctagagctacgaaaatatttgccaaaatattatggcatctggtcacctcccactgcaccaaacgatttatacctaaaactggaagatgtgacccataaatttaataagccctgtataatggatgtaaagatagggcaaaaaagctatgatccttttgcctcatctgagaagattcagcaacaggtcagcaagtacccattaatggaagagattgggttcttggtgcttggcatgagggtttatcatgttcattccgatagctatgagacagaaaaccagcattacggaagaagcttaacaaaagaaactataaaggatggagtctccagattttttcataatgggtactgcttaagaaaagatgctgttgctgccagtattcagaagattgagaaaattctgcagtggtttgaaaaccagaagcagcttaatttttacgcaagttcattactctttgtttatgaaggttcatctcagccaaccactacaaaattgaatgacagaactttggcagaaaagtttttgtccaaaggacaactgtcagacacagaagtactagagtacaataataactttcatgtgttaagttccacagctaatggaaaaatagagtcttcagtgggcaaaagcttgtccaagatgtatgcgcgtcacaggaaaatatatacaaaaaagcatcacagtcagacttcattgaaagttgaaaatctggagcaagacaatgggtggaaaagcatgtcacaggaacatttaaatggaaatgtactttcccaactggaaaaagttttctaccatcttcccactggttgccaagagattgctgaagtagaagtgcgaatgatagattttgctcatgtgttccctagcaacacaatagatgagggatatgtttatgggctaaagcatttaatttctgtacttcgaagtattttagacaattgaatcctctgttgcagtctttttaaggggtgggccaatcataatgaagaggggcagtcaatatctgcacctttaatgctatgtaaaaaatttgtattatgagtcgacattttatttgtctttatacttttggaagaatggttaacttttttataatcttactcaggaaaactaactatttgttcattagaaaactatgaagaataaagaaacttaggaatgttaagcagggaatgtggtggtacatggcttaaacatcttttttggctcaagcaaaatgcaaaccattattcagtcattaagagtttagttagctttctgtagccaattcatgaaatctctgtccacccagccttgacaatgagccatatctaaaatattacattattagaacacctaccaaaatctcgaaagcacaggttgatgtccttagtattgctatgtatgaagttactaaaactggagaaaattctacttcagaaataagtactgtttaggttttatattaaaagttcagaccagcatatcaaagggtgctccttagtgaaatgatttagaattgttgcattccaaaagcaggttttctctttaatttttacatctctctctcaaaatattatacttcatgaaaaagacaattgatgtggatgacaacaacaaagtcttgaaattaagggcacactaattgtccttactggggttaggggaagagagatattattttcaaggaacaaaatattttcctttacaatctttcattcatgagaaaattggaatataaatttattacattgtgaaagtatcataaaccatatacctttgtatctaaatgcagcttcaaaaaagtaaataattgaagttttatttctcctctaaataacttgaatttttttctttaaaaatttatgtatttatatgtccccatttagttaagtggtagtgtaaatgtatgttgttaaaaacagtttctcagaattatagtaagcaatgaaagacaatatctaattaggttgttatcaaaaatactgtgtgtaaattagtccgtaatatagggtttggtgcgtatctatattcatgcttctatttcactcttcctcaaaacagttttatattatgttgaccagtgaaattgtaacttaatttcatggggacaggggcagtgctacagttcctggaaaaattagatttgtattatctttgtttcacacccaccaccttaaaaaaaaatcaactagttatttgtcatttaaaacatttaaaactttgagtcttcaaatacatttgatgttaatgctgccattacttgcacttccattcactaataacatttctaggtagttatcagttttgtcatattcctggaaaatattttggggttgtaaattctttctcctctttttcttctggagttacaaattgaatttttaaatccgagcacctttattgtggtgtggagaaaattatcacaattttatgtttattttaccttctcagccttctctgagggcactttgcaaatacctgagtccaaacagaagtaccaactaaatgctctatgaactctatccttagtaaatctattaaacctgaataatttaaaagatcatgttcattttgtaatagcaaaatttgattttaattttttatttagaattggtgtatttatcatagggacttccaatttttcttcactttttgaatggatattggctatagttttatgttttaacgggaatgaatttcaagtcataataatcagaatttttagttttacttttttcttttacaatatggattttgttgttatttggatagtggttcaataaatcttaagctcagataattaaacactattttgaatcttaacaagatactgaggctttttttgtatgggatgatatcaacctatgtacaatgaatttaataaacttaagtattgtcagattttttgcacattttagctcaataaaatcttaatgttcaagatttttttatctgcatttggaaatacaattttgtaaaatcaatgtcttacctttttgatacaatagatcatgttttgtttttaataaagcaagaagcccttttatctgttgtttttcagggaagggattaacatttaattctgtttgtttacatttgttatcattgttatccaatgctcattttatgttgctttataagtaggcttaggtataacagaataagtatctgtttatctaatctacatgtgactatcttagtctctctcggtcacttaatattatgctgaaatttaccactgtggggatgaatgatcgctattcaccaagtatatttgaacatgtaaatgcttaagaaataagcataatgcggatatagtttgggttaataggattctcatagttttttttcccctatgaaacataagtaatgattttagtgtatttcttatggaatacactcatttaaaaaggactttaagaaattgtggatgtgaataatacctttctctaataaaaatttaaattgtataatagttttataatatttacattaattgatattttaatatggatagacattgcatagattcaaataaattaaaatcaatgataaatgctaaatattttatctaaatagtttttcaagaaacagttatggaaatgtgtatattaaatggctctaatgtggagcttgtggtatttcaactcagtattcattattagttgtgtgtctggaaagattgtacttacttttcctctttacactacagtttgctcttatggggctctaaactgtttaactgaagaaccttcgtctgtattttgattgagcataatttagtattttatgatttccaagatgatgttcttatgtctatcaagtctatgtatcaaatttataacatcatttaagaaaaaggaatttccacagatacttcagttgcaattttttgtttcatgctactgaaaatacatttgtttctaggggttggaatattatagaagatgtaggatgaaagaaaacgatagaacaacgaaagaattctgtttatgaaattacaggaattgtgtccactatggtaaagcattgtcattttagtacattttctcttagtagtttggcattttatactttaaaacttgttttgctttaaaaattgtttataatgcttaccttctttctccagtgcctttagtcttgatttgatatgtttgtaccctcagttaccctttctattacatgtttttgatgttttcatagcctaggaaacatcgattcctttttaataattgtcaatctgattatttaaagaggtaacaattatctgttaatgctttggaaaaacaagtagggttgcctttggaggccaggcttcttagttcattcaaaaatattccttggatttatgccatgtattaagcatttttagcccccagtattacaactgtgaaccaaacggataaggccctaaccattttcagcattctctttggatggggtgggattggggacttaattaaaatagagatatagaaaaataggcatctaaataagataataagtgtggggttgaaatgaagcatctaacaatagttgaagttagaagtaatattttacagtattgtaacctctatttaagtttgggtattagttacagatagcataaaaaagccttaatttttcactttccttgctggcaaaggtacatttatttagactgtccatttaaagtaatgtttaacataaacattactgtgaaaaacattccattacatattcccaagcaaatgagctgcatcttctttactgtattttacaatttagtacaacagttttaggcctcaatcttaacatcactggtattttaaatttggcaatgaatatgaaattacttttgacttacagattgattatattattactttgaaaatgcattaatttcttagaaaagtttggagcctctatctttttttgagttaatacttaaattctcattacttatattaatagcctgtactaagtgaaaatattatttatgcaagtaaacaagtcactataggcttttaagacttttctttaattttagattttgtcatcaaagtttaaattttttacctactgtccacttaaatataatttaacagtttgtaaagtgaaatagttttaagtatgatgtatgatgcacctgcatataaatgaaaatggcgtgcacaaagacactttactatgggaactgtactggaagatttatgaaagcatgtgaaattgcacctaaaattgtgttattagtgactataagcagcaatgctaaatttattgtacttgatgaatgaatgtatttagtcacagttactttggtttaaatgtataaatgtctttagggtttttttttaaatgtgtttgtaatttgtactattgtgggggtatacttggactgcaggggttattgtcaatgtgtgatttgtgtttttattttatagaatcatctaatgtgatataccaatttttataagtgatatttacataattctaataactgtatatttgacaacctattaaaatgttttgcattggaa

SEQ ID NO: 142831 - DNA, 4733 bp, Homo sapiens
  Payload ID: 8222
  Gene Symbol: INPPL1
  Gene Name: inositol polyphosphate phosphatase-like 1
  Uniprot ID: O15357
  ENST ID: ENST00000298229
  CDS Start-End: 205-3981
tgaggccggcgctgcaggcagcggcggctgcgcggtgaacgaggcggcctgcgcggcggagtgctgagtcccgatccccggctctgtccggcccacggatcctcaagcccgggccccgggcccggccccagcctcagccctgagcgtctcggggcggatggcgcggggcggcgggggcgggcggtgctgagccctgcgcgggccatggcctcggcctgcggggcgccgggcccggggggcgccctgggcagccaggccccctcctggtaccaccgcgacctgagccgggcggccgcggaggagctgctggcccgggcgggccgcgatggcagcttcctggtccgagacagcgagagcgtggcgggggccttcgcgctctgcgtcctgtatcagaagcatgtgcacacgtatcgcattctgcctgatggagaagatttcttggctgtgcagacctcgcagggtgtgcctgtgcgccgcttccagaccctgggtgagctcatcggcctgtacgcccagcccaaccagggccttgtgtgcgccctgcttcttcctgtagagggtgagcgagagccggacccaccggatgaccgggatgcctcagatggggaggatgagaagcccccgctgcccccgcgctctggctccaccagcatttctgcccccactgggcccagcagtcccctgccagctcctgagactcccacagctccagctgctgagagtgctcccaatgggctgagcaccgtctcgcacgactacctgaaaggcagctatgggctggacctggaagctgtgaggggtggagccagccacctgccccacctcacccgtaccctcgctacctcatgccggaggctgcacagtgaggtggacaaggtcctgtcaggcctggagatcctgtccaaggtgtttgaccagcagagctcgcccatggtgacccgccttttgcagcagcagaacctgccacagacaggggagcaggaactagagagcctggtgctgaagctgtcagtgctaaaggacttcctgtcaggcatccagaagaaggccctgaaggccctacaggacatgagctccacagcacccccagctccgcagccatccacacgtaaggccaagaccatccccgtgcaggcctttgaggtgaagctagatgtgaccctgggtgacctgaccaagattgggaagtcacagaagttcacgctgagcgtggatgtggagggtgggcggctggtgctgctgcggagacagcgggactcccaggaggactggaccaccttcacgcacgaccgcatccgccagctcattaagtcccagcgtgtccagaacaagctgggtgttgtgtttgagaaggagaaggaccggactcagcgcaaggacttcatctttgtcagtgcccggaagcgggaggccttctgccagctgttgcagctcatgaagaacaagcactccaagcaggacgagcccgacatgatctcagtcttcataggcacctggaacatgggaagtgtaccacctccaaaaaacgtgacatcctggttcacatcgaagggtctggggaagaccctggacgaggtcacagtgaccataccccatgacatctatgtctttgggacccaggagaactcagtgggcgaccgcgagtggctggacctactgcgcgggggcctcaaggagcttacggatctggattaccgcccgattgccatgcaatcactgtggaatatcaaggtggcagtgctggtcaagccagagcacgagaaccgtatcagccatgtcagtacgtccagtgtgaagactggcatcgccaacaccctggggaacaagggggctgtgggcgtctccttcatgtttaatggcacctcatttggctttgtgaattgtcacctcacctcgggaaatgagaagacggctcggaggaaccaaaactacttggacatcctgcggctgctctcgctgggcgaccggcagctcaatgcctttgacatctctctgcgtttcacacacctcttctggtttggggacctcaactaccgcctggacatggatatccaggagatcctgaactacatcagcaggaaagagtttgagcccctcctcagggtggaccagctcaacctggagcgggagaagcacaaggtcttccttcgattcagtgaggaggagatctccttcccacccacctaccgctatgagcggggttcccgggacacatatgcctggcacaagcagaagccaactggggtccggaccaatgtgccctcatggtgtgaccggattctgtggaaatcctaccctgaaactcacatcatctgcaattcttatggttgcactgatgacatcgtcaccagcgaccattcccccgtgtttgggacatttgaggttggagttacctcccagttcatctccaagaaagggctctcaaagacttcagaccaggcctacattgagtttgagagcatcgaggccattgtgaagacagccagccgcaccaagttcttcatcgagttctactctacctgcctggaggaatacaagaagagctttgagaatgatgcccagagcagtgacaacatcaacttcctcaaagtgcagtggtcttcacgccagctgcccacgctcaaaccaattctggctgatatcgagtacctgcaggaccagcacctcctgctcacagtcaagtccatggatggctatgaatcctatggggagtgtgtggttgcactcaaatccatgatcggcagcacggcccaacagttcctgaccttcctatcccaccgtggcgaggagacaggcaatatcagaggctccatgaaggtgcgggtgcccacggagcgcctgggcacccgtgagcggctctacgagtggatcagcattgataaggatgaggcaggagcaaagagcaaagccccctctgtgtcccgagggagccaggagcccaggtcagggagccgcaagccagccttcacagaggcctcctgcccgctctccaggttatttgaagaaccagagaaaccgccaccaacggggaggcccccagccccaccccgagcagctccccgggaggagcccttgacccccaggttgaagccagagggagctcctgaaccagaaggggtggcggcccccccacccaagaacagcttcaataaccctgcctactacgtccttgaaggggtcccgcaccagctgctgcccccggagccaccctcgcctgccagggcccctgtcccatctgccaccaagaacaaagtggccattacagtgcctgctccacagcttgggcaccaccggcaccctcgtgtgggagaggggagttcttcagatgaggagtctggaggcacactgccccctccagactttccacctccaccactgccggactcagccatcttcctgccccccagcctggatcctttaccagggccagtggtccggggccgtggtggggctgaggcccgtggcccaccacctcccaaggcccatccaaggcctccactgcccccaggcccctcaccagccagcactttcctgggggaagtggccagtggggatgaccggtcctgctcggtgctgcagatggccaagacgctgagcgaggtggactatgcccctgctgggcctgcacgctcagcgctcctcccaggccccctggagctgcagcccccccggggactgccctcggactatggccggcccctcagcttccctccaccccgcatccgggagagcatccaggaagacctggcagaggaggctccgtgcctgcagggcgggcgggccagcgggctgggcgaggcaggcatgagtgcctggctgcgggccatcggcttggagcgctatgaggagggcctggtgcataatggctgggacgacctggagtttctcagtgacatcaccgaggaggacttggaggaggctggggtgcaggacccggctcacaagcgcctccttctggacaccctgcagctcagcaagtgatagcggaggcaccacgaagctgtgaactcagagcccctccctgctaccaaggcccagctatggccccagggttgaaaagttatgagggtcagggcagtatctctctgcctatttattggggtgcctatttattggggatctgcattccccgctgcccaatcatttgcaatgccctaattagggcatcctgcccctcgccttttaggctcaggacggaaggtcagttgccatggttaccgaggaccctggttactctggtgctgtcctgttttactggaccccgcctcccagccccaggggtgcctgtgggggtccatttgggtacgtctgggcccccactttcaccagtttctgcggccttccaccgggcctgaaccacagcggaggagctccgctaagacctccccacccccgctgggggtgggggcgggtgtccgtccggaaatgaaggaatagcccgaggaccgggctggggtttatttaaactgttctgtgtgggtctggggagggagagcaccttaatattattggggttggttggggtggggcaggatctcagccataaagtgccagtttgcttagttctcactgtctcctggtctgtgctgccctgctctggggatgcacggcggcagggtgggggagggaggttcctcgcaggtctcagcccgggacagggtcttgcaagcagcctcctgggcagtcgtaagggttgcggcgtgatgtcttcaataaattaagttttatttgga

SEQ ID NO: 142832 - DNA, 717 bp, Homo sapiens
  Payload ID: 8222
  Gene Symbol: INPPL1
  Gene Name: inositol polyphosphate phosphatase-like 1
  ENST ID: ENST00000320683
  CDS Start-End: 1-449
ggcctgcacgctcagcgctcctcccaggccccctggagctgcagcccccccggggactgccctcggactatggccggcccctcagcttccctccaccccgcatccgggagagcatccaggaagacctggcagaggaggctccgtgcctgcagggcgggcgggccagcgggctgggcgaggcaggcatgagtgcctggctgcgggccatcggcttggagcgctatgaggagggcctggtgcataatggctgggacgacctggagtttctcaggtgggggaggggctggccccgggggcggagctggggccctcaggatccccttgcccatctcacttcccagcctgttttactccacagtgacatcaccgaggaggacttggaggaggctggggtgcaggacccggctcacaagcgcctccttctggacaccctgcagctcagcaagtgatagcggaggcaccacgaagctgtgaactcagagcccctccctgctaccaaggcccagctatggccccagggttgaaaagttatgagggtcagggcagtatctctctgcctatttattggggtgcctatttattggggatctgcattccccgctgcccaatcatttgcaatgccctaattagggcatcctgcccctcgccttttaggctcaggacggaaggtcagttgccatggttaccgaggaccctggttactctggtgctgtcctg

SEQ ID NO: 142833 - DNA, 353 bp, Homo sapiens
  Payload ID: 8222
  Gene Symbol: INPPL1
  Gene Name: inositol polyphosphate phosphatase-like 1
  ENST ID: ENST00000535985
  CDS Start-End: 1-125
cgaccattcccccgtgtttgggacatttgaggttggagttacctcccagttcatctccaagaaagggctctcaaagacttcagaccaggcctacattgagtttgagagcatcgaggccattgtgaagacagccagccgcaccaagttcttcatcgagttctactctacctgcctggaggaatacaagaagagctttgagaatgatgcccagagcagtgacaacatcaacttcctcaaagtgcagtggtcttcacgccagctgcccacgcccgggacagggtcttgcaagcagcctcctgggcagtcgtaagggttgcggcgtgatgtcttcaataaattaagttttatttgga

SEQ ID NO: 142834 - DNA, 741 bp, Homo sapiens
  Payload ID: 8222
  Gene Symbol: INPPL1
  Gene Name: inositol polyphosphate phosphatase-like 1
  ENST ID: ENST00000540329
  CDS Start-End: 361-741
ccggacccaccggatgaccgggatgcctcagatggggaggatgagaagcccccgctgcccccgcgctctggctccaccagcatttctgcccccactgggcccagcagtcccctgccagctcctgagactcccacagctccagctgctgagagtgctcccaatgggctgagcaccgtctcgcacgactacctgaaaggcagctatgggctggacctggaagctgtgaggggtggagccagccacctgccccacctcacccgtaccctcgctacctcatgccggaggctgcacagtgaggtggacaaggtcctgtcaggcctggagatcctgtccaaggtgtttgaccagcagagctcgcccatggtgacccgccttttgcagcagcaggccctgaaggccctacaggacatgagctccacagcacccccagctccgcagccatccacacgtaaggccaagaccatccccgtgcaggcctttgaggtgaagctagatgtgaccctgggtgacctgaccaagattgggaagtcacagaagttcacgctgagcgtggatgtggagggtgggcggctggtgctgctgcggagacagcgggactcccaggaggactggaccaccttcacgcacgaccgcatccgccagctcattaagtcccagcgtgtccagaacaagctgggtgttgtgtttgagaaggagaaggaccggactcagcgcaaggacttcatctttgtcagtgcccgg

SEQ ID NO: 142835 - DNA, 275 bp, Homo sapiens
  Payload ID: 8222
  Gene Symbol: INPPL1
  Gene Name: inositol polyphosphate phosphatase-like 1
  ENST ID: ENST00000543234
  CDS Start-End: 223-275
ccggagcagcccgggagttgaggccggcgctgcaggcagcggcggctgcgcggtgaacgaggcggcctgcgcggcggagtgctgagtcccgatccccggctctgtccggcccacggatcctcaagcccgggccccgggcccggccccagcctcagccctgagcgtctcggggcggatggcgcggggcggcgggggcgggcggtgctgagccctgcgcgggccatggcctcggcctgcggggcgccgggcccggggggcgccctgggcagccaggc

SEQ ID NO: 142836 - DNA, 375 bp, Homo sapiens
  Payload ID: 8222
  Gene Symbol: INPPL1
  Gene Name: inositol polyphosphate phosphatase-like 1
  ENST ID: ENST00000540973
  CDS Start-End: 309-375
atccccattttccagagcgggaagccgacgctcaaccccgcgccgcgacttgcccgaggtcacccagtgggccagcggctccgggaccgaggcgcggggcgggttgaggccggcgctgcaggcagcggcggctgcgcggtgaacgaggcggcctgcgcggcggagtgctgagtcccgatccccggctctgtccggcccacggatcctcaagcccgggccccgggcccggccccagcctcagccctgagcgtctcggggcggatggcgcggggcggcgggggcgggcggtgctgagccctgcgcgggccatggcctcggcctgcggggcgccgggcccggggggcgccctgggcagccaggccccctcctggtacc

SEQ ID NO: 142837 - DNA, 856 bp, Homo sapiens
  Payload ID: 8222
  Gene Symbol: INPPL1
  Gene Name: inositol polyphosphate phosphatase-like 1
  ENST ID: ENST00000541752
  CDS Start-End: 1-594
gtccttgaaggggtcccgcaccagctgctgcccccggagccaccctcgcctgccagggcccctgtcccatctgccaccaagaacaaagtggccattacagtgcctgctccacagcttgggcaccaccggcaccctcgtgtgggagaggggagttcttcagatgaggagtctggaggcacactgccccctccagactttccacctccaccactgccggactcagccatcttcctgccccccagcctggatcctttaccagggccagtggtccggggccgtggtggggctgaggcccgtggcccaccacctcccaaggcccatccaaggcctccactgcccccaggcccctcaccagccagcactttcctgggggaagtggccagtggggatgaccggtcctgctcggtgctgcagatggccaagacgctgagcgaggtggactatgcccctgctgggcctgcacgctcagcgctcctcccaggccccctggagctgcagcccccccggggactgccctcggactatggccggcccctcagcttccctccaccccgcatccgggagagcatccaggaagacctggcagaggagtgacatcaccgaggaggacttggaggaggctggggtgcaggacccggctcacaagcgcctccttctggacaccctgcagctcagcaagtgatagcggaggcaccacgaagctgtgaactcagagcccctccctgctaccaaggcccagctatggccccagggttgaaaagttatgagggtcagggcagtatctctctgcctatttattggggtgcctatttattggggatctgcattccccgctgcccaatcatttgcaatgccc

SEQ ID NO: 142838 - DNA, 4656 bp, Homo sapiens
  Payload ID: 8222
  Gene Symbol: INPPL1
  Gene Name: inositol polyphosphate phosphatase-like 1
  Uniprot ID: O15357
  ENST ID: ENST00000538751
  CDS Start-End: 854-3904
tttagacagctgtggaggccacaaaagagctccctgttgcttctcaggccctgccctgtggtgggtgtggagtctgtgtaggtctggtggggagacgggggtgttctggtcattcctgcccaataggcaacaccaggagggtggaagtggaccggccacatcattaaccctgtgcagcctgggcaggtggttttagggaaaccaagctgagggggttggggtgctgagcttgctggcaggaggaaggggtgctttgggtcttagaccccagcctgggggtgacagattctggccctgccttggcatcaggtatcagaagcatgtgcacacgtatcgcattctgcctgatggagaagatttcttggctgtgcagacctcgcagggtgtgcctgtgcgccgcttccagaccctgggtgagctcatcggcctgtacgcccagcccaaccagggccttgtgtgcgccctgcttcttcctgtagagggtgagcgagagccggacccaccggatgaccgggatgcctcagatggggaggatgagaagcccccgctgcccccgcgctctggctccaccagcatttctgcccccactgggcccagcagtcccctgccagctcctgagactcccacagctccagctgctgagagtgctcccaatgggctgagcaccgtctcgcacgactacctgaaaggcagctatgggctggacctggaagctgtgaggggtggagccagccacctgccccacctcacccgtaccctcgctacctcatgccggaggctgcacagtgaggtggacaaggtcctgtcaggcctggagatcctgtccaaggtgtttgaccagcagagctcgcccatggtgacccgccttttgcagcagcagaacctgccacagacaggggagcaggaactagagagcctggtgctgaagctgtcagtgctaaaggacttcctgtcaggcatccagaagaaggccctgaaggccctacaggacatgagctccacagcacccccagctccgcagccatccacacgtaaggccaagaccatccccgtgcaggcctttgaggtgaagctagatgtgaccctgggtgacctgaccaagattgggaagtcacagaagttcacgctgagcgtggatgtggagggtgggcggctggtgctgctgcggagacagcgggactcccaggaggactggaccaccttcacgcacgaccgcatccgccagctcattaagtcccagcgtgtccagaacaagctgggtgttgtgtttgagaaggagaaggaccggactcagcgcaaggacttcatctttgtcagtgcccggaagcgggaggccttctgccagctgttgcagctcatgaagaacaagcactccaagcaggacgagcccgacatgatctcagtcttcataggcacctggaacatgggaagtgtaccacctccaaaaaacgtgacatcctggttcacatcgaagggtctggggaagaccctggacgaggtcacagtgaccataccccatgacatctatgtctttgggacccaggagaactcagtgggcgaccgcgagtggctggacctactgcgcgggggcctcaaggagcttacggatctggattaccgcccgattgccatgcaatcactgtggaatatcaaggtggcagtgctggtcaagccagagcacgagaaccgtatcagccatgtcagtacgtccagtgtgaagactggcatcgccaacaccctggggaacaagggggctgtgggcgtctccttcatgtttaatggcacctcatttggctttgtgaattgtcacctcacctcgggaaatgagaagacggctcggaggaaccaaaactacttggacatcctgcggctgctctcgctgggcgaccggcagctcaatgcctttgacatctctctgcgtttcacacacctcttctggtttggggacctcaactaccgcctggacatggatatccaggagatcctgaactacatcagcaggaaagagtttgagcccctcctcagggtggaccagctcaacctggagcgggagaagcacaaggtcttccttcgattcagtgaggaggagatctccttcccacccacctaccgctatgagcggggttcccgggacacatatgcctggcacaagcagaagccaactggggtccggaccaatgtgccctcatggtgtgaccggattctgtggaaatcctaccctgaaactcacatcatctgcaattcttatggttgcactgatgacatcgtcaccagcgaccattcccccgtgtttgggacatttgaggttggagttacctcccagttcatctccaagaaagggctctcaaagacttcagaccaggcctacattgagtttgagagcatcgaggccattgtgaagacagccagccgcaccaagttcttcatcgagttctactctacctgcctggaggaatacaagaagagctttgagaatgatgcccagagcagtgacaacatcaacttcctcaaagtgcagtggtcttcacgccagctgcccacgctcaaaccaattctggctgatatcgagtacctgcaggaccagcacctcctgctcacagtcaagtccatggatggctatgaatcctatggggagtgtgtggttgcactcaaatccatgatcggcagcacggcccaacagttcctgaccttcctatcccaccgtggcgaggagacaggcaatatcagaggctccatgaaggtgcgggtgcccacggagcgcctgggcacccgtgagcggctctacgagtggatcagcattgataaggatgaggcaggagcaaagagcaaagccccctctgtgtcccgagggagccaggagcccaggtcagggagccgcaagccagccttcacagaggcctcctgcccgctctccaggttatttgaagaaccagagaaaccgccaccaacggggaggcccccagccccaccccgagcagctccccgggaggagcccttgacccccaggttgaagccagagggagctcctgaaccagaaggggtggcggcccccccacccaagaacagcttcaataaccctgcctactacgtccttgaaggggtcccgcaccagctgctgcccccggagccaccctcgcctgccagggcccctgtcccatctgccaccaagaacaaagtggccattacagtgcctgctccacagcttgggcaccaccggcaccctcgtgtgggagaggggagttcttcagatgaggagtctggaggcacactgccccctccagactttccacctccaccactgccggactcagccatcttcctgccccccagcctggatcctttaccagggccagtggtccggggccgtggtggggctgaggcccgtggcccaccacctcccaaggcccatccaaggcctccactgcccccaggcccctcaccagccagcactttcctgggggaagtggccagtggggatgaccggtcctgctcggtgctgcagatggccaagacgctgagcgaggtggactatgcccctgctgggcctgcacgctcagcgctcctcccaggccccctggagctgcagcccccccggggactgccctcggactatggccggcccctcagcttccctccaccccgcatccgggagagcatccaggaagacctggcagaggaggctccgtgcctgcagggcgggcgggccagcgggctgggcgaggcaggcatgagtgcctggctgcgggccatcggcttggagcgctatgaggagggcctggtgcataatggctgggacgacctggagtttctcagtgacatcaccgaggaggacttggaggaggctggggtgcaggacccggctcacaagcgcctccttctggacaccctgcagctcagcaagtgatagcggaggcaccacgaagctgtgaactcagagcccctccctgctaccaaggcccagctatggccccagggttgaaaagttatgagggtcagggcagtatctctctgcctatttattggggtgcctatttattggggatctgcattccccgctgcccaatcatttgcaatgccctaattagggcatcctgcccctcgccttttaggctcaggacggaaggtcagttgccatggttaccgaggaccctggttactctggtgctgtcctgttttactggaccccgcctcccagccccaggggtgcctgtgggggtccatttgggtacgtctgggcccccactttcaccagtttctgcggccttccaccgggcctgaaccacagcggaggagctccgctaagacctccccacccccgctgggggtgggggcgggtgtccgtccggaaatgaaggaatagcccgaggaccgggctggggtttatttaaactgttctgtgtgggtctggggagggagagcaccttaatattattggggttggttggggtggggcaggatctcagccataaagtgccagtttgcttagttctcactgtctcctggtctgtgctgccctgctctggggatgcacggcggcagggtgggggagggaggttcctcgcaggtctcagcccgggacagggtcttgcaagcagcctcctgggcagtcgtaagggttgcggcgtgatgtcttcaataaattaagttttatttgga

SEQ ID NO: 142839 - DNA, 550 bp, Homo sapiens
  Payload ID: 8222
  Gene Symbol: INPPL1
  Gene Name: inositol polyphosphate phosphatase-like 1
  ENST ID: ENST00000537656
  CDS Start-End: 450-550
tgagacccccatcccatccactgaacaggagaccctttctcctctgagaactatttccctaccaaaggtggggaggccttctaagaccccaccagggacccccaccccacctcagcccagaggcagataacctgatccatcccgccctggttgccacaggtactatctcctctagggatggggcagaggtgctgggacaggtcagcaggacctccactgacttcttaacccctccccaaagtgctcccaatgggctgagcaccgtctcgcacgactacctgaaaggcagctatgggctggacctggaagctgtgaggggtggagccagccacctgccccacctcacccgtaccctcgctacctcatgccggaggctgcacagtgaggtggacaaggtcctgtcaggcctggagatcctgtccaaggtgtttgaccagcagagctcgcccatggtgacccgccttttgcagcagcagaacctgccacagacaggggagcaggaactagagagcctggtgctgaagctgtcagtgctaaaggacttcctgtc

SEQ ID NO: 142840 - DNA, 4649 bp, Homo sapiens
  Payload ID: 8222
  Gene Symbol: INPPL1
  Gene Name: inositol polyphosphate phosphatase-like 1
  ENST ID: ENST00000541756
  CDS Start-End: 321-3761
tttagacagctgtggaggccacaaaagagctccctgttgcttctcaggccctgccctgtggtgggtgtggagtctgtgtaggtctggtggggagacgggggtgttctggtcattcctgcccaataggcaacaccaggagggtggaagtggaccggccacatcattaaccctgtgcagcctgggcaggtggttttagggaaaccaagctgagggggttggggtgctgagcttgctggcaggaggaaggggtgctttgggtcttagaccccagcctgggggtgacagattctggccctgccttggcatcaggtatcagaagcatgtgcacacgtatcgcattctgcctgatggagaagatttcttggctgtgcagacctcgcagggtgtgcctgtgcgccgcttccagaccctgggtgagctcatcggcctgtacgcccagcccaaccagggccttgtgtgcgccctgcttcttcctgagggtgagcgagagccggacccaccggatgaccgggatgcctcagatggggaggatgagaagcccccgctgcccccgcgctctggctccaccagcatttctgcccactgggcccagcagtcccctgccagctcctgagactcccacagctccagctgctgagagtgctcccaatgggctgagcaccgtctcgcacgactacctgaaaggcagctatgggctggacctggaagctgtgaggggtggagccagccacctgccccacctcacccgtaccctcgctacctcatgccggaggctgcacagtgaggtggacaaggtcctgtcaggcctggagatcctgtccaaggtgtttgaccagcagagctcgcccatggtgacccgccttttgcagcagcagaacctgccacagacaggggagcaggaactagagagcctggtgctgaagctgtcagtgctaaaggacttcctgtcaggcatccagaagaaggccctgaaggccctacaggacatgagctccacagcacccccagctccgcagccatccacacgtaaggccaagaccatccccgtgcaggcctttgaggtgaagctagatgtgaccctgggtgacctgaccaagattgggaagtcacagaagttcacgctgagcgtggatgtggagggtgggcggctggtgctgctgcggagacagcgggactcccaggaggactggaccaccttcacgcacgaccgcatccgccagctcattaagtcccagcgtgtccagaacaagctgggtgttgtgtttgagaaggagaaggaccggactcagcgcaaggacttcatctttgtcagtgcccggaagcgggaggccttctgccagctgttgcagctcatgaagaacaagcactccaagcaggacgagcccgacatgatctcagtcttcataggcacctggaacatgggaagtgtaccacctccaaaaaacgtgacatcctggttcacatcgaagggtctggggaagaccctggacgaggtcacagtgaccataccccatgacatctatgtctttgggacccaggagaactcagtgggcgaccgcgagtggctggacctactgcgcgggggcctcaaggagcttacggatctggattaccgcccgattgccatgcaatcactgtggaatatcaaggtggcagtgctggtcaagccagagcacgagaaccgtatcagccatgtcagtacgtccagtgtgaagactggcatcgccaacaccctggggaacaagggggctgtgggcgtctccttcatgtttaatggcacctcatttggctttgtgaattgtcacctcacctcgggaaatgagaagacggctcggaggaaccaaaactacttggacatcctgcggctgctctcgctgggcgaccggcagctcaatgcctttgacatctctctgcgtttcacacacctcttctggtttggggacctcaactaccgcctggacatggatatccaggagatcctgaactacatcagcaggaaagagtttgagcccctcctcagggtggaccagctcaacctggagcgggagaagcacaaggtcttccttcgattcagtgaggaggagatctccttcccacccacctaccgctatgagcggggttcccgggacacatatgcctggcacaagcagaagccaactggggtccggaccaatgtgccctcatggtgtgaccggattctgtggaaatcctaccctgaaactcacatcatctgcaattcttatggttgcactgatgacatcgtcaccagcgaccattcccccgtgtttgggacatttgaggttggagttacctcccagttcatctccaagaaagggctctcaaagacttcagaccaggcctacattgagtttgagagcatcgaggccattgtgaagacagccagccgcaccaagttcttcatcgagttctactctacctgcctggaggaatacaagaagagctttgagaatgatgcccagagcagtgacaacatcaacttcctcaaagtgcagtggtcttcacgccagctgcccacgctcaaaccaattctggctgatatcgagtacctgcaggaccagcacctcctgctcacagtcaagtccatggatggctatgaatcctatggggagtgtgtggttgcactcaaatccatgatcggcagcacggcccaacagttcctgaccttcctatcccaccgtggcgaggagacaggcaatatcagaggctccatgaaggtgcgggtgcccacggagcgcctgggcacccgtgagcggctctacgagtggatcagcattgataaggatgaggcaggagcaaagagcaaagccccctctgtgtcccgagggagccaggagcccaggtcagggagccgcaagccagccttcacagaggcctcctgcccgctctccaggttatttgaagaaccagagaaaccgccaccaacggggaggcccccagccccaccccgagcagctccccgggaggagcccttgacccccaggttgaagccagagggagctcctgaaccagaaggggtggcggcccccccacccaagaacagcttcaataaccctgcctactacgtccttgaaggggtcccgcaccagctgctgcccccggagccaccctcgcctgccagggcccctgtcccatctgccaccaagaacaaagtggccattacagtgcctgctccacagcttgggcaccaccggcaccctcgtgtgggagaggggagttcttcagatgaggagtctggaggcacactgccccctccagactttccacctccaccactgccggactcagccatcttcctgccccccagcctggatcctttaccagggccagtggtccggggccgtggtggggctgaggcccgtggcccaccacctcccaaggcccatccaaggcctccactgcccccaggcccctcaccagccagcactttcctgggggaagtggccagtggggatgaccggtcctgctcggtgctgcagatggccaagacgctgagcgaggtggactatgcccctgctgggcctgcacgctcagcgctcctcccaggccccctggagctgcagcccccggggactgccctcggactatggccggcccctcagcttccctccaccccgcatccgggagagcatccaggaagacctggcagaggaggctccgtgcctgcagggcgggcgggccagcgggctgggcgaggcaggcatgagtgcctggctgcgggccatcggcttggagcgctatgaggagggcctggtgcataatggctgggacgacctggagtttctcagtgacatcaccgaggaggacttggaggaggctggggtgcaggacccggctcacaagcgcctccttctggacaccctgcagctcagcaagtgatagcggaggcaccacgaagctgtgaactcagagcccctccctgctaccaaggcccagctatggccccagggttgaaaagttatgagggtcagggcagtatctctctgcctatttattggggtgcctatttattggggatctgcattccccgctgcccaatcatttgcaatgccctaattagggcatcctgcccctcgccttttaggctcaggacggaaggtcagttgccatggttaccgaggaccctggttactctggtgctgtcctgttttactggaccccgcctcccagccccaggggtgcctgtgggggtccatttgggtacgtctgggcccccactttcaccagtttctgcggccttccaccgggcctgaaccacagcggaggagctccgctaagacctccccacccccgctgggggtgggggcgggtgtccgtccggaaatgaaggaatagcccgaggaccgggctggggtttatttaaactgttctgtgtgggtctggggagggagagcaccttaatattattggggttggttggggtggggcaggatctcagccataaagtgccagtttgcttagttctcactgtctcctggtctgtgctgccctgctctggggatgcacggcggcagggtgggggagggaggttcctcgcaggtctcagcccgggacagggtcttgcaagcagcctcctgggcagtcgtaagggttgcggcgtgatgtcttcaataaattaagttttatttgga

SEQ ID NO: 142841 - DNA, 1919 bp, Homo sapiens
  Payload ID: 8223
  Gene Symbol: INPP1
  Gene Name: inositol polyphosphate-1-phosphatase
  Uniprot ID: P49441
  ENST ID: ENST00000322522
  CDS Start-End: 457-1656
ctctgaatcatcgcgctccacttgtgacgtcgcggacgcccggctcgggcaggcgtggggggcccgcgcgtcccgggagccccgaggcggcagcgcgcgtttccacgccgcggtcccgcgggaaagccgggggcggcggcctggctgaggccaagctcggatccggtgccgagccaagcggggccgtgcgtcgccggggcttcgccttcgctcgcgtgacctccgccgtcctccccaaccctcgtcctctggccgcgcctgcggccgcacgcccagcgcccctcgcctaacctcgcgcccgggccgcgcctcctcctcctcctgctccccgccgcttccgtttctcgagggaaaggctgctgcctcctgctctgtcctcatccccggcttagctgacggcccagagggtgggtgccaattccaccagcagctgcaactgaaaagcaaggttcagaaatgtcagatatcctccgggagctgctctgtgtctctgagaaggctgctaacattgcccgggcgtgcagacagcaggaagccctcttccagctgctgatcgaagaaaagaaagagggagaaaagaacaagaagtttgcagttgacttcaagacgctggctgatgtactggtacaggaagttataaaacagaatatggagaacaagtttccaggcttggaaaaaaatatttttggagaagaatccaatgagtttactaatgactggggggaaaagattaccttgaggttgtgttcaacagaggaggaaacagcagagcttcttagcaaagtcctcaatggtaacaaggtggcatctgaagcattagccagggttgttcatcaggatgttgcctttactgacccaactctggattccacagagatcaatgttccacaggacattttgggaatttgggtggaccccatagattcaacttatcagtatataaaaggttctgctgacattaaatccaaccagggaatcttcccctgtggacttcagtgtgtcaccattttaattggtgtctatgacatacagacaggggttcccctgatgggagtcatcaatcaaccttttgtgtcacgagatccaaacaccctcaggtggaaaggacagtgctattggggcctttcttacatggggaccaacatgcattcactacagctcaccatctctagaagaaacggcagtgaaacacacactggaaacaccggctctgaggcagcattctcccccagtttttcagccgtaattagtacaagtgaaaaggagactatcaaagctgcattgtcacgtgtgtgtggagatcgcatatttggggcagctggggctggttataagagcctatgtgttgtccaaggcctcgttgacatttacatcttttcagaagataccacattcaaatgggactcttgtgctgctcatgccatactgagggccatgggtgggggaatagtagacttgaaagaatgcttagaaagaaatccagaaacagggcttgatttgccacagttggtgtaccacgtggaaaatgagggtgctgctggggtggatcggtgggccaacaagggaggactcattgcatacagatccaggaagcggctggagacattcctgagcctcctggtccaaaacctggcacctgcagagacgcatacctagaggaactctaaccccggtgtacctgtataaactgaactgtgaaactgtttcggttatctctgtcttttgaggatggctttgtcctgttgctggttaacattcaccttcctcttttgaggagtatttttccattatgtattcataataatgttaatttcaataaatgacattcatgcagcaattatattggtgtatgaaattcttacagtgaatattgtgctgttagtgctgcttgaaacatttcaataaaatattgaccagga

SEQ ID NO: 142842 - DNA, 2162 bp, Homo sapiens
  Payload ID: 8223
  Gene Symbol: INPP1
  Gene Name: inositol polyphosphate-1-phosphatase
  Uniprot ID: P49441
  ENST ID: ENST00000392329
  CDS Start-End: 701-1900
gaatggaggaggaagatttaaaagtgaattcgtgggcggcgacaaggaaacagcagccgtggccaagctgaccccagagcccttcccttcctggccctccctctgaatcatcgcgctccacttgtgacgtcgcggacgcccggctcgggcaggcgtggggggcccgcgcgtcccgggagccccgaggcggcagcgcgcgtttccacgccgcggtcccgcgggaaagccgggggcggcggcctggctgaggccaagctcggatccggtgccgagccaagcggggccgtgcgtcgccggggcttcgccttcgctcgcgtgacctccgccgtcctccccaaccctcgtcctctggccgcgcctgcggccgcacgcccagcgcccctcgcctaacctcgcgcccgggccgcgcctcctcctcctcctgctccccgccgcttccgtttctcgagggaaaggctgctgcctcctgctctgtcctcatccccggcttagtccttcagagcttacatcatgtggccgagtttatatacctgattggcaaaacagagcctaagaaccagctctcctgtatcccaagcaaggctctttctaccgcacaccctgcaggcccatccaggcccatccagacaataaacactgacggcccagagggtgggtgccaattccaccagcagctgcaactgaaaagcaaggttcagaaatgtcagatatcctccgggagctgctctgtgtctctgagaaggctgctaacattgcccgggcgtgcagacagcaggaagccctcttccagctgctgatcgaagaaaagaaagagggagaaaagaacaagaagtttgcagttgacttcaagacgctggctgatgtactggtacaggaagttataaaacagaatatggagaacaagtttccaggcttggaaaaaaatatttttggagaagaatccaatgagtttactaatgactggggggaaaagattaccttgaggttgtgttcaacagaggaggaaacagcagagcttcttagcaaagtcctcaatggtaacaaggtggcatctgaagcattagccagggttgttcatcaggatgttgcctttactgacccaactctggattccacagagatcaatgttccacaggacattttgggaatttgggtggaccccatagattcaacttatcagtatataaaaggttctgctgacattaaatccaaccagggaatcttcccctgtggacttcagtgtgtcaccattttaattggtgtctatgacatacagacaggggttcccctgatgggagtcatcaatcaaccttttgtgtcacgagatccaaacaccctcaggtggaaaggacagtgctattggggcctttcttacatggggaccaacatgcattcactacagctcaccatctctagaagaaacggcagtgaaacacacactggaaacaccggctctgaggcagcattctcccccagtttttcagccgtaattagtacaagtgaaaaggagactatcaaagctgcattgtcacgtgtgtgtggagatcgcatatttggggcagctggggctggttataagagcctatgtgttgtccaaggcctcgttgacatttacatcttttcagaagataccacattcaaatgggactcttgtgctgctcatgccatactgagggccatgggtgggggaatagtagacttgaaagaatgcttagaaagaaatccagaaacagggcttgatttgccacagttggtgtaccacgtggaaaatgagggtgctgctggggtggatcggtgggccaacaagggaggactcattgcatacagatccaggaagcggctggagacattcctgagcctcctggtccaaaacctggcacctgcagagacgcatacctagaggaactctaaccccggtgtacctgtataaactgaactgtgaaactgtttcggttatctctgtcttttgaggatggctttgtcctgttgctggttaacattcaccttcctcttttgaggagtatttttccattatgtattcataataatgttaatttcaataaatgacattcatgcagcaattatattggtgtatgaaattcttacagtgaatattgtgctgttagtgctgcttgaaacatttcaataaaatattgaccagg

SEQ ID NO: 142843 - DNA, 631 bp, Homo sapiens
  Payload ID: 8223
  Gene Symbol: INPP1
  Gene Name: inositol polyphosphate-1-phosphatase
  ENST ID: ENST00000409027
  CDS Start-End: 166-631
agattactgcagcatttgtgctgaaactcaccagggttaaattgatgagctttctgcgtgaaagaagggagtggtggtgatttccggagcttgtagccaggctgacggcccagagggtgggtgccaattccaccagcagctgcaactgaaaagcaaggttcagaaatgtcagatatcctccgggagctgctctgtgtctctgagaaggctgctaacattgcccgggcgtgcagacagcaggaagccctcttccagctgctgatcgaagaaaagaaagagggagaaaagaacaagaagtttgcagttgacttcaagacgctggctgatgtactggtacaggaagttataaaacagaatatggagaacaagtttccaggcttggaaaaaaatatttttggagaagaatccaatgagtttactaatgactggggggaaaagattaccttgaggttgtgttcaacagaggaggaaacagcagagcttcttagcaaagtcctcaatggtaacaaggtggcatctgaagcattagccagggttgttcatcaggatgttgcctttactgacccaactctggattccacagagatcaatgttccacaggacattttgggaatttgggtggaccccatag

SEQ ID NO: 142844 - DNA, 613 bp, Homo sapiens
  Payload ID: 8223
  Gene Symbol: INPP1
  Gene Name: inositol polyphosphate-1-phosphatase
  ENST ID: ENST00000413239
  CDS Start-End: 349-613
gcgcctcctcctcctcctgctccccgccgcttccgtttctcgagggaaaggctgctgcctcctgctctgtcctcatccccggcttagtccttcagagcttacatcatgtggccgagtttatatacctgattggcaaaacagagcctaagaaccagctctcctgtatcccaagcaaggctctttctaccgcacaccctgcaggcccatccaggcccatccagacaataaacaggtgaaagaaagcactacttcaatattgctgctaagcatatgatcattctaagctgacggcccagagggtgggtgccaattccaccagcagctgcaactgaaaagcaaggttcagaaatgtcagatatcctccgggagctgctctgtgtctctgagaaggctgctaacattgcccgggcgtgcagacagcaggaagccctcttccagctgctgatcgaagaaaagaaagagggagaaaagaacaagaagtttgcagttgacttcaagacgctggctgatgtactggtacaggaagttataaaacagaatatggagaacaagtttccaggcttggaaaaaaatatttttggagaagaatccaatgagtttactaatgactggg

SEQ ID NO: 142845 - DNA, 626 bp, Homo sapiens
  Payload ID: 8223
  Gene Symbol: INPP1
  Gene Name: inositol polyphosphate-1-phosphatase
  ENST ID: ENST00000458647
  CDS Start-End: 198-626
tgtcctcatccccggcttaggtaacacgttttcctccttacgacacccaccacagggtccccgcgccgctgcccctcctccttggatctggggcccgggctggtgagcggcgcgcgccgtcgcctctccgcggctgacggcccagagggtgggtgccaattccaccagcagctgcaactgaaaagcaaggttcagaaatgtcagatatcctccgggagctgctctgtgtctctgagaaggctgctaacattgcccgggcgtgcagacagcaggaagccctcttccagctgctgatcgaagaaaagaaagagggagaaaagaacaagaagtttgcagttgacttcaagacgctggctgatgtactggtacaggaagttataaaacagaatatggagaacaagtttccaggcttggaaaaaaatatttttggagaagaatccaatgagtttactaatgactggggggaaaagattaccttgaggttgtgttcaacagaggaggaaacagcagagcttcttagcaaagtcctcaatggtaacaaggtggcatctgaagcattagccagggttgttcatcaggatgttgcctttactgacccaactctggattccacagagatcaatgtt

SEQ ID NO: 142846 - DNA, 840 bp, Homo sapiens
  Payload ID: 8223
  Gene Symbol: INPP1
  Gene Name: inositol polyphosphate-1-phosphatase
  ENST ID: ENST00000423767
  CDS Start-End: 205-840
gtgagtcgatggcgccgggagggttcctcgcctctgcgcgccggcctgcgaggtccctgccccggcagcgaggccgcccccggccgggcccggccaggcatgcccggcatcgccgctgcagccagcgcggaggggagctcctgacggcccagagggtgggtgccaattccaccagcagctgcaactgaaaagcaaggttcagaaatgtcagatatcctccgggagctgctctgtgtctctgagaaggctgctaacattgcccgggcgtgcagacagcaggaagccctcttccagctgctgatcgaagaaaagaaagagggagaaaagaacaagaagtttgcagttgacttcaagacgctggctgatgtactggtacaggaagttataaaacagaatatggagaacaagtttccaggcttggaaaaaaatatttttggagaagaatccaatgagtttactaatgactggggggaaaagattaccttgaggttgtgttcaacagaggaggaaacagcagagcttcttagcaaagtcctcaatggtaacaaggtggcatctgaagcattagccagggttgttcatcaggatgttgcctttactgacccaactctggattccacagagatcaatgttccacaggacattttgggaatttgggtggaccccatagattcaacttatcagtatataaaaggttctgctgacattaaatccaaccagggaatcttcccctgtggacttcagtgtgtcaccattttaattggtgtctatgacatacagacaggggttcccctgatgggagtcatcaatcaaccttttgtgtcacgagatccaaacacc

SEQ ID NO: 142847 - DNA, 797 bp, Homo sapiens
  Payload ID: 8223
  Gene Symbol: INPP1
  Gene Name: inositol polyphosphate-1-phosphatase
  ENST ID: ENST00000444194
  CDS Start-End: 226-797
gggaaaggctgctgcctcctgctctgtcctcatccccggcttaggtaacacgttttcctccttacgacacccaccacagggtccccgcgccgctgcccctcctccttggatctggggcccgggctggtgagcggcgcgcgccgtcgcctctccgcgggtagctgacggcccagagggtgggtgccaattccaccagcagctgcaactgaaaagcaaggttcagaaatgtcagatatcctccgggagctgctctgtgtctctgagaaggctgctaacattgcccgggcgtgcagacagcaggaagccctcttccagctgctgatcgaagaaaagaaagagggagaaaagaacaagaagtttgcagttgacttcaagacgctggctgatgtactggtacaggaagttataaaacagaatatggagaacaagtttccaggcttggaaaaaaatatttttggagaagaatccaatgagtttactaatgactggggggaaaagattaccttgaggttgtgttcaacagaggaggaaacagcagagcttcttagcaaagtcctcaatggtaacaaggtggcatctgaagcattagccagggttgttcatcaggatgttgcctttactgacccaactctggattccacagagatcaatgttccacaggacattttgggaatttgggtggaccccatagattcaacttatcagtatataaaaggttctgctgacattaaatccaaccagggaatcttcccctgtggacttcagtgtgtcaccattttaattggtgtctatgacat

SEQ ID NO: 142848 - DNA, 812 bp, Homo sapiens
  Payload ID: 8223
  Gene Symbol: INPP1
  Gene Name: inositol polyphosphate-1-phosphatase
  ENST ID: ENST00000431594
  CDS Start-End: 172-812
cgtttctcgagggaaaggctgctgcctcctgctctgtcctcatccccggcttagggtgaaagaaagcactacttcaatattgctgctaagcatatgatcattctaagctgacggcccagagggtgggtgccaattccaccagcagctgcaactgaaaagcaaggttcagaaatgtcagatatcctccgggagctgctctgtgtctctgagaaggctgctaacattgcccgggcgtgcagacagcaggaagccctcttccagctgctgatcgaagaaaagaaagagggagaaaagaacaagaagtttgcagttgacttcaagacgctggctgatgtactggtacaggaagttataaaacagaatatggagaacaagtttccaggcttggaaaaaaatatttttggagaagaatccaatgagtttactaatgactggggggaaaagattaccttgaggttgtgttcaacagaggaggaaacagcagagcttcttagcaaagtcctcaatggtaacaaggtggcatctgaagcattagccagggttgttcatcaggatgttgcctttactgacccaactctggattccacagagatcaatgttccacaggacattttgggaatttgggtggaccccatagattcaacttatcagtatataaaaggttctgctgacattaaatccaaccagggaatcttcccctgtggacttcagtgtgtcaccattttaattggtgtctatgacatacagacaggggttcccctgatgggagtcatcaatcaaccttttgtgtcacgagatccaaacaccctcag

SEQ ID NO: 142849 - DNA, 425 bp, Homo sapiens
  Payload ID: 8223
  Gene Symbol: INPP1
  Gene Name: inositol polyphosphate-1-phosphatase
  ENST ID: ENST00000451089
  CDS Start-End: 335-425
gggcccggccaggcatgcccggcatcgccgctgcagccagcgcggaggggagctcaaattgcttaaaagataattatgttatataaagtgatcaatgaaaacaaacgtcatcttcattttttaaagtccttcagagcttacatcatgtggccgagtttatatacctgattggcaaaacagagcctaagaaccagctctcctgtatcccaagcaaggctctttctaccgcacaccctgcaggcccatccaggcccatccagacaataaacactgacggcccagagggtgggtgccaattccaccagcagctgcaactgaaaagcaaggttcagaaatgtcagatatcctccgggagctgctctgtgtctctgagaaggctgctaacattgcccgggcgtgcagacagcaggaagccctcttccagc

SEQ ID NO: 142850 - DNA, 541 bp, Homo sapiens
  Payload ID: 8223
  Gene Symbol: INPP1
  Gene Name: inositol polyphosphate-1-phosphatase
  ENST ID: ENST00000458193
  CDS Start-End: 338-541
gctgaaactcaccagggttaaattgatgagctttctgcgtgaaagaagggagtggtggtgatttccggagcttgtagccagggtgattagctcgcctgagtgttattagggtgttataaggagtgtttcttggttattcaacagtgtagttagtatcgtttcttttaagaaaaaaaattgattttaacacttgaataaaagaaacactgctgatattgtttatcttgaaagctttcaaatcggactccttgagatcttcacgctactgttaagctgacggcccagagggtgggtgccaattccaccagcagctgcaactgaaaagcaaggttcagaaatgtcagatatcctccgggagctgctctgtgtctctgagaaggctgctaacattgcccgggcgtgcagacagcaggaagccctcttccagctgctgatcgaagaaaagaaagagggagaaaagaacaagaagtttgcagttgacttcaagacgctggctgatgtactggtacaggaagttataaaacagaatatggagaacaag

SEQ ID NO: 142851 - DNA, 552 bp, Homo sapiens
  Payload ID: 8223
  Gene Symbol: INPP1
  Gene Name: inositol polyphosphate-1-phosphatase
  ENST ID: ENST00000430311
  CDS Start-End: 524-552
agccccgaggcggcagcgcgcgtttccacgccgcggtcccgcgggaaagccgggggcggcggcctggctgaggccaagctcggatccggtgccgagccaagcggggccgtgcgtcgccggggcttcgccttcgctcgcgtgacctccgccgtcctccccaaccctcgtcctctggccgcgcctgcggccgcacgcccagcgcccctcgcctaacctcgcgcccgggccgcgcctcctcctcctcctgctccccgccgcttccgtttctcgagggaaaggctgctgcctcctgctctgtcctcatccccggcttagtccttcagagcttacatcatgtggccgagtttatatacctgattggcaaaacagagcctaagaaccagctctcctgtatcccaagcaaggctctttctaccgcacaccctgcaggcccatccaggcccatccagacaataaacactgacggcccagagggtgggtgccaattccaccagcagctgcaactgaaaagcaaggttcagaaatgtcagatatcctccgggagctgctctg

SEQ ID NO: 142852 - DNA, 6752 bp, Homo sapiens
  Payload ID: 8224
  Gene Symbol: INPP4A
  Gene Name: inositol polyphosphate-4-phosphatase type I A
  Uniprot ID: Q96PE3
  ENST ID: ENST00000074304
  CDS Start-End: 394-3327
gtctagagcggcggcggctggctagggctgcggcgcgcgtggagggttcgctgctggtttgccgccgggtcgggctccgtgggccggggcaggaggaccagcacctgaggccgggcccgcagcccgcgacttcacagccaggcggcggcgctgctgctgctgcggggctctggcgcgcagcccggcgggacagcggggcggctggcgccgggggccggggagcgccagatgatggatttggacatgcttctatgaagaaatgccacatggtccgagagcaaacatgtccaggctactgccactttagtggactagggctcggtgccagcacttcccgggtaatcaggcgtggtctgaccgaggatcaagaagcacatcatcaccaatgacatcatgacagcaagagagcacagccctcgccatggtgccagggcccgtgcaatgcagcgggcttccaccatcgacgtggcggccgacatgctgggcctctctctggcaggaaatatacaagacccagatgagcccattttagaatttagcttagcttgcagtgagctgcatactccatcgctagatcgaaagccaaatagttttgttgcggtgagtgtcaccacccctcctcaggcattctggacgaagcatgcacagacggagatcattgagggaaccaacaatcctatatttctaagcagtattgccttctttcaagactctcttatcaatcagatgacacaagtcaaactctccgtgtatgatgtcaaagatagatctcagggaacaatgtatttactgggctctggaacgttcattgtcaaagatctgctccaggacaggcatcataggttgcatttaacactaaggtctgcagagagtgaccgtgtaggtaacatcaccgtgattggctggcagatggaggagaagtcagaccaacggccccctgtgacccggtctgtggacactgtcaatgggaggatggttcttcctgtcgatgagagcttgacggaggcgttaggaatccgatccaaatacgcttcattgcgaaaggacactttgctgaaatcggtgttcggtggtgccatctgccgcatgtaccggtttccaaccactgatggtaaccatttgcggatcctggagcagatggcagagagcgtgctctccctgcacgtgccccggcagttcgtgaagctcctactagaggaagatgcagccagagtgtgtgagctggaggagctgggagagctgtccccttgctgggagagcctccggcgccaaattgtcacccagtaccagaccatcatcctcacataccaggagaacctgaccgacctccatcagtacagagggccctcgtttaaagcaagcagtttgaaagcagataaaaagttagaatttgttcccacaaacttgcacatacaaaggatgagagttcaagacgatggaggatcagatcagaactacgacatcgtcaccattggggcgccagcagcacactgccaaggttttaagtcaggaggtctccgcaaaaagctgcacaaatttgaagagaccaagaaacattttgaggagtgttgtacatcatctggctgccagtccataatctacataccccaggatgttgtcagagccaaggagatcatcgcccagatcaacaccctgaaaacccaagtgagttactacgcagagcggctgtcaagggcagccaaggacaggtctgccactggccttgagaggacactcgccatcttggcagacaagacacggcagctggtcacggtctgcgactgcaagctcctggccaactccatccatgggctgaacgctgcacggcctgactacattgcctccaaggcctctcccacttcgactgaggaggagcaggtgatgcttagaaatgaccaggacaccctcatggcccggtggacagggagaaacagccgatcttccctgcaggtggactggcacgaggaggagtgggagaaagtgtggctgaacgtggacaagagcctagagtgcatcattcagcgtgtggacaagctgctgcagaaggagcggctgcatggcgagggctgtgaggatgtcttcccctgtgcaggcagctgcaccagcaagaaaggtaacccggacagccacgcctactggatcagaccagaagaccccttctgtgatgtcccctcctcaccatgcccctccaccatgccctccactgcatgccatcctcatctgaccacacattgcagtccccctcctgaagagtccagcccaggtgaatggagtgaggccctttacccgctgctgaccactctcaccgactgcgtggccatgatgagtgacaaggccaagaaggccatggtattcctgctcatgcaggacagcgcgcccaccatagccacctacctgagcctgcagtaccgccgtgacgtggtcttctgccagacgctgaccgccctcatctgcggcttcatcattaagctgaggaactgcctgcatgacgacggcttcctgcgccagctctacaccatcgggctgctggcccagttcgagagcctgctgagcacctacggggaggagctggcaatgctggaggacatgagccttgggatcatggacttgaggaacgtgaccttcaaagtcactcaggccacttccagcgcctccgcagacatgctgcccgtcatcacaggaaatcgcgacgggtttaacgtgcgggtccctctgccgggcccgctgtttgacgccttgccccgggagatccagagtggcatgctgctgcgagtgcagcccgtcctcttcaacgtgggcatcaatgagcagcagacactggccgagaggtttggcgatacgtctttacaagaagtcatcaacgtggagagtttggtgcggttaaattcctactttgagcagtttaaggaagttttgcctgaggattgcctgcctcggtctcgcagtcagacgtgcctgccagagctgctgcggtttctgggtcagaacgtgcatgcccggaagaataagaacgtcgacattctctggcaagctgctgagatctgccgccgccttaatggggtccggttcaccagctgcaagagcgctaaggaccgtacagccatgtcggtgacactggagcagtgcctgatcctgcaacacgagcatggcatggccccgcaggtcttcacccaggccctggagtgcatgcgcagtgagggttgtcgaagagaaaatacaatgaagaatgttggaagtcgcaaatatgcatttaattccctgcagctgaaggctttccccaagcattacaggcctcccgaagggacttacggaaaagttgaaacgtgaacacacggtttcctctaattagctgttacataataaatgtgggtaccctctagtgtcatatatgaattcttcaagaagacctgaaggattggtttttattttttgtggtttttttaaaaaaaacatttcactaaagagtctctggagcatgttttttgttttttgggtttttttccccattggaatcaataggaggtaatgtttggctcaatagtgtggatagtaacaactgcctatttaaattaaatagcctttggctgtaactacacagatctcatcaatagttacctacatgaatcaagctaggtttgtctgaaatgctagaagactttttcaaatgcctgcttgctcacttacttttctacagagtaactcaaaagtaaccattgaattacaatccactttgtaaaaatctgaatgtaaaacagtaaataataaattaaataattggatcctaggcataccaataaatgttatttggggaaagaagctagcactatctcatgcagtgagaataacgggttctagtgaattatcctatctacactaccacctgaagaagttgaaagaaagattgataaatcaacgggagataagactttattagaaggtaacacctgcaaggtaccccacatagttggggccactcttttttctgtcccttatgagttacagaacagggagtctgctggagacacaaagccagcagtaaggtccctttagcctgtctcctgttctctgaagctccctgccgaggctccctcacgcccagaggacacatctccccttcttctctagatgttaatgtagggcctcagatgtggcatgtcaacactcccatggggaatttatgaccatagagatagtagaaacctaaatattttcagaaaaaaaattttttttgcaggatttccaatttatctttgaaaagacagtacaatcatgtttgaatgtctgatgaaagtgtcttatttttaggtttgcaataattgttactttcttattctcattcttatgtaagatgactattgagaaacagttgaaatttattctcctcaaatgagattttgaaagggatttatgggccataaaacttaggaatttcatagaaaattttgtctggtcatcttttataagatgatgatgagtcttatctgcacatagcagagtttgtttcttaggagtttatatgttttattgattctgtttacgatgtttacatgttcttgaaaaggttgtaaaagaaatacatatggcacatattaatgatgctgatcctaatgatttgtgaacctcttagaaattcttttgtctaaaagcctagagattcttctggttcctttagaaacatgtaacaaacttgggccaggggtgctgaggcatggggaggactgcttattggcaggaacacagagggggtgggcatcaggtagggtggaactggatgaccttccagaccccctcctactcagaagtcagcatgcaagcagcgcctgctgtctcccgatgcctgcagggaggaaaatgtctgtgaaggacactttaatgaaggacgaagctctctgctgctccctcaaagctgagttcactgtggcaggcaggaagcagagaagctcctgcccgccaaacccactgcacaggtggctgctgctggtatcagattctcctttttaagtgtcaatttctgttcacagacagtttgttttcaatatggctgatttaccctttcacctctccaccatctcatttaatttgtaaatttttagttctgtcttttctcattttaacttttaaaaaatctccttgctttttaaaaataaatattacccacatagttttcagatcttttttgtctggagagcattaaatatctgcactcatcaaagggaatatagcaaatgttgatcatctgtcagcagttttgcatgtgacacctttatatgaattattttcccaatttttgctctatgtaatgggtcaccataaaactgtaagacttggcaaatgctatagaaaaggttcaggtttcagtattctctctgaaggcatcattcctgggcttccggcagcatcacacgcttccagtgcctgcagggtgagggtgtgtggcacagaggcaagcagctcctctcttctgtaggagctttgggttttcagaggtgcagggaaggcagttttacaggttaccgtaaaacagaggttccgtccagtgttccttatgatgcctccccatttaaaaagaaaagagatctatggaaaactgggaatgtaatgtggattctgtcagagctcctacagagcacagttgcctttagtttcctttaaagatgtaaaaatattgtataatacagttttgtccctacacaattgtatttgccaagcttagtgcattatgatacctttatttatttgttttgggcagtattactatatatatataaacatacagttactgttttatatattcttaggtcattcaaagccatgtatgctgtaaatgtgctagtctttagaatgacacataataaataactgacaagatattaaatgtggtcttgcctgattcatcctattaggaggactagttctatgtgaccagcctgtgactggaccattgttcttgggcattgcattgagtgctcgggtgctgaatacatgtttgtaaacatgggaccatgggagacttccattttataagcttgtttctgcctaatttgaagcagaggggcaacagcgttgaggttaagagcacggactttgggagcacacagaccaggtcccaatcctggttctgcccctgactggctggtgactctgagcaagttgcttgacctctccaagcctccgtttcctcatgtgcaaagtgtggacaacaacagtaccttcctcataaggaacgtgcgacgcgcctcagaagtacgtgttcataaatggtagccattgttgttaccttcccgtctgtgaacatggatcacatcatctctgtgggtaacccagtcctcgttgtatgacttgtcaaaatgcagttccacttgtattaatattgaccctgttcatcgtcaccaggactgcatcttgcaccactgtgccgtcttctaggcacacacgacccgttatctcccttggaaaaattcctctcactggaaatgtacaattaaaggatgattgaaatgtttaactcttggagtttttagtattaccaaactcctagaaatttaagctaccaccaaaaataacatgtgccttttccctttattctcattgatggtagcagtgcacctcgtttcagtgtcctgattccttgattactgtgaacactgaacatcttttatacctttatgatatttctatgtttgtgacttcattggaatgttgatctatttcatatagattgtttttaatatacaatgtattagcccctgtca

SEQ ID NO: 142853 - DNA, 1565 bp, Homo sapiens
  Payload ID: 8224
  Gene Symbol: INPP4A
  Gene Name: inositol polyphosphate-4-phosphatase type I A
  ENST ID: ENST00000409463
  CDS Start-End: 394-1314
gtctagagcggcggcggctggctagggctgcggcgcgcgtggagggttcgctgctggtttgccgccgggtcgggctccgtgggccggggcaggaggaccagcacctgaggccgggcccgcagcccgcgacttcacagccaggcggcggcgctgctgctgctgcggggctctggcgcgcagcccggcgggacagcggggcggctggcgccgggggccggggagcgccagatgatggatttggacatgcttctatgaagaaatgccacatggtccgagagcaaacatgtccaggctactgccactttagtggactagggctcggtgccagcacttcccgggtaatcaggcgtggtctgaccgaggatcaagaagcacatcatcaccaatgacatcatgacagcaagagagcacagccctcgccatggtgccagggcccgtgcaatgcagcgggcttccaccatcgacgtggcggccgacatgctgggcctctctctggcaggaaatatacaagacccagatgagcccattttagaatttagcttagcttgcagtgagctgcatactccatcgctagatcgaaagccaaatagttttgttgcggtgagtgtcaccacccctcctcaggccacttccagcgcctccgcagacatgctgcccgtcatcacaggaaatcgcgacgggtttaacgtgcgggtccctctgccgggcccgctgtttgacgccttgccccgggagatccagagtggcatgctgctgcgagtgcagcccgtcctcttcaacgtgggcatcaatgagcagcagacactggccgagaggtttggcgatacgtctttacaagaagtcatcaacgtggagagtttggtgcggttaaattcctactttgagcagtttaaggaagttttgcctgaggattgcctgcctcggtctcgcagtcagacgtgcctgccagagctgctgcggtttctgggtcagaacgtgcatgcccggaagaataagaacgtcgacattctctggcaagctgctgagatctgccgccgccttaatggggtccggttcaccagctgcaagagcgctaaggaccgtacagccatgtcggtgacactggagcagtgcctgatcctgcaacacgagcatggcatggccccgcaggtcttcacccaggccctggagtgcatgcgcagtgagggttgtcgaagagaaaatacaatgaagaatgttggaagtcgcaaatatgcatttaattccctgcagctgaaggctttccccaagcattacaggcctcccgaagggacttacggaaaagttgaaacgtgaacacacggtttcctctaattagctgttacataataaatgtgggtaccctctagtgtcatatatgaattcttcaagaagacctgaaggattggtttttattttttgtggtttttttaaaaaaaacatttcactaaagagtctctggagcatgttttttgttttttgggtttttttccccattggaatcaataggaggtaatgtttggctcaatagtgtggatagtaacaactgcctatttaaattaaatagc

SEQ ID NO: 142854 - DNA, 9996 bp, Homo sapiens
  Payload ID: 8224
  Gene Symbol: INPP4A
  Gene Name: inositol polyphosphate-4-phosphatase type I A
  Uniprot ID: Q96PE3
  ENST ID: ENST00000409016
  CDS Start-End: 398-3214
cggcgtctagagcggcggcggctggctagggctgcggcgcgcgtggagggttcgctgctggtttgccgccgggtcgggctccgtgggccggggcaggaggaccagcacctgaggccgggcccgcagcccgcgacttcacagccaggcggcggcgctgctgctgctgcggggctctggcgcgcagcccggcgggacagcggggcggctggcgccgggggccggggagcgccagatgatggatttggacatgcttctatgaagaaatgccacatggtccgagagcaaacatgtccaggctactgccactttagtggactagggctcggtgccagcacttcccgggtaatcaggcgtggtctgaccgaggatcaagaagcacatcatcaccaatgacatcatgacagcaagagagcacagccctcgccatggtgccagggcccgtgcaatgcagcgggcttccaccatcgacgtggcggccgacatgctgggcctctctctggcaggaaatatacaagacccagatgagcccattttagaatttagcttagcttgcagtgagctgcatactccatcgctagatcgaaagccaaatagttttgttgcggtgagtgtcaccacccctcctcaggcattctggacgaagcatgcacagacggagatcattgagggaaccaacaatcctatatttctaagcagtattgccttctttcaagactctcttatcaatcagatgacacaagtcaaactctccgtgtatgatgtcaaagatagatctcagggaacaatgtatttactgggctctggaacgttcattgtcaaagatctgctccaggacaggcatcataggttgcatttaacactaaggtctgcagagagtgaccgtgtaggtaacatcaccgtgattggctggcagatggaggagaagtcagaccaacggccccctgtgacccggtctgtggacactgtcaatgggaggatggttcttcctgtcgatgagagcttgacggaggcgttaggaatccgatccaaatacgcttcattgcgaaaggacactttgctgaaatcggtgttcggtggtgccatctgccgcatgtaccggtttccaaccactgatggtaaccatttgcggatcctggagcagatggcagagagcgtgctctccctgcacgtgccccggcagttcgtgaagctcctactagaggaagatgcagccagagtgtgtgagctggaggagctgggagagctgtccccttgctgggagagcctccggcgccaaattgtcacccagtaccagaccatcatcctcacataccaggagaacctgaccgacctccatcagtacagagggccctcgtttaaagcaagcagtttgaaagcagataaaaagttagaatttgttcccacaaacttgcacatacaaaggatgagagttcaagacgatggaggatcagatcagaactacgacatcgtcaccattggggcgccagcagcacactgccaaggttttaagtcaggaggtctccgcaaaaagctgcacaaatttgaagagaccaagaaacattttgaggagtgttgtacatcatctggctgccagtccataatctacataccccaggatgttgtcagagccaaggagatcatcgcccagatcaacaccctgaaaacccaagtgagttactacgcagagcggctgtcaagggcagccaaggacaggtctgccactggccttgagaggacactcgccatcttggcagacaagacacggcagctggtcacggtctgcgactgcaagctcctggccaactccatccatgggctgaacgctgcacggcctgactacattgcctccaaggcctctcccacttcgactgaggaggagcaggtgatgcttagaaatgaccaggacaccctcatggcccggtggacagggagaaacagccgatcttccctgcaggtggactggcacgaggaggagtgggagaaagtgtggctgaacgtggacaagagcctagagtgcatcattcagcgtgtggacaagctgctgcagaaggagcggctgcatggcgagggctgtgaggatgtcttcccctgtgcaggcagctgcaccagcaagaaagattgcagtccccctcctgaagagtccagcccaggtgaatggagtgaggccctttacccgctgctgaccactctcaccgactgcgtggccatgatgagtgacaaggccaagaaggccatggtattcctgctcatgcaggacagcgcgcccaccatagccacctacctgagcctgcagtaccgccgtgacgtggtcttctgccagacgctgaccgccctcatctgcggcttcatcattaagctgaggaactgcctgcatgacgacggcttcctgcgccagctctacaccatcgggctgctggcccagttcgagagcctgctgagcacctacggggaggagctggcaatgctggaggacatgagccttgggatcatggacttgaggaacgtgaccttcaaagtcactcaggccacttccagcgcctccgcagacatgctgcccgtcatcacaggaaatcgcgacgggtttaacgtgcgggtccctctgccgggcccgctgtttgacgccttgccccgggagatccagagtggcatgctgctgcgagtgcagcccgtcctcttcaacgtgggcatcaatgagcagcagacactggccgagaggtttggcgatacgtctttacaagaagtcatcaacgtggagagtttggtgcggttaaattcctactttgagcagtttaaggaagttttgcctgaggattgcctgcctcggtctcgcagtcagacgtgcctgccagagctgctgcggtttctgggtcagaacgtgcatgcccggaagaataagaacgtcgacattctctggcaagctgctgagatctgccgccgccttaatggggtccggttcaccagctgcaagagcgctaaggaccgtacagccatgtcggtgacactggagcagtgcctgatcctgcaacacgagcatggcatggccccgcaggtcttcacccaggccctggagtgcatgcgcagtgagggttgtcgaagagaaaatacaatgaagaatgttggaagtcgcaaatatgcatttaattccctgcagctgaaggctttccccaagcattacaggcctcccgaagggacttacggaaaagttgaaacgtgaacacacggtttcctctaattagctgttacataataaatgtgggtaccctctagtgtcatatatgaattcttcaagaagacctgaaggattggtttttattttttgtggtttttttaaaaaaaacatttcactaaagagtctctggagcatgttttttgttttttgggtttttttccccattggaatcaataggaggtaatgtttggctcaatagtgtggatagtaacaactgcctatttaaattaaatagcctttggctgtaactacacagatctcatcaatagttacctacatgaatcaagctaggtttgtctgaaatgctagaagactttttcaaatgcctgcttgctcacttacttttctacagagtaactcaaaagtaaccattgaattacaatccactttgtaaaaatctgaatgtaaaacagtaaataataaattaaataattggatcctaggcataccaataaatgttatttggggaaagaagctagcactatctcatgcagtgagaataacgggttctagtgaattatcctatctacactaccacctgaagaagttgaaagaaagattgataaatcaacgggagataagactttattagaaggtaacacctgcaaggtaccccacatagttggggccactcttttttctgtcccttatgagttacagaacagggagtctgctggagacacaaagccagcagtaaggtccctttagcctgtctcctgttctctgaagctccctgccgaggctccctcacgcccagaggacacatctccccttcttctctagatgttaatgtagggcctcagatgtggcatgtcaacactcccatggggaatttatgaccatagagatagtagaaacctaaatattttcagaaaaaaaattttttttgcaggatttccaatttatctttgaaaagacagtacaatcatgtttgaatgtctgatgaaagtgtcttatttttaggtttgcaataattgttactttcttattctcattcttatgtaagatgactattgagaaacagttgaaatttattctcctcaaatgagattttgaaagggatttatgggccataaaacttaggaatttcatagaaaattttgtctggtcatcttttataagatgatgatgagtcttatctgcacatagcagagtttgtttcttaggagtttatatgttttattgattctgtttacgatgtttacatgttcttgaaaaggttgtaaaagaaatacatatggcacatattaatgatgctgatcctaatgatttgtgaacctcttagaaattcttttgtctaaaagcctagagattcttctggttcctttagaaacatgtaacaaacttgggccaggggtgctgaggcatggggaggactgcttattggcaggaacacagagggggtgggcatcaggtagggtggaactggatgaccttccagaccccctcctactcagaagtcagcatgcaagcagcgcctgctgtctcccgatgcctgcagggaggaaaatgtctgtgaaggacactttaatgaaggacgaagctctctgctgctccctcaaagctgagttcactgtggcaggcaggaagcagagaagctcctgcccgccaaacccactgcacaggtggctgctgctggtatcagattctcctttttaagtgtcaatttctgttcacagacagtttgttttcaatatggctgatttaccctttcacctctccaccatctcatttaatttgtaaatttttagttctgtcttttctcattttaacttttaaaaaatctccttgctttttaaaaataaatattacccacatagttttcagatcttttttgtctggagagcattaaatatctgcactcatcaaagggaatatagcaaatgttgatcatctgtcagcagttttgcatgtgacacctttatatgaattattttcccaatttttgctctatgtaatgggtcaccataaaactgtaagacttggcaaatgctatagaaaaggttcaggtttcagtattctctctgaaggcatcattcctgggcttccggcagcatcacacgcttccagtgcctgcagggtgagggtgtgtggcacagaggcaagcagctcctctcttctgtaggagctttgggttttcagaggtgcagggaaggcagttttacaggttaccgtaaaacagaggttccgtccagtgttccttatgatgcctccccatttaaaaagaaaagagatctatggaaaactgggaatgtaatgtggattctgtcagagctcctacagagcacagttgcctttagtttcctttaaagatgtaaaaatattgtataatacagttttgtccctacacaattgtatttgccaagcttagtgcattatgatacctttatttatttgttttgggcagtattactatatatatataaacatacagttactgttttatatattcttaggtcattcaaagccatgtatgctgtaaatgtgctagtctttagaatgacacataataaataactgacaagatattaaatgtggtcttgcctgattcatcctattaggaggactagttctatgtgaccagcctgtgactggaccattgttcttgggcattgcattgagtgctcgggtgctgaatacatgtttgtaaacatgggaccatgggagacttccattttataagcttgtttctgcctaatttgaagcagaggggcaacagcgttgaggttaagagcacggactttgggagcacacagaccaggtcccaatcctggttctgcccctgactggctggtgactctgagcaagttgcttgacctctccaagcctccgtttcctcatgtgcaaagtgtggacaacaacagtaccttcctcataaggaacgtgcgacgcgcctcagaagtacgtgttcataaatggtagccattgttgttaccttcccgtctgtgaacatggatcacatcatctctgtgggtaacccagtcctcgttgtatgacttgtcaaaatgcagttccacttgtattaatattgaccctgttcatcgtcaccaggactgcatcttgcaccactgtgccgtcttctaggcacacacgacccgttatctcccttggaaaaattcctctcactggaaatgtacaattaaaggatgattgaaatgtttaactcttggagtttttagtattaccaaactcctagaaatttaagctaccaccaaaaataacatgtgccttttccctttattctcattgatggtagcagtgcacctcgtttcagtgtcctgattccttgattactgtgaacactgaacatcttttatacctttatgatatttctatgtttgtgacttcattggaatgttgatctatttcatatagattgtttttaatatacaatgtattagcccctgtcatatgttgcacactttttaacctatttgtcagctgtcttttggtctgtggtaggagttatacagtattttaaatggtttatgtagtcacatatacctgtctttcattttgatgcttgttctgaaatggagtcctggcttcaccatggaaggtgggacatatgggacagccatgtccttgtgggcatggtggtgtggctgcgtgcccacgacgaggggctggactaaagtgctcactggcaccttgcttggtgcatgggccatgctcagtttaatattattaacagtttctaccttcactctcatgtctcaggattattttttcagcatttacctgttcttatttctaggatgtttatggtttcagtcctacatttagatcaatccatctggaatcatcttggtgtaagtcctgtgttgtgcttacagtatgtaaagtcagagggaatccctcaaggtcaggcctaattttgcttctctttaaagttaagccaagaagaagacatgtcaggacgcccagacatcagctaccgtgagcttcttcctgccctccctccgcatgccattctggtgctgcgcttcagtttcctgttgagtctctgcttagtagatgacttggcacaatctggctgcccagatctaggggagttgtcccagggaggctttgcgctggaggaaggtaagaggagctggaggttggagcttcccgatttgtgatttttccaagaacagaaatgattagccatgtggggaggttacttcattgtacattgttctactgcataacctccctctattctttaccagcatcacacagcaggttggcaccatttttgaatagaggtttctcacagtatcctcagcagcattgagtgttcctaatgttgtagtaatgagcagtagatgtctctcagtgggcagtgtgacctctttggtcactctaaagggctgccagcatttctcttaagctggggggagaagagctgttctgtgtataggggtattgggaacacatggacagaaggaactggcctcacatgccatcgtgttcctgggatggctcttccaagaccagcagttcctcctggcaggcaggccctcacagaactctgcatttggagatggacaaactctcttcttcttatcactttctccccaaaatgtcctcttctaccagcccctcttaagagccgattttctgtaagttatagtgagggcactgctctgctgtgcacagaaggaaccccagcccagaagcacacgctccctgtggaacctgcaggggtggcagtgatgacagaaccaagggggtcaaggaagattggagaggagtgggcagcaggaaacagctcaggctgcctgacctggcccccggctgcccatgagggcctccagagaggggcagagctggcttatcgggatccatgatggtttttacacttttaaaagtgccctcttctcagagaccctggttatttccaaaagtaggaagtaatcaaatttacagtggataaaatccagtatttgaaatcaggaagacagaaaaaaaagcaaaatagcatccttttctgagaggtatatgctgaccaaaaagatctttcattcctgtgaacaccaagcagcgcggcctctggcagagagagcgctgggttgtacagatggaaacttgtgtttagcaggctgtctgctcccaatagtggccctggctgcaactgacctcctgatgccctgctgacgctaactgtgggtaccaaccagcaccgtggacatcggccccaggatcagtctacgatttgtctggtggccaaatgatgacttttgagtgggaaaagctggtgggggctacaccgtgctctgcagtgtagtgggatcctgtgagctggcctgcacaggcactccctcccctgccaggggccccagggaggcttctccagcctgaggctgcaccctccatacgattccaccccccatcctgtgccaacagtaggcaaacggagagtagcttggtcttgtttttattagctgttgccctccaggctacgacagggttcccagggtgtagcctgaaaacacccatactctagattccctccactggaaccctgtctttgccatgatttcttcctgcatcaggcccctgtgggccttgcaggccagtccaggcaggtctttcacactgttgtcccacataacagaaaaagctgagcagacagggtaggaaacacacttgcatctccatggctccaaagaggatgcctgtgttagatggatgtagacagacacagcacttcactgcttcctcctcctcgccacccagccctccctcggtgtctgtggcctgactctctcctggtggtcctacgtctctgaccatccctcctcactctcaaattttatgttgcccaccacctgccactaatggcgtggtgttctcctgggttccctttctcacttaagatgatcttcctgaaaaatcttacacattcctgttgaacaaatggtcacttatatggtagtgactcctaaatttctaggtccatcccagactctcccccaaggtccagattacctatacatctaagcaccatgcctgtcttgcaggcatctcaaatacagcatgctcatgcctctcctcctccaagctggctgagtctccctctaatagacgaccttgggatcattttctcctccacatcccatcaatcagccactgaacctgtatctcttgagaaccatcccataatttccatccatgcaccccaaggcctggtctgtatcagtcccctcggatctggacctctcctgagcatcctcacccctcctgcaaggctagtctcaggtctgccttcctctatggtgatttctccccacaaatgaagttggccctttcaaaaaaacttcctctccttcattgttgactatgaagattctttcatgcatgtcctgtccactgtcagtcccctctgtattcacaagagcaagtgtaatgcccgctgtgaaggagctaaagtttgttgaataaacacatgaacaaatggtggttttgtggtgttcaactgaaatatttcctatttcagcactggaccacgctgtttttctcactacataatcggttacgctaaatgcatcacgagccaaattcaaaaggtcaaaggagaaggcaaatggcagagtgtggtaaaggggcgagtgagagggtctctgaaaaaagtcaggctaaaattacagggggttcaggcaatgttatcttgatctggatggccagttacatgacagattactttgttcttaacatacgaacatcctattcactttttggtatactggttgtttaacagtaaaaattaaatgtttaaaacc

SEQ ID NO: 142855 - DNA, 3365 bp, Homo sapiens
  Payload ID: 8224
  Gene Symbol: INPP4A
  Gene Name: inositol polyphosphate-4-phosphatase type I A
  Uniprot ID: Q96PE3
  ENST ID: ENST00000409851
  CDS Start-End: 394-3312
gtctagagcggcggcggctggctagggctgcggcgcgcgtggagggttcgctgctggtttgccgccgggtcgggctccgtgggccggggcaggaggaccagcacctgaggccgggcccgcagcccgcgacttcacagccaggcggcggcgctgctgctgctgcggggctctggcgcgcagcccggcgggacagcggggcggctggcgccgggggccggggagcgccagatgatggatttggacatgcttctatgaagaaatgccacatggtccgagagcaaacatgtccaggctactgccactttagtggactagggctcggtgccagcacttcccgggtaatcaggcgtggtctgaccgaggatcaagaagcacatcatcaccaatgacatcatgacagcaagagagcacagccctcgccatggtgccagggcccgtgcaatgcagcgggcttccaccatcgacgtggcggccgacatgctgggcctctctctggcaggaaatatacaagacccagatgagcccattttagaatttagcttagcttgcagtgagctgcatactccatcgctagatcgaaagccaaatagttttgttgcggtgagtgtcaccacccctcctcaggcattctggacgaagcatgcacagacggagatcattgagggaaccaacaatcctatatttctaagcagtattgccttctttcaagactctcttatcaatcagatgacacaagtcaaactctccgtgtatgatgtcaaagatagatctcagggaacaatgtatttactgggctctggaacgttcattgtcaaagatctgctccaggacaggcatcataggttgcatttaacactaaggtctgcagagagtgaccgtgtaggtaacatcaccgtgattggctggcagatggaggagaagtcagaccaacggccccctgtgacccggtctgtggacactgtcaatgggaggatggttcttcctgtcgatgagagcttgacggaggcgttaggaatccgatccaaatacgcttcattgcgaaaggacactttgctgaaatcggtgttcggtggtgccatctgccgcatgtaccggtttccaaccactgatggtaaccatttgcggatcctggagcagatggcagagagcgtgctctccctgcacgtgccccggcagttcgtgaagctcctactagaggaagatgcagccagagtgtgtgagctggaggagctgggagagctgtccccttgctgggagagcctccggcgccaaattgtcacccagtaccagaccatcatcctcacataccaggagaacctgaccgacctccatcagtacagagggccctcgtttaaagcaagcagtttgaaagcagataaaaagttagaatttgttcccacaaacttgcacatacaaaggatgagagttcaagacgatggaggatcagatcagaactacgacatcgtcaccattggggcgccagcagcacactgccaaggttttaagtcaggaggtctccgcaaaaagctgcacaaatttgaagagaccaagaaacatacatcatctggctgccagtccataatctacataccccaggatgttgtcagagccaaggagatcatcgcccagatcaacaccctgaaaacccaagtgagttactacgcagagcggctgtcaagggcagccaaggacaggtctgccactggccttgagaggacactcgccatcttggcagacaagacacggcagctggtcacggtctgcgactgcaagctcctggccaactccatccatgggctgaacgctgcacggcctgactacattgcctccaaggcctctcccacttcgactgaggaggagcaggtgatgcttagaaatgaccaggacaccctcatggcccggtggacagggagaaacagccgatcttccctgcaggtggactggcacgaggaggagtgggagaaagtgtggctgaacgtggacaagagcctagagtgcatcattcagcgtgtggacaagctgctgcagaaggagcggctgcatggcgagggctgtgaggatgtcttcccctgtgcaggcagctgcaccagcaagaaaggtaacccggacagccacgcctactggatcagaccagaagaccccttctgtgatgtcccctcctcaccatgcccctccaccatgccctccactgcatgccatcctcatctgaccacacattgcagtccccctcctgaagagtccagcccaggtgaatggagtgaggccctttacccgctgctgaccactctcaccgactgcgtggccatgatgagtgacaaggccaagaaggccatggtattcctgctcatgcaggacagcgcgcccaccatagccacctacctgagcctgcagtaccgccgtgacgtggtcttctgccagacgctgaccgccctcatctgcggcttcatcattaagctgaggaactgcctgcatgacgacggcttcctgcgccagctctacaccatcgggctgctggcccagttcgagagcctgctgagcacctacggggaggagctggcaatgctggaggacatgagccttgggatcatggacttgaggaacgtgaccttcaaagtcactcaggccacttccagcgcctccgcagacatgctgcccgtcatcacaggaaatcgcgacgggtttaacgtgcgggtccctctgccgggcccgctgtttgacgccttgccccgggagatccagagtggcatgctgctgcgagtgcagcccgtcctcttcaacgtgggcatcaatgagcagcagacactggccgagaggtttggcgatacgtctttacaagaagtcatcaacgtggagagtttggtgcggttaaattcctactttgagcagtttaaggaagttttgcctgaggattgcctgcctcggtctcgcagtcagacgtgcctgccagagctgctgcggtttctgggtcagaacgtgcatgcccggaagaataagaacgtcgacattctctggcaagctgctgagatctgccgccgccttaatggggtccggttcaccagctgcaagagcgctaaggaccgtacagccatgtcggtgacactggagcagtgcctgatcctgcaacacgagcatggcatggccccgcaggtcttcacccaggccctggagtgcatgcgcagtgagggttgtcgaagagaaaatacaatgaagaatgttggaagtcgcaaatatgcatttaattccctgcagctgaaggctttccccaagcattacaggcctcccgaagggacttacggaaaagttgaaacgtgaacacacggtttcctctaattagctgttacataataaatgtgggtaccctctag

SEQ ID NO: 142856 - DNA, 3231 bp, Homo sapiens
  Payload ID: 8224
  Gene Symbol: INPP4A
  Gene Name: inositol polyphosphate-4-phosphatase type I A
  Uniprot ID: Q96PE3
  ENST ID: ENST00000409540
  CDS Start-End: 302-3166
gaggaccagcacctgaggccgggcccgcagcccgcgacttcacagccaggcggcggcgctgctgctgctgcggggctctggcgcgcagcccggcgggacagcggggcggctggcgccgggggccggggagcgccagatgatggatttggacatgcttctatgaagaaatgccacatggtccgagagcaaacatgtccaggctactgccactttagtggactagggctcggtgccagcacttcccgggtaatcaggcgtggtctgaccgaggatcaagaagcacatcatcaccaatgacatcatgacagcaagagagcacagccctcgccatggtgccagggcccgtgcaatgcagcgggcttccaccatcgacgtggcggccgacatgctgggcctctctctggcaggaaatatacaagacccagatgagcccattttagaatttagcttagcttgcagtgagctgcatactccatcgctagatcgaaagccaaatagttttgttgcggtgagtgtcaccacccctcctcaggcattctggacgaagcatgcacagacggagatcattgagggaaccaacaatcctatatttctaagcagtattgccttctttcaagactctcttatcaatcagatgacacaagtcaaactctccgtgtatgatgtcaaagatagatctcagggaacaatgtatttactgggctctggaacgttcattgtcaaagatctgctccaggacaggcatcataggttgcatttaacactaaggtctgcagagagtgaccgtgtaggtaacatcaccgtgattggctggcagatggaggagaagtcagaccaacggccccctgtgacccggtctgtggacactgtcaatgggaggatggttcttcctgtcgatgagagcttgacggaggcgttaggaatccgatccaaatacgcttcattgcgaaaggacactttgctgaaatcggtgttcggtggtgccatctgccgcatgtaccggtttccaaccactgatggtaaccatttgcggatcctggagcagatggcagagagcgtgctctccctgcacgtgccccggcagttcgtgaagctcctactagaggaagatgcagccagagtgtgtgagctggaggagctgggagagctgtccccttgctgggagagcctccggcgccaaattgtcacccagtaccagaccatcatcctcacataccaggagaacctgaccgacctccatcagtacagagggccctcgtttaaagcaagcagtttgaaagcagataaaaagttagaatttgttcccacaaacttgcacatacaaaggatgagagttcaagacgatggaggatcagatcagaactacgacatcgtcaccattggggcgccagcagcacactgccaaggttttaagtcaggaggtctccgcaaaaagctgcacaaatttgaagagaccaagaaacattttgaggagtgttgtacatcatctggctgccagtccataatctacataccccaggatgttgtcagagccaaggagatcatcgcccagatcaacaccctgaaaacccaagtgagttactacgcagagcggctgtcaagggcagccaaggacaggtctgccactggccttgagaggacactcgccatcttggcagacaagacacggcagctggtcacggtctgcgactgcaagctcctggccaactccatccatgggctgaacgctgcacggcctgactacattgcctccaaggcctctcccacttcgactgaggaggagcaggtgatgcttagaaatgaccaggacaccctcatggcccggtggacagggagaaacagccgatcttccctgcaggtggactggcacgaggaggagtgggagaaagtgtggctgaacgtggacaagagcctagagtgcatcattcagcgtgtggacaagctgctgcagaaggagcggctgcatggcgagggctgtgaggatgtcttcccctgtgcaggcagctgcaccagcaagaaagattgcagtccccctcctgaagagtccagcccaggtgaatggagtgaggccctttacccgctgctgaccactctcaccgactgcgtggccatgatgagtgacaaggccaagaaggccatggtattcctgctcatgcaggacagcgcgcccaccatagccacctacctgagcctgcagtaccgccgtgacgtggtcttctgccagacgctgaccgccctcatctgcggcttcatcattaagctgaggaactgcctgcatgacgacggcttcctgcgccagctctacaccatcgggctgctggcccagttcgagagcctgctgagcacctacggggaggagctggcaatgctggaggacatgagccttgggatcatggacttgaggaacgtgaccttcaaagtcactcaggccacttccagcgcctccgcagacatgctgcccgtcatcacaggaaatcgcgacgggtttaacgtgcgggtccctctgccgggcccgctgtttgacgccttgccccgggagatccagagtggcatgctgctgcgagtgcagcccgtcctcttcaacgtgggcatcaatgagcagcagacactggccgagaggtttggcgatacgtctttacaagaagtcatcaacgtggagagtttggtgcggttaaattcctactttgagcagtttaaggaagttttgcctgaggattgcctgcctcggtctcgcagtcagacgtgcctgccagagctgctgcggtttctgggtcagaacgtgcatgcccggaagaataagaacgtcgacattctctggcaagctgctgagatctgccgccgccttaatggggtccggttcaccagctgcaagagcgctaaggaccgtacagccatgtcggtgacactggagcagtgcctgatcctgcaacacgagcatggcatggccccgcaggtcttcacccaggccctggagtgcatgcgcagcattggaacacgggaggtagtcacccagaagaacttgagcggcctggtgcccatccgagacttaaggctagaccccagcctcctctgttccatccctttattagctctgagccccaatttactgattgtgtggctctttctgagcatagcatacctggtgaccaaattgcgttgcaaatgaatatcattatgaaaaattaataagtcacaagaaaaacaaaagtgccagaacatgtccagccaccg

SEQ ID NO: 142857 - DNA, 2934 bp, Homo sapiens
  Payload ID: 8224
  Gene Symbol: INPP4A
  Gene Name: inositol polyphosphate-4-phosphatase type I A
  Uniprot ID: Q96PE3
  ENST ID: ENST00000523221
  CDS Start-End: 1-2934
atgacagcaagagagcacagccctcgccatggtgccagggcccgtgcaatgcagcgggcttccaccatcgacgtggcggccgacatgctgggcctctctctggcaggaaatatacaagacccagatgagcccattttagaatttagcttagcttgcagtgagctgcatactccatcgctagatcgaaagccaaatagttttgttgcggtgagtgtcaccacccctcctcaggcattctggacgaagcatgcacagacggagatcattgagggaaccaacaatcctatatttctaagcagtattgccttctttcaagactctcttatcaatcagatgacacaagtcaaactctccgtgtatgatgtcaaagatagatctcagggaacaatgtatttactgggctctggaacgttcattgtcaaagatctgctccaggacaggcatcataggttgcatttaacactaaggtctgcagagagtgaccgtgtaggtaacatcaccgtgattggctggcagatggaggagaagtcagaccaacggccccctgtgacccggtctgtggacactgtcaatgggaggatggttcttcctgtcgatgagagcttgacggaggcgttaggaatccgatccaaatacgcttcattgcgaaaggacactttgctgaaatcggtgttcggtggtgccatctgccgcatgtaccggtttccaaccactgatggtaaccatttgcggatcctggagcagatggcagagagcgtgctctccctgcacgtgccccggcagttcgtgaagctcctactagaggaagatgcagccagagtgtgtgagctggaggagctgggagagctgtccccttgctgggagagcctccggcgccaaattgtcacccagtaccagaccatcatcctcacataccaggagaacctgaccgacctccatcagtacagagggccctcgtttaaagcaagcagtttgaaagcagataaaaagttagaatttgttcccacaaacttgcacatacaaaggatgagagttcaagacgatggaggatcagatcagaactacgacatcgtcaccattggggcgccagcagcacactgccaaggttttaagtcaggaggtctccgcaaaaagctgcacaaatttgaagagaccaagaaacattttgaggagtgttgtacatcatctggctgccagtccataatctacataccccaggatgttgtcagagccaaggagatcatcgcccagatcaacaccctgaaaacccaagtgagttactacgcagagcggctgtcaagggcagccaaggacaggtctgccactggccttgagaggacactcgccatcttggcagacaagacacggcagctggtcacggtctgcgactgcaagctcctggccaactccatccatgggctgaacgctgcacggcctgactacattgcctccaaggcctctcccacttcgactgaggaggagcaggtgatgcttagaaatgaccaggacaccctcatggcccggtggacagggagaaacagccgatcttccctgcaggtggactggcacgaggaggagtgggagaaagtgtggctgaacgtggacaagagcctagagtgcatcattcagcgtgtggacaagctgctgcagaaggagcggctgcatggcgagggctgtgaggatgtcttcccctgtgcaggcagctgcaccagcaagaaaggtaacccggacagccacgcctactggatcagaccagaagaccccttctgtgatgtcccctcctcaccatgcccctccaccatgccctccactgcatgccatcctcatctgaccacacattgcagtccccctcctgaagagtccagcccaggtgaatggagtgaggccctttacccgctgctgaccactctcaccgactgcgtggccatgatgagtgacaaggccaagaaggccatggtattcctgctcatgcaggacagcgcgcccaccatagccacctacctgagcctgcagtaccgccgtgacgtggtcttctgccagacgctgaccgccctcatctgcggcttcatcattaagctgaggaactgcctgcatgacgacggcttcctgcgccagctctacaccatcgggctgctggcccagttcgagagcctgctgagcacctacggggaggagctggcaatgctggaggacatgagccttgggatcatggacttgaggaacgtgaccttcaaagtcactcaggccacttccagcgcctccgcagacatgctgcccgtcatcacaggaaatcgcgacgggtttaacgtgcgggtccctctgccgggcccgctgtttgacgccttgccccgggagatccagagtggcatgctgctgcgagtgcagcccgtcctcttcaacgtgggcatcaatgagcagcagacactggccgagaggtttggcgatacgtctttacaagaagtcatcaacgtggagagtttggtgcggttaaattcctactttgagcagtttaaggaagttttgcctgaggattgcctgcctcggtctcgcagtcagacgtgcctgccagagctgctgcggtttctgggtcagaacgtgcatgcccggaagaataagaacgtcgacattctctggcaagctgctgagatctgccgccgccttaatggggtccggttcaccagctgcaagagcgctaaggaccgtacagccatgtcggtgacactggagcagtgcctgatcctgcaacacgagcatggcatggccccgcaggtcttcacccaggccctggagtgcatgcgcagtgagggttgtcgaagagaaaatacaatgaagaatgttggaagtcgcaaatatgcatttaattccctgcagctgaaggctttccccaagcattacaggcctcccgaagggacttacggaaaagttgaaacgtga

SEQ ID NO: 142858 - DNA, 3741 bp, Homo sapiens
  Payload ID: 8225
  Gene Symbol: INPP4B
  Gene Name: inositol polyphosphate-4-phosphatase type II B
  Uniprot ID: O15327
  ENST ID: ENST00000262992
  CDS Start-End: 218-2992
gacttctttccattttgttttttgcagagccttgaaaccagcgaaacaataatcaaagagcagttctgtcaaagaaaacaacataaatcaggtacagaatttcagagtgggatatcagatctttagtgtgaagatacatctacattaaaccaggaatcactagaactgacatttggacaagaaaatttggaaaattttaaaactgtgaaggttgatcatggaaattaaagaggaaggggcatcagaagaagggcagcactttcttcctacagcccaggccaatgatcccggggactgtcagttcacaagtatccagaagactccaaatgaaccgcagttggaattcatccttgcatgcaaggatctcgtggctcctgtccgtgatcgtaaactgaatacactggtgcagatctccgtaatccaccccgtggagcagagtctgacaagatactccagcaccgaaattgtggagggaacaagggacccactgtttttgactggtgtcacattcccatctgagtatcccatctatgaggagaccaaaataaaactaacagtctatgatgtcaaggataagtctcatgacaccgttcgaaccagtgtcctaccagaacataaggatcccccgccagaagttgggcgaagtttcttgggctatgccagttttaaagtgggagagctgctgaagtcaaaggagcaattgctggtcctgagcctgagaacttcagatggtggcaaagtggttggcaccatagaagtcagtgtcgtgaagatgggggagattgaggatggggaagccgaccacatcaccacagatgtacagggacaaaagtgtgccctggtatgtgaatgtacagccccggaaagtgtgagcggaaaagataacttaccttttttgaattcagtgttaaagaacccagtatgtaaattatatagatttcccacatctgacaataagtggatgcgaattcgagagcagatgtcagagagcattctttcctttcatattcctaaggaattgatttcccttcacattaaagaagatttgtgcagaaaccaggagataaaagaacttggtgagctttctccacattgggacaatctgcgaaaaaatgtccttactcactgtgatcaaatggtgaatatgtaccaagacattctgacagaacttagcaaggaaacagggtcctctttcaaatcaagcagcagcaaaggagagaaaacattagaatttgttccaataaatctacatctgcaaagaatgcaggtacacagccctcacttgaaagatgctctctacgatgtcatcactgtgggagccccagctgcccattttcagggatttaagaatggtggtcttcggaagctactccatagatttgaaacagaaagaagaaataccggataccagtttatttactattcacctgaaaacacagccaaagcaaaggaagttctcagcaacatcaatcaactacaacctcttatagcaacccatgcagacctactgcttaattctgcaagccagcattctccagacagcttgaagaattctttaaagatgctttcagaaaaaacagagctttttgtacatgccttcaaggatcaacttgtcaggagtgctcttttagcactctacactgcaaggccaggaggcattcttaagaagccaccctctcctaagagcagcacagaggagagcagtccccaagaccaacccccagtgatgagagggcaggactccataccacatcattcagactatgatgaggaagagtgggacagggtgtgggccaatgtggggaagagcctgaactgcattattgctatggtggacaaactgattgaaagagatggtggcagtgaaggcagtggcggcaacaatgatggagaaaaggaaccttcattaacagatgccattccctctcacccaagagaggactggtatgaacagttgtatcccctcatccttaccctgaaggactgcatgggagaagtggtgaaccgagccaagcagtccctgacatttgtgctccttcaggaacttgcgtacagcttgccccagtgtctgatgctgacgctaagaagagacatcgtcttcagccaagcacttgctggattggtttgtggttttatcatcaaattacagacaagtctgtatgacccaggcttcctacagcagcttcacacagtggggttgatagtacaatatgaaggactgctaagtacatacagcgatgaaattggaatgctagaggacatggccgttggcatttccgatttaaagaaagttgcatttaaaataattgaagccaaatccaatgatgtgttgccagttataacaggaagacgagaacattacgtggtagaggtcaagcttccagccagaatgtttgagtcactacctctacagattaaagaaggacagttgcttcatgtgtatccagtactttttaatgttggaatcaatgaacagcaaactctggctgaaaggtttggagatgtctctttgcaagaaagtattaatcaggaaaacttcgaacttctacaagaatattacaagatatttatggaaaagatgcctcctgattatatttcacattttcaggaacaaaatgatttaaaagcattgctagaaaatctccttcaaaatatccaatccaaaaaaagaaagaatgtagaaattatgtggctggctgcaacgatttgccgcaaactgaatggtattcgtttcacctgttgtaaaagtgccaaagacaggacatcgatgtcagtgacacttgaacaatgctcaatcttgagagatgagcaccagttacacaaggacttctttatccgagcgctggattgcatgagaagagaaggatgccgcatagagaatgtactgaagaatatcaaatgcagaaagtatgctttcaacatgctacagctgatggctttccccaagtactacagacctccagaggggacttatggaaaagctgacacctaagtttaccaacatgttaataaacaggaacacaaatacatttcagttggataatcttcaccttggtcttttttgtttgtttttattgtcatgaatttgtggtgggggagatgatcacagatgtttcccaaaatctaggaactacttcaattcatcatcagcatattgctctgaaagaaatccattttaaaaaatcttacatgattcagtactgtcatttctagttctaagcttctatgtgttgagcctagctgattgagattggttcacaaagtgtaaatttcattcatgagtatttaaatgtttctgaggaaacatggatcatttcaataggactaggggtgattcacagagcaccactctccaaccaaatggaagagaggagagggggaaaaggaacatattttttttgtgatacaacttaatagcctatgagaacacagtcaacctgagaatcaatgtaagggatttaaaaaaaatgtgtagccactcaattaggtagagttaactcatgatctggaatactgaggcagtttgcaggtatgttccacaatgatctctatcatccagtcaaggtgtgactcctcccttgcaacaggcatatgcatggagtgagtaaagtggtcaacagacctttcaaaaccatggcatcttttcagaactctgacttgggttgtgtgatctagctgtgaatgtagcaatatagaacgtttaatagaatgataagcaaaacactgcaatgatctaaaatt

SEQ ID NO: 142859 - DNA, 526 bp, Homo sapiens
  Payload ID: 8225
  Gene Symbol: INPP4B
  Gene Name: inositol polyphosphate-4-phosphatase type II B
  ENST ID: ENST00000506000
  CDS Start-End: 249-392
agtcgagatggacctgaggaagaccacatgagggctgatggggaagaggcatttgaagagccttgaaaccagcgaaacaataatcaaagagcagttctgtcaaagaaaacaacataaatcaggtacagaatttcagagtgggatatcagatctttagtgtgaagatacatctacattaaaccaggaatcactagaactgacatttggacaagaaaatttggaaaattttaaaactgtgaaggttgatcatggaaattaaagaggaaggggcatcagaagaagggcagcactttcttcctacagcccaggccaatgatcccggggactgtcagttcacaagtatccagaagactccaaatgaaccgcagttggaattcatccttggaaattaacttcatattcactctgtaagccaccacttgtagaaggtctgttttttttctatggaagcggatgattgtaaaaagtgtcatgtggatatgcaattcagtatacatctgtaccagcatgcaaggatctcgtggct

SEQ ID NO: 142860 - DNA, 2155 bp, Homo sapiens
  Payload ID: 8225
  Gene Symbol: INPP4B
  Gene Name: inositol polyphosphate-4-phosphatase type II B
  ENST ID: ENST00000514525
  CDS Start-End: 98-2155
atatgcagagaaaattatagttagtgaaacaactctgggtgctgtattttacctcttgttattttctagcctgttggtctcttttcttttagggaaaatgatacattttcaccctttaatcctaccccatgagcgaagtttcttgggctatgccagttttaaagtgggagagctgctgaagtcaaaggagcaattgctggtcctgagcctgagaacttcagatggtggcaaagtggttggcaccatagaagtcagtgtcgtgaagatgggggagattgaggatggggaagccgaccacatcaccacagatgtacagggacaaaagtgtgccctggtatgtgaatgtacagccccggaaagtgtgagcggaaaagataacttaccttttttgaattcagtgttaaagaacccagtatgtaaattatatagatttcccacatctgacaataagtggatgcgaattcgagagcagatgtcagagagcattctttcctttcatattcctaaggaattgatttcccttcacattaaagaagatttgtgcagaaaccaggagataaaagaacttggtgagctttctccacattgggacaatctgcgaaaaaatgtccttactcactgtgatcaaatggtgaatatgtaccaagacattctgacagaacttagcaaggaaacagggtcctctttcaaatcaagcagcagcaaaggagagaaaacattagaatttgttccaataaatctacatctgcaaagaatgcaggtacacagccctcacttgaaagatgctctctacgatgtcatcactgtgggagccccagctgcccattttcagggatttaagaatggtggtcttcggaagctactccatagatttgaaacagaaagaagaaataccggataccagtttatttactattcacctgaaaacacagccaaagcaaaggaagttctcagcaacatcaatcaactacaacctcttatagcaacccatgcagacctactgcttaattctgcaagccagcattctccagacagcttgaagaattctttaaagatgctttcagaaaaaacagagctttttgtacatgccttcaaggatcaacttgtcaggagtgctcttttagcactctacactgcaaggccaggaggcattcttaagaagccaccctctcctaagagcagcacagaggagagcagtccccaagaccaacccccagtgatgagagggcaggactccataccacatcattcagactatgatgaggaagagtgggacagggtgtgggccaatgtggggaagagcctgaactgcattattgctatggtggacaaactgattgaaagagatggtggcagtgaaggcagtggcggcaacaatgatggagaaaaggaaccttcattaacagatgccattccctctcacccaagagaggactggtatgaacagttgtatcccctcatccttaccctgaaggactgcatgggagaagtggtgaaccgagccaagcagtccctgacatttgtgctccttcaggaacttgcgtacagcttgccccagtgtctgatgctgacgctaagaagagacatcgtcttcagccaagcacttgctggattggtttgtggttttatcatcaaattacagacaagtctgtatgacccaggcttcctacagcagcttcacacagtggggttgatagtacaatatgaaggactgctaagtacatacagcgatgaaattggaatgctagaggacatggccgttggcatttccgatttaaagaaagttgcatttaaaataattgaagccaaatccaatgatgtgttgccagttataacaggaagacgagaacattacgtggtagaggtcaagcttccagccagaatgtttgagtcactacctctacagattaaagaaggacagttgcttcatgtgtatccagtactttttaatgttggaatcaatgaacagcaaactctggctgaaaggtttggagatgtctctttgcaagaaagtattaatcaggaaaacttcgaacttctacaagaatattacaagatatttatggaaaagatgcctcctgattatatttcacattttcaggaacaaaatgatttaaaagcattgctagaaaatctccttcaaaatatccaatcc

SEQ ID NO: 142861 - DNA, 583 bp, Homo sapiens
  Payload ID: 8225
  Gene Symbol: INPP4B
  Gene Name: inositol polyphosphate-4-phosphatase type II B
  ENST ID: ENST00000503927
  CDS Start-End: 467-583
gcgcacacgctcacacgctcgcaagcgaacgcaggaaagtcaggctaaaagtgtctgctgctgctgccgccccccactccgcctccgggagagaatacaaagaaatggtgttacctggcaagaggtcttctgtcttttatgaaaaattagacaaagggggcgctgttttggggaaatggcagaactccctcagaggctgatctaagggttcccggcagaaggggccatcttcagaggctctggttgcatgactgtttggagtttgatggcctgaagagccttgaaaccagcgaaacaataatcaaagagcagttctgtcaaagaaaacaacataaatcaggtacagaatttcagagtgggatatcagatctttagtgtgaagatacatctacattaaaccaggaatcactagaactgacatttggacaagaaaatttggaaaattttaaaactgtgaaggttgatcatggaaattaaagaggaaggggcatcagaagaagggcagcactttcttcctacagcccaggccaatgatcccggggactgtcagttcacaagtatccagaagactccaaatgaaccg

SEQ ID NO: 142862 - DNA, 4334 bp, Homo sapiens
  Payload ID: 8225
  Gene Symbol: INPP4B
  Gene Name: inositol polyphosphate-4-phosphatase type II B
  ENST ID: ENST00000509777
  CDS Start-End: 346-3162
cgcacacgctcacacgctcgcaagcgaacgcaggaaagtcaggctaaaagtgtctgctgctgctgccgccccccactccgcctccgggagagaatacaaagaaatggtgttacctggcaagaggtcttctgtcttttatgaaaaattagacaaagagccttgaaaccagcgaaacaataatcaaagagcagttctgtcaaagaaaacaacataaatcaggtacagaatttcagagtgggatatcagatctttagtgtgaagatacatctacattaaaccaggaatcactagaactgacatttggacaagaaaatttggaaaattttaaaactgtgaaggttgatcatggaaattaaagaggaaggggcatcagaagaagggcagcactttcttcctacagcccaggccaatgatcccggggactgtcagttcacaagtatccagaagactccaaatgaaccgcagttggaattcatccttgcatgcaaggatctcgtggctcctgtccgtgatcgtaaactgaatacactggtgcagatctccgtaatccaccccgtggagcagagtctgacaagatactccagcaccgaaattgtggagggaacaagggacccactgtttttgactggtgtcacattcccatctgagtatcccatctatgaggagaccaaaataaaactaacagtctatgatgtcaaggataagtctcatgacaccgttcgaaccagtgtcctaccagaacataaggatcccccgccagaagttgggcgaagtttcttgggctatgccagttttaaagtgggagagctgctgaagtcaaaggagcaattgctggtcctgagcctgagaacttcagatggtggcaaagtggttggcaccatagaagtcagtgtcgtgaagatgggggagattgaggatggggaagccgaccacatcaccacagatgtacagggacaaaagtgtgccctggtatgtgaatgtacagccccggaaagtgtgagcggaaaagataacttaccttttttgaattcagtgttaaagaacccagtatgtaaattatatagatttcccacatctgacaataagtggatgcgaattcgagagcagatgtcagagagcattctttcctttcatattcctaaggaattgatttcccttcacattaaagaagatttgtgcagaaaccaggagataaaagaacttggtgagctttctccacattgggacaatctgcgaaaaaatgtccttactcactgtgatcaaatggtgaatatgtaccaagacattctgacagaacttagcaaggaaacagggtcctctttcaaatcaagcagcagcaaaggagagaaaacattagaatttgttccaataaatctacatctgcaaagaatgcaggtacacagccctcacttgaaagatgctctctacgatgtcatcactgtgggagccccagctgcccattttcagggatttaagaatggtggtcttcggaagctactccatagatttgaaacagaaagaagaaataccggataccagtttatttactattcacctgaaaacacagccaaagcaaaggaagttctcagcaacatcaatcaactacaacctcttatagcaacccatgcagacctactgcttaattctgcaagccagcattctccagacagcttgaagaattctttaaagatgctttcagaaaaaacagagctttttgtacatgccttcaaggatcaacttgtcaggagtgctcttttagcactctacactgcaaggccaggaggcattcttaagaagccaccctctcctaagagcagcacagaggagagcagtccccaagaccaacccccagtgatgagagggcaggactccataccacatcattcagactatgatgaggaagagtgggacagggtgtgggccaatgtggggaagagcctgaactgcattattgctatggtggacaaactgattgaaagagatggtggcagtgaaggcagtggcggcaacaatgatggagaaaaggaaccttcattaacagatgccattccctctcacccaagagaggactggtatgaacagttgtatcccctcatccttaccctgaaggactgcatgggagaagtggtgaaccgagccaagcagtccctgacatttgtgctccttcaggaacttgcgtacagcttgccccagtgtctgatgctgacgctaagaagagacatcgtcttcagccaagcacttgctggattggtttgtggttttatcatcaaattacagacaagtctgtatgacccaggcttcctacagcagcttcacacagtggggttgatagtacaatatgaaggactgctaagtacatacagcgatgaaattggaatgctagaggacatggccgttggcatttccgatttaaagaaagttgcatttaaaataattgaagccaaatccaatgatgtgttgccagttataacaggaagacgagaacattacgtggtagaggtcaagcttccagccagaatgtttgagtcactacctctacagattaaagaaggacagttgcttcatgtgtatccagtactttttaatgttggaatcaatgaacagcaaactctggctgaaaggtttggagatgtctctttgcaagaaagtattaatcaggaaaacttcgaacttctacaagaatattacaagatatttatggaaaagatgcctcctgattatatttcacattttcaggaacaaaatgatttaaaagcattgctagaaaatctccttcaaaatatccaatccaaaaaaagaaagaatgtagaaattatgtggctggctgcaacgatttgccgcaaactgaatggtattcgtttcacctgttgtaaaagtgccaaagacaggacatcgatgtcagtgacacttgaacaatgctcaatcttgagagatgagcaccagttacacaaggacttctttatccgagcgctggattgcatgagaagcagacaaacccagggagcactgaatgaatccgatgatcctgaaacaggctgtctaactgataacaagccaacttctcgacacttctatcctgtcgccttgctgcttgtcagctcacacctgctagttgtgtggcttattttaagtctggcgttactcttagccaaataccaataagttttatgttgtattcctttttcttttctacaaatgacaatgaactttaaattatggggacaatgctgtaatatttttacattttcaaattcacagaatttaaaaaatgttaaattgtgtttagtttgtttttcctaaaatctaaaaaacaaaaagtactatgcattaggtggattattttgctcttttgttcatggaaaggtgtttcccactgttaactagctcaagaagaatttttaaattactgtctttggaataagacaaagaacagaatcctgaaagcttgaagttctgaacctcctgtcctcatcccactaaatttattaaagaaattaagactgaaatttgcacaaacactgaaaccctgagacaagttctagagatgtgggaggttgcagactttatttccactgtgctaatatcatagatgccatctgctgatagaaattttttttaacctgttttacttctttgctgcaattaactcttttctgtcaagtaactttatggagagaatggctatttatgttttgtaattaaattacctgtttgtatctcttgtttgggttgatttggctttcagaggacttttctattctttttaacaaggtcttgtttgtgtcttgatgtaccattcccagcacttgtgacttttgtactgtccgtggacaagcactcttcctttataaagctgagacttggcccaggctgttcagaaagccattttctctcttccttgcacagctaaaataataaaatagagatgaaatttttctttaaaaatctatagggccagacttaataaattaaatgccttatttctagaacctgcatccttagggctacatatagattttaatgtgttttaaagagactgagaaattaatttgtggaaatgttataaaaaggcagatatatttatgaaactaaagtggagctgtattgtggagcaaattatatttaaagagtttattaaattttaaatgttaagagtaaagagacttaagtcatctctttcagagggcaataatggtattgggcctggcctaggatttaattttgtaagatgtatcatcacttgtggaaaaaaaaaatgtagagttgaatctttgttatttttacttggatggttgctgcaactctgcattaaacaaataaagcatatttattta

SEQ ID NO: 142863 - DNA, 2953 bp, Homo sapiens
  Payload ID: 8225
  Gene Symbol: INPP4B
  Gene Name: inositol polyphosphate-4-phosphatase type II B
  ENST ID: ENST00000512630
  CDS Start-End: 263-1513
aaaggataaattaaagtcgagatggacctgaggaagaccacatgagggctgatggggaagaggcatttgaagagccttgaaaccagcgaaacaataatcaaagagcagttctgtcaaagaaaacaacataaatcaggtacagaatttcagagtgggatatcagatctttagtgtgaagatacatctacattaaaccaggaatcactagaactgacatttggacaagaaaatttggaaaattttaaaactgtgaaggttgatcatggaaattaaagaggaaggggcatcagaagaagggcagcactttcttcctacagcccaggccaatgatcccggggactgtcagttcacaagtatccagaagactccaaatgaaccgcagttggaattcatccttgcatgcaaggatctcgtggctcctgtccgtgatcgtaaactgaatacactggtgcagatctccgtaatccaccccgtggagcagagtctgacaagatactccagcaccgaaattgtggagggaacaagggacccactgtttttgactggtgtcacattcccatctgagtatcccatctatgaggagaccaaaataaaactaacagtctatgatgtcaaggataagtctcatgacaccgttcgaaccagtgtcctaccagaacataaggatcccccgccagaagttgggcgaagtttcttgggctatgccagttttaaagtgggagagctgctgaagtcaaaggagcaattgctggtcctgagcctgagaacttcagatggtggcaaagtggttggcaccatagaagtcagtgtcgtgaagatgggggagattgaggatggggaagccgaccacatcaccacagatgtacagggacaaaagtgtgccctggtatgtgaatgtacagccccggaaagtgtgagcggaaaagataacttaccttttttgaattcagtgttaaagaacccagtatgtaaattatatagatttcccacatctgacaataagtggatgcgaattcgagagcagatgtcagagagcattctttcctttcatattcctaaggaattgatttcccttcacattaaagaagatttgtgcagaaaccaggagataaaagaacttggtgagctttctccacattgggacaatctgcgaaaaaatgtccttactcactgtgatcaaatggtgaatatgtaccaagacattctgacagaacttagcaaggaaacagggtcctctttcaaatcaagcagcagcaaaggagagaaaacattagaatttgttccaataaatctacatctgcaaagaatgcagatgctctctacgatgtcatcactgtgggagccccagctgcccattttcagggatttaagaatggtggtcttcggaagctactccatagatttgaaacagaaagaagaaataccggataccagtttatttactattcacctgaaaacacagccaaagcaaaggaagttctcagcaacatcaatcaactacaacctcttatagcaacccatgcagacctactgcttaattctgcaagccagcattctccagacagcttgaagaattctttaaagatgctttcagaaaaaacagagctttttgtacatgccttcaaggatcaacttgtcaggagtgctcttttagcactctacactgcaaggccaggaggcattcttaagaagccaccctctcctaagagcagcacagaggagagcagtccccaagaccaacccccagtgatgagagggcaggactccataccacatcattcagactatgatgaggaagagtgggacagggtgtgggccaatgtggggaagagcctgaactgcattattgctatggtggacaaactgattgaaagagatggtggcagtgaaggcagtggcggcaacaatgatggagaaaaggaaccttcattaacagatgccattccctctcacccaagagaggactggtatgaacagttgtatcccctcatccttaccctgaaggactgcatgggagaagtggtgaaccgagccaagcagtccctgacatttgtgctccttcaggaacttgcgtacagcttgccccagtgtctgatgctgacgctaagaagagacatcgtcttcagccaagcacttgctggattggtttgtggttttatcatcaaattacagacaagtctgtatgacccaggcttcctacagcagcttcacacagtggggttgatagtacaatatgaaggactgctaagtacatacagcgatgaaattggaatgctagaggacatggccgttggcatttccgatttaaagaaagttgcatttaaaataattgaagccaaatccaatgatgtgttgccagttataacaggaagacgagaacattacgtggtagaggtcaagcttccagccagaatgtttgagtcactacctctacagattaaagaaggacagttgcttcatgtgtatccagtactttttaatgttggaatcaatgaacagcaaactctggctgaaaggtttggagatgtctctttgcaagaaagtattaatcaggaaaacttcgaacttctacaagaatattacaagatatttatggaaaagatgcctcctgattattctactactcacgaaagattggctggcctcccagtataccagtctagtaagtctgcacataatggcatgaaatcaaaagacataaattcaattgaaagctcacttagatatttcacattttcaggaacaaaatgatttaaaagcattgctagaaaatctccttcaaaatatccaatccaaaaaaagaaagaatgtagaaattatgtggctggctgcaacgatttgccgcaaactgaatggtattcgtttcacctgttgtaaaagtgccaaagacaggacatcgatgtcagtgacacttgaacaatgctcaatcttgagagatgagcaccagttacac

SEQ ID NO: 142864 - DNA, 3165 bp, Homo sapiens
  Payload ID: 8225
  Gene Symbol: INPP4B
  Gene Name: inositol polyphosphate-4-phosphatase type II B
  Uniprot ID: O15327
  ENST ID: ENST00000508116
  CDS Start-End: 354-3128
cccaagaggggtcttactcatccttttccattttggagaggttctgctgactctacattaagcccagacagggtggtgtcctgctttgctcctttctgctctctgcgttcctctgctgccttgatggattctgatgtggttgctcagatgatcagcctgcaggagccttgaaaccagcgaaacaataatcaaagagcagttctgtcaaagaaaacaacataaatcaggtacagaatttcagagtgggatatcagatctttagtgtgaagatacatctacattaaaccaggaatcactagaactgacatttggacaagaaaatttggaaaattttaaaactgtgaaggttgatcatggaaattaaagaggaaggggcatcagaagaagggcagcactttcttcctacagcccaggccaatgatcccggggactgtcagttcacaagtatccagaagactccaaatgaaccgcagttggaattcatccttgcatgcaaggatctcgtggctcctgtccgtgatcgtaaactgaatacactggtgcagatctccgtaatccaccccgtggagcagagtctgacaagatactccagcaccgaaattgtggagggaacaagggacccactgtttttgactggtgtcacattcccatctgagtatcccatctatgaggagaccaaaataaaactaacagtctatgatgtcaaggataagtctcatgacaccgttcgaaccagtgtcctaccagaacataaggatcccccgccagaagttgggcgaagtttcttgggctatgccagttttaaagtgggagagctgctgaagtcaaaggagcaattgctggtcctgagcctgagaacttcagatggtggcaaagtggttggcaccatagaagtcagtgtcgtgaagatgggggagattgaggatggggaagccgaccacatcaccacagatgtacagggacaaaagtgtgccctggtatgtgaatgtacagccccggaaagtgtgagcggaaaagataacttaccttttttgaattcagtgttaaagaacccagtatgtaaattatatagatttcccacatctgacaataagtggatgcgaattcgagagcagatgtcagagagcattctttcctttcatattcctaaggaattgatttcccttcacattaaagaagatttgtgcagaaaccaggagataaaagaacttggtgagctttctccacattgggacaatctgcgaaaaaatgtccttactcactgtgatcaaatggtgaatatgtaccaagacattctgacagaacttagcaaggaaacagggtcctctttcaaatcaagcagcagcaaaggagagaaaacattagaatttgttccaataaatctacatctgcaaagaatgcaggtacacagccctcacttgaaagatgctctctacgatgtcatcactgtgggagccccagctgcccattttcagggatttaagaatggtggtcttcggaagctactccatagatttgaaacagaaagaagaaataccggataccagtttatttactattcacctgaaaacacagccaaagcaaaggaagttctcagcaacatcaatcaactacaacctcttatagcaacccatgcagacctactgcttaattctgcaagccagcattctccagacagcttgaagaattctttaaagatgctttcagaaaaaacagagctttttgtacatgccttcaaggatcaacttgtcaggagtgctcttttagcactctacactgcaaggccaggaggcattcttaagaagccaccctctcctaagagcagcacagaggagagcagtccccaagaccaacccccagtgatgagagggcaggactccataccacatcattcagactatgatgaggaagagtgggacagggtgtgggccaatgtggggaagagcctgaactgcattattgctatggtggacaaactgattgaaagagatggtggcagtgaaggcagtggcggcaacaatgatggagaaaaggaaccttcattaacagatgccattccctctcacccaagagaggactggtatgaacagttgtatcccctcatccttaccctgaaggactgcatgggagaagtggtgaaccgagccaagcagtccctgacatttgtgctccttcaggaacttgcgtacagcttgccccagtgtctgatgctgacgctaagaagagacatcgtcttcagccaagcacttgctggattggtttgtggttttatcatcaaattacagacaagtctgtatgacccaggcttcctacagcagcttcacacagtggggttgatagtacaatatgaaggactgctaagtacatacagcgatgaaattggaatgctagaggacatggccgttggcatttccgatttaaagaaagttgcatttaaaataattgaagccaaatccaatgatgtgttgccagttataacaggaagacgagaacattacgtggtagaggtcaagcttccagccagaatgtttgagtcactacctctacagattaaagaaggacagttgcttcatgtgtatccagtactttttaatgttggaatcaatgaacagcaaactctggctgaaaggtttggagatgtctctttgcaagaaagtattaatcaggaaaacttcgaacttctacaagaatattacaagatatttatggaaaagatgcctcctgattatatttcacattttcaggaacaaaatgatttaaaagcattgctagaaaatctccttcaaaatatccaatccaaaaaaagaaagaatgtagaaattatgtggctggctgcaacgatttgccgcaaactgaatggtattcgtttcacctgttgtaaaagtgccaaagacaggacatcgatgtcagtgacacttgaacaatgctcaatcttgagagatgagcaccagttacacaaggacttctttatccgagcgctggattgcatgagaagagaaggatgccgcatagagaatgtactgaagaatatcaaatgcagaaagtatgctttcaacatgctacagctgatggctttccccaagtactacagacctccagaggggacttatggaaaagctgacacctaagtttaccaacatgttaataaacaggaacacaaataca

SEQ ID NO: 142865 - DNA, 673 bp, Homo sapiens
  Payload ID: 8225
  Gene Symbol: INPP4B
  Gene Name: inositol polyphosphate-4-phosphatase type II B
  Uniprot ID: O15327
  ENST ID: ENST00000506217
  CDS Start-End: 1-396
atggaaattaaagaggaaggggcatcagaagaagggcagcactttcttcctacagcccaggccaatgatcccggggactgtcagttcacaagtatccagaagactccaaatgaaccgcagttggaattcatccttgcatgcaaggatctcgtggctcctgtccgtgatcgtaaactgaatacactggtgcagatctccgtaatccaccccgtggagcagagtctgacaagatactccagcaccgaaattgtggagggaacaagggacccactgtttttgactggtgtcacattcccatctgagtatcccatctatgaggagaccaaaataaaactaacagtctatgatgtcaaggataagtctcatgacaccatagctaactcatccagaatttgagtataagtggatcttgaggtcctcagagctgagacaacttgagacaacttgctcagtcacctgttcaaatgtctgcaggatggttggccaagtgcaagacatcacatgagcttcttgacagctgcacgatggtaacttaatgagacacaacagttttcttgtgaaatagctggacatgcagagaggtcacatgaataataagctcacacctgtgttcccgccacccggatattattcaaagcacaaaacatcataaataaagtcaaggtcctctata

SEQ ID NO: 142866 - DNA, 719 bp, Homo sapiens
  Payload ID: 8225
  Gene Symbol: INPP4B
  Gene Name: inositol polyphosphate-4-phosphatase type II B
  ENST ID: ENST00000506297
  CDS Start-End: 1-102
gagtatcccatctatgaggagaccaaaataaaactaacagtctatgatgtcaaggataagtctcatgacaccttcaggatcaacagattaacttcactgtgaattttttgacccctgaggcaagtgttcaaaccagtattgacttggcttcttccaaccttcattttatgtgtcagctgtgatgcaatacttcaagtgcttcataaagataagggctgcacttttccctcagagcactggccaaataataatcaggttcgaaccagtgtcctaccagaacataaggatcccccgccagaagttgggcgaagtttcttgggctatgccagttttaaagtgggagagctgctgaagtcaaaggagcaattgctggtcctgagcctgagaacttcagatggtggcaaagtggttggcaccatagaagtcagtgtcgtgaagatgggggagattgaggatggggaagccgaccacatcaccacagatgtacagggacaaaagtgtgccctggtatgtgaatgtacagccccggaaagtgtgagcggaaaagataacttaccttttttgaattcagtgttaaagaacccagtatgtaaattatatagatttcccacatctgacaataagtggatgcgaattcgagagcagatgtcagagagcattctttcctttcatattcctaaggaattgatttcccttcacattaaagaagatttgtgcag

SEQ ID NO: 142867 - DNA, 8831 bp, Homo sapiens
  Payload ID: 8225
  Gene Symbol: INPP4B
  Gene Name: inositol polyphosphate-4-phosphatase type II B
  Uniprot ID: O15327
  ENST ID: ENST00000513000
  CDS Start-End: 435-3209
cacacgctcgcaagcgaacgcaggaaagtcaggctaaaagtgtctgctgctgctgccgccccccactccgcctccgggagagaatacaaagaaatggtgttacctggcaagaggtcttctgtcttttatgaaaaattagacaaaggctttacaggaggcatagtactggaaatctgctcctgatgaggtctcagaaagcttccactcgtggtggaaggcaaaggaggagcaggcacatcacatgagccttgaaaccagcgaaacaataatcaaagagcagttctgtcaaagaaaacaacataaatcaggtacagaatttcagagtgggatatcagatctttagtgtgaagatacatctacattaaaccaggaatcactagaactgacatttggacaagaaaatttggaaaattttaaaactgtgaaggttgatcatggaaattaaagaggaaggggcatcagaagaagggcagcactttcttcctacagcccaggccaatgatcccggggactgtcagttcacaagtatccagaagactccaaatgaaccgcagttggaattcatccttgcatgcaaggatctcgtggctcctgtccgtgatcgtaaactgaatacactggtgcagatctccgtaatccaccccgtggagcagagtctgacaagatactccagcaccgaaattgtggagggaacaagggacccactgtttttgactggtgtcacattcccatctgagtatcccatctatgaggagaccaaaataaaactaacagtctatgatgtcaaggataagtctcatgacaccgttcgaaccagtgtcctaccagaacataaggatcccccgccagaagttgggcgaagtttcttgggctatgccagttttaaagtgggagagctgctgaagtcaaaggagcaattgctggtcctgagcctgagaacttcagatggtggcaaagtggttggcaccatagaagtcagtgtcgtgaagatgggggagattgaggatggggaagccgaccacatcaccacagatgtacagggacaaaagtgtgccctggtatgtgaatgtacagccccggaaagtgtgagcggaaaagataacttaccttttttgaattcagtgttaaagaacccagtatgtaaattatatagatttcccacatctgacaataagtggatgcgaattcgagagcagatgtcagagagcattctttcctttcatattcctaaggaattgatttcccttcacattaaagaagatttgtgcagaaaccaggagataaaagaacttggtgagctttctccacattgggacaatctgcgaaaaaatgtccttactcactgtgatcaaatggtgaatatgtaccaagacattctgacagaacttagcaaggaaacagggtcctctttcaaatcaagcagcagcaaaggagagaaaacattagaatttgttccaataaatctacatctgcaaagaatgcaggtacacagccctcacttgaaagatgctctctacgatgtcatcactgtgggagccccagctgcccattttcagggatttaagaatggtggtcttcggaagctactccatagatttgaaacagaaagaagaaataccggataccagtttatttactattcacctgaaaacacagccaaagcaaaggaagttctcagcaacatcaatcaactacaacctcttatagcaacccatgcagacctactgcttaattctgcaagccagcattctccagacagcttgaagaattctttaaagatgctttcagaaaaaacagagctttttgtacatgccttcaaggatcaacttgtcaggagtgctcttttagcactctacactgcaaggccaggaggcattcttaagaagccaccctctcctaagagcagcacagaggagagcagtccccaagaccaacccccagtgatgagagggcaggactccataccacatcattcagactatgatgaggaagagtgggacagggtgtgggccaatgtggggaagagcctgaactgcattattgctatggtggacaaactgattgaaagagatggtggcagtgaaggcagtggcggcaacaatgatggagaaaaggaaccttcattaacagatgccattccctctcacccaagagaggactggtatgaacagttgtatcccctcatccttaccctgaaggactgcatgggagaagtggtgaaccgagccaagcagtccctgacatttgtgctccttcaggaacttgcgtacagcttgccccagtgtctgatgctgacgctaagaagagacatcgtcttcagccaagcacttgctggattggtttgtggttttatcatcaaattacagacaagtctgtatgacccaggcttcctacagcagcttcacacagtggggttgatagtacaatatgaaggactgctaagtacatacagcgatgaaattggaatgctagaggacatggccgttggcatttccgatttaaagaaagttgcatttaaaataattgaagccaaatccaatgatgtgttgccagttataacaggaagacgagaacattacgtggtagaggtcaagcttccagccagaatgtttgagtcactacctctacagattaaagaaggacagttgcttcatgtgtatccagtactttttaatgttggaatcaatgaacagcaaactctggctgaaaggtttggagatgtctctttgcaagaaagtattaatcaggaaaacttcgaacttctacaagaatattacaagatatttatggaaaagatgcctcctgattatatttcacattttcaggaacaaaatgatttaaaagcattgctagaaaatctccttcaaaatatccaatccaaaaaaagaaagaatgtagaaattatgtggctggctgcaacgatttgccgcaaactgaatggtattcgtttcacctgttgtaaaagtgccaaagacaggacatcgatgtcagtgacacttgaacaatgctcaatcttgagagatgagcaccagttacacaaggacttctttatccgagcgctggattgcatgagaagagaaggatgccgcatagagaatgtactgaagaatatcaaatgcagaaagtatgctttcaacatgctacagctgatggctttccccaagtactacagacctccagaggggacttatggaaaagctgacacctaagtttaccaacatgttaataaacaggaacacaaatacatttcagttggataatcttcaccttggtcttttttgtttgtttttattgtcatgaatttgtggtgggggagatgatcacagatgtttcccaaaatctaggaactacttcaattcatcatcagcatattgctctgaaagaaatccattttaaaaaatcttacatgattcagtactgtcatttctagttctaagcttctatgtgttgagcctagctgattgagattggttcacaaagtgtaaatttcattcatgagtatttaaatgtttctgaggaaacatggatcatttcaataggactaggggtgattcacagagcaccactctccaaccaaatggaagagaggagagggggaaaaggaacatattttttttgtgatacaacttaatagcctatgagaacacagtcaacctgagaatcaatgtaagggatttaaaaaaaatgtgtagccactcaattaggtagagttaactcatgatctggaatactgaggcagtttgcaggtatgttccacaatgatctctatcatccagtcaaggtgtgactcctcccttgcaacaggcatatgcatggagtgagtaaagtggtcaacagacctttcaaaaccatggcatcttttcagaactctgacttgggttgtgtgatctagctgtgaatgtagcaatatagaacgtttaatagaatgataagcaaaacactgcaatgatctaaaattacaaataaaataaaaatgaacaacattttgatacccaaaatgaaaattcccatcagcctgaactttatgttgtgaagttcatgaatgtcagtgaggtatctctgagatgtttcttagcagtcatcctggtgtaagcatgcagttatggcataggtttgtgtgtgttaataagcctttaaaacatatgcaaccacaacaaatgataaagtaaaacaattattttctgttgccctgaatatcaaacttgcccttgcccttactcagcaaaataacatttataagttttccaaaatcccaaagtagaagtttccttaaaaaaatcatcttgtataataccagtattcaaacatgggtaaggttaatcacccccaatcactcaggagatagttgcagaatttgaattacaatctcttcttactttcctagcctgtggcttgtcacttctccaaattgccatgctaaatatgcatgaaaattgagggagaatgctagttaaaaagaaattaggatttatcactggaattgaaactaagagtacaaaagtctgaacgaatgaaacttttctccaaattttacaaattcttgttcctttctcattagaagagcatgctatccaaagcataaatctcccttgaaaataacagaggcttcttaagccctctcttagctatgatcaatggatgatattatgcttcccatagctaatgtgatagctccttgcctaggattcctgttgaaataaggattctagccccatgttaagtttttcaaattactacaaattttagataagcatttggagctttttatactagaattatcaattttttattttagctaattacctgtgggcattatacttgaggcaggtaccaaactacttacagcctttttaatgaaaatgtgctgtgtactttgaatccattcatagacaaaattaccttgatgttctcttaactcattctttattttagtgattaaatacaacctttgagttgttcaatatcatttgaaaatggtaggatttgtggttattttcattaccctattagatttaagataggctgggatgacagaggcctccttgaatagctatgaagcctcattcagcatatcaaatggtagtctgagttctaagaaaccttaagtaatttatcattctgtaaatactcttataagcaataatttttatttgtatttttgaaaacaaactacttaaatatggaaaaatattaactggaaagccagcagtagggttttctatttttaaaagacatttcaaggatttcctgtaatcccagcactttgggagccaaggtggatagatcacctgaggtcaggaattggagatcagcctggccaacatggtgaaaccccatctctactaaagatacaaaaattagctggatgtggtggcacacacgtgtaatcccagctacttgggaggctgaggcaagagaatcgcttgaaccccggaggcggaggttgcagtgagctgagatcatgccattgcactccagcctgggtgaaaagagcgaaactccatctttaaataagtaaataaatgaataatatagaagtctcaaattatagtgcttactgtaatacaaatgcttatgaattttcattcattaccatagtcatctgcatttccttatagaaagcctgtactggtgcaaacttctaaaagtggatttcatcaagaaaatgtgtttcatagagacaacaatattgcttttttcctgagaggcagttcattcttaaacaaccacttcactatttcttaagttattaaggctaaatcaaagagcaaatgttaaagtgtttaaatctctcttgaacaaacacagccacagtcatgctattctatctatattttcacttaaaagatacaccagcagacctattttaggaggtcatattgagccaaaaaatgaactgagcaaatgacatttccaaactctttttttgctcaaaaataatatgttcccctttgatattaaatgcagatatcaattctggattagctatttactgagccctaggaaaaacatatttaaagacaaggaaaccattcatttacatctcatatcattgctttttgcttttaaatatcgccttgaggtttgtctacactctgccaaaacaatccctgaacataagtttggtcagcctcataattcagtgagtcgagcaaccatttgttccaagtgataaattgtactaaatgacaaactgcccaatcagggcagagctccatggacccagcctccagcccttattttataagactaacccctcttctgaaaaactctgaaggcttaaaagctagcatttggatggaggatacttcctttttatccttcagctatgtatggcactttacataaaataagaggtaaaaaaggagagaaactgatgtgtataaagtaatgcctttcttcccaagcaaatcaaacctctccctatgtaaaagttgatagtgtaccaagagacacaataccactggtgggctggaactagctcgttctgatgcataaaagttgataattaaagtaccagaaattttgtaagctagttgttaaacattaccattattaaatatgaaattataaaacacagtggaatacattaaaaaccaatgtaataatcaaaacataccacttcccaattattttactaccttatactatttattagtactcttgagtctatttaggtctattacatctttacagtgaaaacaggatacaatattgtgctactgtgggtctcttcctgactgcagattcagtaacatggtgttcgtagcttgaaactgtccacagtgggagtatttaacaccatagaaactggctggcaaatgctacaaactagcaattttaattcctggaaaggcaattgttgagcatttaccagcacacaatgaatgccatattcttttttttttattaggaaataaattattggaggcagtataaaattatttaaaaagtatcaaatgcaatcccttatcttcagatggctataattttggttatataaatgttttggtttttaccttctttaaagactcctattaggttaaaagtcatatttgatgactatattttattcataattaaattattaaatcaccttttctcctgataatgctttgccagagaattcttagcaattcaactgtagtctaagcaataactcagggctaaattcagggaactgttagcccaatcagatatcactaaaaatgtacttcaccatctattttggagtttataattttggcatttgctaaaagtaggaaaaacagtaacatattactgtgcccagattctaataaatatagctcaattgaaaccaaaactgttacattaaacaaattacactctggcactatgctaaatcaccacagatgttttaggtgtttgatttccaagcaggatggtatatcatttgtttggttcaatatatgaggcaccatttgtagtcttttaggaaataaattagcttttatcacagatttaggaaacttgtctaaaaaaactgtgatcatcagttacagagggaaggaaacatattgaacacaaggcatcatagtagctggaggccttaaaaattatgcacgaccaaaaagaatgatttggtgagagatgtgtagctgattgacaattttagtgtgaattcatattcatttaacccagcagcaatctacataagctatgctttttcccacctgtatttatgtttcttagcttataaagtcccaatatattatatcttttgttgctttggcagttttaatttagagctctgcgttcacagagatgccacctatagcaaaaactatctttaagaattggaaaataaaatgaatgttttagataaaatattgcaagccattatgtgtagagttaatgtatggaaatttgcatttgtttttctgaatcatggtgtacattaatcactcattgaattctatttctaagcaaataagagaatcaaacatttctaaaaggaacatatgtcttgctattaataacaaggagacaggaaaaatagtaaggtaatataagcaaaaaaaaaaatgtaatgaatttagctatcctaaattggaatttttacagattgcatgcatacttagaattttaaatttttaaaagatttacaattgagtatggtacccacagagagtgagtaccaagggaaggaagacctaatacaagtgatgttgcctgataaatcacatcttgccaaaaaaaatatattttagtaaatacagttctttaggaagaaaaatgttgccctttcacactcacagtgtaaatacattcataatattccttcaatcatctaaattaccgccaggtcatgaaaggacgcgatcaatgatgacctattgcactcacaggtaacattgactcaaattttggcaatattgctatattatctagataattcttgtgatgtttttatgtcactatcaacattaaaaatattttgttaaacaactatgaaactttcaaaagtttgcatataactgtatgggcactctcatttcactgcatacatacaatactttgtatacacatacttctcgtgtggatattttataattttatttaatctaacatttaacttttaggtttttgtggtactcatctgaaaggttggcatttgttttctttttatgttatatatgtattttagatgaatcaataatgtgtattcctagaaattttttctaggcataaatagatcattttatgttggcatttaagagatatcatttttgttttattgttctgtgtaaaccatattcattgtacactgtgtgtatatttttgtttaaataaatgatttttatttttta

SEQ ID NO: 142868 - DNA, 570 bp, Homo sapiens
  Payload ID: 8225
  Gene Symbol: INPP4B
  Gene Name: inositol polyphosphate-4-phosphatase type II B
  ENST ID: ENST00000507462
  CDS Start-End: 1-196
aatccaccccgtggagcagagtctgacaagatactccagcaccgaaattgtggagggaacaagggacccactgtttttgactggtgtcacattcccatctgagtatcccatctatgaggagaccaaaataaaactaacagtctatgatgtcaaggataagtctcatgacaccatagctaactcatccagaatttgagtataagtggatcttgaggtcctcagagctgagacaacttgagacaacttgctcagtcacctgttcaaatgtctgcaggatggttggccaagtgcaagacatcacatgagcttcttgacagctgcacgatggttcgaaccagtgtcctaccagaacataaggatcccccgccagaagttgggcgaagtttcttgggctatgccagttttaaagtgggagagctgctgaagtcaaaggagcaattgctggtcctgagcctgagaacttcagatggtggcaaagtggttggcaccatagaagtcagtgtcgtgaagatgggggagattgaggatggggaagccgaccacatcaccacagatgtacagggacaaaag

SEQ ID NO: 142869 - DNA, 2265 bp, Homo sapiens
  Payload ID: 8225
  Gene Symbol: INPP4B
  Gene Name: inositol polyphosphate-4-phosphatase type II B
  ENST ID: ENST00000511838
  CDS Start-End: 201-2265
atatctggaatacaaagttgttgctgccagtgatttgaggaattctaataagaggaacaacagcattgcgaagtttcttgggctatgccagttttaaagtgggagagctgctgaagtcaaaggagcaattgctggtcctgagcctgagaacttcagatggtggcaaagtggttggcaccatagaagtcagtgtcgtgaagatgggggagattgaggatggggaagccgaccacatcaccacagatgtacagggacaaaagtgtgccctggtatgtgaatgtacagccccggaaagtgtgagcggaaaagataacttaccttttttgaattcagtgttaaagaacccagtatgtaaattatatagatttcccacatctgacaataagtggatgcgaattcgagagcagatgtcagagagcattctttcctttcatattcctaaggaattgatttcccttcacattaaagaagatttgtgcagaaaccaggagataaaagaacttggtgagctttctccacattgggacaatctgcgaaaaaatgtccttactcactgtgatcaaatggtgaatatgtaccaagacattctgacagaacttagcaaggaaacagggtcctctttcaaatcaagcagcagcaaaggagagaaaacattagaatttgttccaataaatctacatctgcaaagaatgcaggtacacagccctcacttgaaagatgctctctacgatgtcatcactgtgggagccccagctgcccattttcagggatttaagaatggtggtcttcggaagctactccatagatttgaaacagaaagaagaaataccggataccagtttatttactattcacctgaaaacacagccaaagcaaaggaagttctcagcaacatcaatcaactacaacctcttatagcaacccatgcagacctactgcttaattctgcaagccagcattctccagacagcttgaagaattctttaaagatgctttcagaaaaaacagagctttttgtacatgccttcaaggatcaacttgtcaggagtgctcttttagcactctacactgcaaggccaggaggcattcttaagaagccaccctctcctaagagcagcacagaggagagcagtccccaagaccaacccccagtgatgagagggcaggactccataccacatcattcagactatgatgaggaagagtgggacagggtgtgggccaatgtggggaagagcctgaactgcattattgctatggtggacaaactgattgaaagagatggtggcagtgaaggcagtggcggcaacaatgatggagaaaaggaaccttcattaacagatgccattccctctcacccaagagaggactggtatgaacagttgtatcccctcatccttaccctgaaggactgcatgggagaagtggtgaaccgagccaagcagtccctgacatttgtgctccttcaggaacttgcgtacagcttgccccagtgtctgatgctgacgctaagaagagacatcgtcttcagccaagcacttgctggattggtttgtggttttatcatcaaattacagacaagtctgtatgacccaggcttcctacagcagcttcacacagtggggttgatagtacaatatgaaggactgctaagtacatacagcgatgaaattggaatgctagaggacatggccgttggcatttccgatttaaagaaagttgcatttaaaataattgaagccaaatccaatgatgtgttgccagttataacaggaagacgagaacattacgtggtagaggtcaagcttccagccagaatgtttgagtcactacctctacagattaaagaaggacagttgcttcatgtgtatccagtactttttaatgttggaatcaatgaacagcaaactctggctgaaaggtttggagatgtctctttgcaagaaagtattaatcaggaaaacttcgaacttctacaagaatattacaagatatttatggaaaagatgcctcctgattatatttcacattttcaggaacaaaatgatttaaaagcattgctagaaaatctccttcaaaatatccaatccaaaaaaagaaagaatgtagaaattatgtggctggctgcaacgatttgccgcaaactgaatggtattcgtttcacctgttgtaaaagtgccaaagacaggacatcgatgtcagtgacacttgaacaatgctcaatcttgagagatgagcaccagttacacaaggacttctttatcc

SEQ ID NO: 142870 - DNA, 1506 bp, Homo sapiens
  Payload ID: 8225
  Gene Symbol: INPP4B
  Gene Name: inositol polyphosphate-4-phosphatase type II B
  ENST ID: ENST00000507861
  CDS Start-End: 374-535
agacagcagaaggatcactgggctggaagctctaacaggcattgccagcctagctacctgcagtttgaggcaagggcagggtcacttaccctgctgtctgaatgtctcctgggacaacaggaggctgcactcactggctgagttcagacagaagagggatcatcggactggaagctctggcagagccttgaaaccagcgaaacaataatcaaagagcagttctgtcaaagaaaacaacataaatcaggtacagaatttcagagtgggatatcagatctttagtgtgaagatacatctacattaaaccaggaatcactagaactgacatttggacaagaaaatttggaaaattttaaaactgtgaaggttgatcatggaaattaaagaggaaggggcatcagaagaagggcagcactttcttcctacagcccaggccaatgatcccggggactgtcagttcacaagtatccagaagactccaaatgaaccgcagttggaattcatccttgatttgaatcaagaattaagagattagcagctgcaagaatttattcataataatgttctaccagtataaaaaacttcaatttctttttttatatatatttttaaaatatactaagaaacaacaacagataattttatcttgtcaaatggcaagaaatgcttgatgagcgaacacaagtttactaaaaaaatattatttcaagtcatcatggaactgtattgttgatcctagaagacacagtccccaaactgttaggttccttagcactttaagatcttcaactacaccatttcttgaagaattttttaaaaactactctttcaagggtattacagataaacccgtggatgttttactgtccatttttgtcatttttttctttgagattttttaattccacaaatcctccgacgtcacctattattgtatgagtaacttctattcatttcccaatgaaagaataatagcttcttaaatatttttatcatgtttaagggtgtgcatatttatttaatcagaagtaaaacaagaacaaattctaggaaaaagaaattcagtaaggaagagggctttttcgtctaattttaactaaatctttgatatttgattctctactcttaaccaaagtattcaaattatttaggaatttcaatgaccttgctttctaaattaggaaaacagccacaccaatcaatttgctaggtgccatattgctttgtataagttattttccatcaaggatttgtgtctgctttgtgtgctgctatataataattatgtcttgctgaagttcttctgcttattgaattcctctactgaagttccttacttattcaaataagtaaggtaggaggtacttagtcaattgagcagctaattggctaaaagtgtcttgagcacaagataagcatgtactgaaaaactgagtatctcttgtccattgttaactgtatttctaatggttgattgcatttaaattaaataattcacccctacaa

SEQ ID NO: 142871 - DNA, 563 bp, Homo sapiens
  Payload ID: 8225
  Gene Symbol: INPP4B
  Gene Name: inositol polyphosphate-4-phosphatase type II B
  ENST ID: ENST00000506788
  CDS Start-End: 312-563
aaagcgcagatggggagagtcatttgccccacaccctacacagcccggaataaccaggaatacaaagaaatggtgttacctggcaagaggtcttctgtcttttatgaaaaattagacaaagagccttgaaaccagcgaaacaataatcaaagagcagttctgtcaaagaaaacaacataaatcaggtacagaatttcagagtgggatatcagatctttagtgtgaagatacatctacattaaaccaggaatcactagaactgacatttggacaagaaaatttggaaaattttaaaactgtgaaggttgatcatggaaattaaagaggaaggggcatcagaagaagggcagcactttcttcctacagcccaggccaatgatcccggggactgtcagttcacaagtatccagaagactccaaatgaaccgcagttggaattcatccttgcatgcaaggatctcgtggctcctgtccgtgatcgtaaactgaatacactggtgcagatctccgtaatccaccccgtggagcagagtctgacaagatactccagcaccgaaattgtg

SEQ ID NO: 142872 - DNA, 2855 bp, Homo sapiens
  Payload ID: 8225
  Gene Symbol: INPP4B
  Gene Name: inositol polyphosphate-4-phosphatase type II B
  ENST ID: ENST00000510812
  CDS Start-End: 404-2855
ggatgtttcctgccctcgaacatcagaatccatgtttttcagcttttgggctcttggacttacaccagtggtttgccagggccccccagccttcgaccacagattgaaggctacactgttggcctccctacttttgaggttttggaacttggactggcttccttgctcctcagtttgcagacagcctattgtggaacttcaccttgtgatcgtagccttgaaaccagcgaaacaataatcaaagagcagttctgtcaaagaaaacaacataaatcaggtacagaatttcagagtgggatatcagatctttagtgtgaagatacatctacattaaaccaggaatcactagaactgacatttggacaagaaaatttggaaaattttaaaactgtgaaggttgatcatggaaattaaagaggaaggggcatcagaagaagggcagcactttcttcctacagcccaggccaatgatcccggggactgtcagttcacaagtatccagaagactccaaatgaaccgcagttggaattcatccttgcatgcaaggatctcgtggctcctgtccgtgatcgtaaactgaatacactggtgcagatctccgtaatccaccccgtggagcagagtctgacaagatactccagcaccgaaattgtggagggaacaagggacccactgtttttgactggtgtcacattcccatctgagtatcccatctatgaggagaccaaaataaaactaacagtctatgatgtcaaggataagtctcatgacaccgttcgaaccagtgtcctaccagaacataaggatcccccgccagaagttgggcgaagtttcttgggctatgccagttttaaagtgggagagctgctgaagtcaaaggagcaattgctggtcctgagcctgagaacttcagatggtggcaaagtggttggcaccatagaagtcagtgtcgtgaagatgggggagattgaggatggggaagccgaccacatcaccacagatgtacagggacaaaagtgtgccctggtatgtgaatgtacagccccggaaagtgtgagcggaaaagataacttaccttttttgaattcagtgttaaagaacccagtatgtaaattatatagatttcccacatctgacaataagtggatgcgaattcgagagcagatgtcagagagcattctttcctttcatattcctaaggaattgatttcccttcacattaaagaagatttgtgcagaaaccaggagataaaagaacttggtgagctttctccacattgggacaatctgcgaaaaaatgtccttactcactgtgatcaaatggtgaatatgtaccaagacattctgacagaacttagcaaggaaacagggtcctctttcaaatcaagcagcagcaaaggagagaaaacattagaatttgttccaataaatctacatctgcaaagaatgcaggtacacagccctcacttgaaagatgctctctacgatgtcatcactgtgggagccccagctgcccattttcagggatttaagaatggtggtcttcggaagctactccatagatttgaaacagaaagaagaaataccggataccagtttatttactattcacctgaaaacacagccaaagcaaaggaagttctcagcaacatcaatcaactacaacctcttatagcaacccatgcagacctactgcttaattctgcaagccagcattctccagacagcttgaagaattctttaaagatgctttcagaaaaaacagagctttttgtacatgccttcaaggatcaacttgtcaggagtgctcttttagcactctacactgcaaggccaggaggcattcttaagaagccaccctctcctaagagcagcacagaggagagcagtccccaagaccaacccccagtgatgagagggcaggactccataccacatcattcagactatgatgaggaagagtgggacagggtgtgggccaatgtggggaagagcctgaactgcattattgctatggtggacaaactgattgaaagagatggtggcagtgaaggcagtggcggcaacaatgatggagaaaaggaaccttcattaacagatgccattccctctcacccaagagaggactggtatgaacagttgtatcccctcatccttaccctgaaggactgcatgggagaagtggtgaaccgagccaagcagtccctgacatttgtgctccttcaggaacttgcgtacagcttgccccagtgtctgatgctgacgctaagaagagacatcgtcttcagccaagcacttgctggattggtttgtggttttatcatcaaattacagacaagtctgtatgacccaggcttcctacagcagcttcacacagtggggttgatagtacaatatgaaggactgctaagtacatacagcgatgaaattggaatgctagaggacatggccgttggcatttccgatttaaagaaagttgcatttaaaataattgaagccaaatccaatgatgtgttgccagttataacaggaagacgagaacattacgtggtagaggtcaagcttccagccagaatgtttgagtcactacctctacagattaaagaaggacagttgcttcatgtgtatccagtactttttaatgttggaatcaatgaacagcaaactctggctgaaaggtttggagatgtctctttgcaagaaagtattaatcaggaaaacttcgaacttctacaagaatattacaagatatttatggaaaagatgcctcctgattatatttcacattttcaggaacaaaatgatttaaaagcattgctagaaaatctccttcaaaatatccaatccaaaaaaa

SEQ ID NO: 142873 - DNA, 354 bp, Homo sapiens
  Payload ID: 8225
  Gene Symbol: INPP4B
  Gene Name: inositol polyphosphate-4-phosphatase type II B
  ENST ID: ENST00000630044
  CDS Start-End: 193-354
agagccttgaaaccagcgaaacaataatcaaagagcagttctgtcaaagaaaacaacataaatcaggtacagaatttcagagtgggatatcagatctttagtgtgaagatacatctacattaaaccaggaatcactagaactgacatttggacaagaaaatttggaaaattttaaaactgtgaaggttgatcatggaaattaaagaggaaggggcatcagaagaagggcagcactttcttcctacagcccaggccaatgatcccggggactgtcagttcacaagtatccagaagactccaaatgaaccgcagttggaattcatccttgatttgaatcaagaattaagagattag

SEQ ID NO: 142874 - DNA, 832 bp, Homo sapiens
  Payload ID: 8226
  Gene Symbol: INPP5A
  Gene Name: inositol polyphosphate-5-phosphatase A
  ENST ID: ENST00000342652
  CDS Start-End: 1-832
gcagaagaactggcttcgggaattttaccaggtcgtgcacacacacaagccgcacttcatggccttgcactgtcaggagtttggagggaagaactacgaggcctccatgtcccacgtggacaagttcgtcaaagaactattgtcgagtgatgcgatgaaagaatataacagggctcgagtctacctggatgaaaactacaaatcccaggagcacttcacggcactaggaagcttttattttcttcatgagtccttaaaaaacatctaccagtttgactttaaagctaagaagtatagaaaggtcgctggcaaagagatctactcggataccttagagagcacgcccatgctggagaaggagaagtttccgcaggactacttccccgagtgcaaatggtcaagaaaaggcttcatccggacgaggtggtgcattgcagactgtgcctttgacttggtgaatatccatcttttccatgatgcttccaatctggtcgcctgggaaacaagcccttccgtgtactcgggaatccggcacaaggcactgggctacgtgctggacagaatcattgatcagcgattcgagaaggtttcctactttgtatttggtgatttcaacttccggctggattccaagtccgtcgtggagctcttggagtttgacaaggagttgtctgtctttaaggacagactgtatgaactggacatctcgttccctcccagctacccgtacagtgaggacgcccgccagggtgagcagtacatgaacacccggtgcccagcctggtgtgaccgcatcctcatgtccccgtctgccaaggagctggtgctgcgg

SEQ ID NO: 142875 - DNA, 1432 bp, Homo sapiens
  Payload ID: 8226
  Gene Symbol: INPP5A
  Gene Name: inositol polyphosphate-5-phosphatase A
  ENST ID: ENST00000368593
  CDS Start-End: 249-1412
gcgcgggccgctgtgaggcgcggcggcgagcgacgggcgcggggccgcggagcagcgagcgagcgagcgagcgcgaggccggagccccggccaggcccggccgacccgccgagcccgcgatgcgccccggggccgccccccggcgcagctgacgccccgcggccccgcgaagaccccggccggccggtcccggaggaagcggccgccgccgccgccgcccagcccagcgcccgcgccgcccgggcaccatggcggggaaggcggccgccccgggcaccgcggtgctgctggtcacggccaacgtgggctcgctcttcgacgacccagaaaacctgcagaagaactggcttcgggaattttaccaggtcgtgcacacacacaagccgcacttcatggccttgcactgtcaggagtttggagggaagaactacgaggcctccatgtcccacgtggacaagttcgtcaaagaactattgtcgagtgatgcgatgaaagaatataacagggctcgagtctacctggatgaaaactacaaatcccaggagcacttcacggcactaggaagcttttattttcttcatgagtccttaaaaaacatctaccagtttgactttaaagctaagaagtatagaaaggtcgctggcaaagagatctactcggataccttagagagcacgcccatgctggagaaggagaagtttccgcaggactacttccccgagtgcaaatggtcaagaaaaggcttcatccggacgaggtggtgcattgcagactgtgcctttgacttggtgaatatccatcttttccatgatgcttccaatctggtcgcctgggaaacaagcccttccgtgtactcgggaatccggcacaaggcactgggctacgtgctggacagaatcattgatcagcgattcgagaaggtttcctactttgtatttggtgatttcaacttccggctggattccaagtccgtcgtggagacgctctgcacaaaagccaccatgcagacggtccgggccgccgacaccaatgaagtggtgaagctcatatttcgtgagtcggacaacgaccggaaggttatgctccagttagaaaagaaactcttcgactacttcaaccaggaggttttccgagacaacaacggcaccgcgctcttggagtttgacaaggagttgtctgtctttaaggacagactgtatgaactggacatctcgttccctcccagctacccgtacagtgaggacgcccgccagggtgagcagtacatgaacacccggtgcccagcctggtgtgaccgcatcctcatgtccccgtctgccaaggagctggtgctgcgggtgagtgtgtgctgccccagccctgggcacagagggatgtggagcgctgggtctggtctggcccagccctggtgacagggccccaggggtggggg

SEQ ID NO: 142876 - DNA, 2967 bp, Homo sapiens
  Payload ID: 8226
  Gene Symbol: INPP5A
  Gene Name: inositol polyphosphate-5-phosphatase A
  Uniprot ID: Q14642
  ENST ID: ENST00000368594
  CDS Start-End: 278-1516
ggaactttcccagcggatctaatggctgcgcgcgggccgctgtgaggcgcggcggcgagcgacgggcgcggggccgcggagcagcgagcgagcgagcgagcgcgaggccggagccccggccaggcccggccgacccgccgagcccgcgatgcgccccggggccgccccccggcgcagctgacgccccgcggccccgcgaagaccccggccggccggtcccggaggaagcggccgccgccgccgccgcccagcccagcgcccgcgccgcccgggcaccatggcggggaaggcggccgccccgggcaccgcggtgctgctggtcacggccaacgtgggctcgctcttcgacgacccagaaaacctgcagaagaactggcttcgggaattttaccaggtcgtgcacacacacaagccgcacttcatggccttgcactgtcaggagtttggagggaagaactacgaggcctccatgtcccacgtggacaagttcgtcaaagaactattgtcgagtgatgcgatgaaagaatataacagggctcgagtctacctggatgaaaactacaaatcccaggagcacttcacggcactaggaagcttttattttcttcatgagtccttaaaaaacatctaccagtttgactttaaagctaagaagtatagaaaggtcgctggcaaagagatctactcggataccttagagagcacgcccatgctggagaaggagaagtttccgcaggactacttccccgagtgcaaatggtcaagaaaaggcttcatccggacgaggtggtgcattgcagactgtgcctttgacttggtgaatatccatcttttccatgatgcttccaatctggtcgcctgggaaacaagcccttccgtgtactcgggaatccggcacaaggcactgggctacgtgctggacagaatcattgatcagcgattcgagaaggtttcctactttgtatttggtgatttcaacttccggctggattccaagtccgtcgtggagacgctctgcacaaaagccaccatgcagacggtccgggccgccgacaccaatgaagtggtgaagctcatatttcgtgagtcggacaacgaccggaaggttatgctccagttagaaaagaaactcttcgactacttcaaccaggaggttttccgagacaacaacggcaccgcgctcttggagtttgacaaggagttgtctgtctttaaggacagactgtatgaactggacatctcgttccctcccagctacccgtacagtgaggacgcccgccagggtgagcagtacatgaacacccggtgcccagcctggtgtgaccgcatcctcatgtccccgtctgccaaggagctggtgctgcggtcggagagcgaggagaaggttgtcacctatgaccacattgggcccaacgtctgcatgggagaccacaagcccgtgttcctggccttccgaatcatgcccggggcaggtaaacctcatgcccatgtgcacaagtgttgtgtcgtgcagtgacgtggtgggaagagatgccagcgccacgagaggacacttcgtgagcctccctgtagccgtggaccgaatacgcactcttgaaagctgcatcgagaacccgcccaagcgccacctgctagacggccagccccacacttcgcttcagcctccggaccattccggagcagcctcacatacctcactgtctcgtctgtctatgtgacattaagtagaaatattggttttttttttttttttttaaataagtcacagtcctgttgtcaaaactctaatagacagcaaagagggtctgtaccgtagacttcacagttttcagtttttaatgattgccagtggaggggcttcttcagcacagagaccccccactgtgtccagggaccccctctgccaggtggaggtgtgtccaggggctggggaagccgagacgggcactccctctgccggccggcagcgtggccctgagcatggcaagggggtctgtctctgccgatgctccttccgcggcactgactctgcgccgtgtcacatggtttttgaatcacactgcagctgctttccatttttatatatatataaatatatataaatatatactttttaaaaataatttataaatcttaccaaaacttatgctaaatatactttccagtatgaacgcacaggagagtcccatcagcaggcggcattggagtctaggagctcagctgtgtgtccatcaacacacaaattcgtaaaaaacacacatggcctcgccatcgtgggtaaaatcggccccacagcacgtctgcaccagcgggccgttactcccatgccgttcttctgtgtaatattaagaactgaatgtgaagtttatagctagcctgggtgtaccttttaagaattttgtaaaccgtttgtctgtcttttgttactgttttatggtgccaagtatcctacgttacaacaataatatcatgggagaaatagaaatagcctagtttgcttccaatagaaactgcttttaacatgggctgtatataaaaatattaaagagaaacaaaactgtacatttcctcattgctccgctacagacaacccatgtcataaccttgttgcaaatatttttctcctatagcagtaagtacagcattagaaggtgattagagagtctgttgatgaaacacaaatgtatgttttattgattttactttagaacactacagagttcctggaccgggtgaaggcattagctgggtgtttgtgtgggataaatactaccactgcaagtgactgctgtccgctgcggaatctgttcttggtggaagcacaggtccgtgtcgctgctgtggttgccgctgtccgcggttcaacacggagtccgccccgcgggtttcagctgttggtcgttctgaggggcctttggaagtgaccggtctggttcctaagcaataaaattgaccgtggtgaaaata

SEQ ID NO: 142877 - DNA, 610 bp, Homo sapiens
  Payload ID: 8226
  Gene Symbol: INPP5A
  Gene Name: inositol polyphosphate-5-phosphatase A
  ENST ID: ENST00000445580
  CDS Start-End: 1-315
ctggacatctcgttccctcccagctacccgtacagtgaggacgcccgccagggtgagcagtacatgaacacccggtgcccagcctggtgtgaccgcatcctcatgtccccgtctgccaaggagctggtgctgcggtcggagagcgaggagaaggttgtcacctatgaccacattgggcccaacgtctgcatgggagaccacaagcccgtgttcctggccttccgaatcatgcccggggcagggaagagatgccagcgccacgagaggacacttcgtgagcctccctgtagccgtggaccgaatacgcactcttgaaagctgcatcgagaacccgcccaagcgccacctgctagacggccagccccacacttcgcttcagcctccggaccattccggagcagcctcacatacctcactgtctcgtctgtctatgtgacattaagtagaaatattggttttttttttttttttttaaataagtcacagtcctgttgtcaaaactctaatagacagcaaagagggtctgtaccgtagacttcacagttttcagtttttaatgattgccagtggaggggcttcttcagcacagagaccccccactgtgtccagg

SEQ ID NO: 142878 - DNA, 416 bp, Homo sapiens
  Payload ID: 8226
  Gene Symbol: INPP5A
  Gene Name: inositol polyphosphate-5-phosphatase A
  ENST ID: ENST00000423490
  CDS Start-End: 1-416
gtcacggccaacgtgggctcgctcttcgacgacccagaaaacctgcagaagaactggcttcgggaattttaccaggcactaggaagcttttattttcttcatgagtccttaaaaaacatctaccagtttgactttaaagctaagaagtatagaaaggtcgctggcaaagagatctactcggataccttagagagcacgcccatgctggagaaggagaagtttccgcaggactacttccccgagtgcaaatggtcaagaaaaggcttcatccggacgaggtggtgcattgcagactgtgcctttgacttggtgaatatccatcttttccatgatgcttccaatctggtcgcctgggaaacaagcccttccgtgtactcgggaatccggcacaaggcactgggctacgtgctggacag

SEQ ID NO: 142879 - DNA, 3934 bp, Homo sapiens
  Payload ID: 8227
  Gene Symbol: INPP5B
  Gene Name: inositol polyphosphate-5-phosphatase B
  ENST ID: ENST00000373021
  CDS Start-End: 27-986
ggtgtgtgcgctcagcaggggccagcatggaccagtctgtggcaatccaggagacgctggctgagggggaatactgcgtcatcgcggtgcaaggtgtgctgtgtgagggggacagccggcagagccgcctcctgggactcgtgcgctaccgcctggagcacggcggccaggaacacgctctcttcctctatacgcaccggaggatggccattaccggggacgatgtctctctggaccagatagtgccagtctcgcgggattttacgctggaagaagtgtccccagatggtgaactctacatccttggctcagatgtgaccgtccagctggacacagcagagcttagcctcgtattccaactgccctttggttcacaaaccaggatgttcctccacgaagttgccagggcctgtccaggcttcgattctgcgacccgggatcctgaattcctgtggctgtctcggtataggtgcgcagagctggagctggagatgccaacgccgcgcggttgtaactcggccctagttacctggccagggtacgcgacaattggcggaggcaggtatccgtcccggaagaaacggtggggattggaggaggcccggccacagggggcgggctccgttctgttttggggcggagcgatggagaagacaggctttcgattgatggagcgggcacacgggggcgggttcgtctgggggcggagcgcgcgggacgggcggcgggatgaggagcttgaggaagcaggcagggaaatgtctgccgccgccggctctcgggagcgcaacactgcaggttcggcgggcggcgggaagctgggctggggagctgggccgggggcggcggtgcgcccggccctcgggtgggcagggtcggcggtttggccagtggacgctcggggcgaagaccaaagtcctggtggccctctggaggctgggacactggggcagaagttctgtgatgttcttcttaggcgtgcgtgacgagggtaggcgggtgggaatggggtacttgggaatccggaggctggggttttagtaaagctccgttccgaactcgctgtgtgacctcgggccactcgctgcccctctctgggcctgttgctccatctgagcttgctcttcaatcctgatcttccgagtttgtcgcgtggggcgggtgggggagtggtgccctgcctacgatagagtcttcctttgggtgaggtatggtatgtgttggggctctgtcagttctcagcccctgtgatgatagcgcagtgtacagggctggagtcttggggagccctgtctactctgggactagaggccaggatgaagttacaggttataaaaggactaggttttttcccacccagcagttggtggataatggggagcacagaaggccagttgctgagcaggagcttgtcgtttggagatgggaggctcagggctgaaatttgggtgagtccgtgctctgggaggacctgcagacctgtctttttttgtccagctccagggttttctgcaagggcccctggtgcttttttcccctgggtgtgtccgtgaggctccatttatgtgtgagctttggcatgacccctagtacctatttgtgacagtcatttgccagcaatgaagagcctgtcaagtagctgtgtaaagtgtgggccagccctccacttgctcttacaaggcttggaaactatgaggggcagggaggagtggcatgttgcacaagagtttgtaaactgagaggaaacgaggtgagcagaggacttcctcggtgcttgtttctccttcattgcagccatcacaaggtgcgatcgaagcgcctgatggtgctgatagtttgcatcttccttgggcttatctcagagttcactatcactagagtttccatgacattctgggctatggtgctgggacgggtgagagtttaagagcacctcatctccttgccccttcacaagagactgccagaatccagacaattggcggaggacaaggccaatggcagcagaaagaggtgggtgctgtgttctcagccagtacaccagagccaggccatgcaggcacttcattcccttagtcttctatgacaagtcaggccagctagctctgaagccagttagctgccccgactgagaaatgtgcagggatctcaatctttcatttcctttcaaaaaacagagactagccatatgctggtgaggaattattgttacggtttcggttttatttttattttaaaataatttgaaagctgaacatggtggcgcgtacctgtagtcccagccacttgagaggctgaggtggaaggcttgagcccaggagtttgagggtgatgtgcactatgattgatcctgtgaattagttgctgcactccagcctaggcaacatagtgagactgtctctaaaataaataaataaatagttttaaaaattttgtcagccaggcgtggtgactcatgcctgtaatcccagcactgtgggaagctgaggcgggcggatcacctgaggtcaggagttcgagaccagcctggccaacatggcgaaactccgtcactactaaaaatacaaaaattagatgggcgtggtggcaggtgcctgtaatcccatgtactctggaggctgaggtaggagaattgcttgaacccaggaggcagaggttgcagtgagccgagatcgtgccattgcattccagcctgggagacggagcaagactccatctcgaaaaaaaaaaaaatttttctcttaaaatacctacagtaagtggggtgacactattaattgctaagttgctcctgctaaaattggtaagaaatggtatcaagcccctcagttctatttgggtcatctgtttccagagttattatggcctcagaggagagttacatcttctataacaggtaggaagaaccctttgggctgcctttggatgtcgatacaggccccaagggaaacagagtagtagattgttttttcctatatgcatatgatcaaaatacccactttttgatagcctagagaacccaaagcaaacagttgcttaaaaatgctgtttctggctgggcacgatgactcatgcctttaatcccaacactttggaaggctgaggcgggcggatcatgaggtcaggagttcgagaccagcctggccaacatggcgaaaccctgtctctactaaaaatacaaaaattagatgggtgtagtggcacatggctataatcccaggtacttgggaagctgaggtaggagaatcgcttgaacccaggaggcagaggttgcagtgcgctgagatcgtgccactgcactccagcctgggagacagagcgagactccatctcaaaaaaaaaaaaatttttttttatcttatcgtaatacctacagtaagtgactgggtgacactgttaattgctaagttgctgctgctaaaattggtaagaaatggtatcaagctctccagttctgtttgggtcatctctgtttccagagttgttctggcctcagaggagagttacatcttctataacaggtgggaagaaccctttgggctgcctctggatgtcgatacaggccccaagggaaacggagtagtagatttgttttttcctatatgcatatgatcaaaatacccactacttgatagcctagagaaaccaaggcaaatggttgcttaaaaatgctgtttttggctgggcgcggtggctcatgcctaatcctagcactttgggaggccgaggtgggcggatcacaagatcaggagttcaagaccaggctgggcaacatgacgaaatcctgtctctactaaaaatataaaaattaggccaggcacagtggcttatgcctgtaatcccagcactttgggaggctgaggcaggcggatcacaaggtcaggagatcaagaccatcctggctaacacggtgaaaccccatctctactaaaaa

SEQ ID NO: 142880 - DNA, 4694 bp, Homo sapiens
  Payload ID: 8227
  Gene Symbol: INPP5B
  Gene Name: inositol polyphosphate-5-phosphatase B
  Uniprot ID: P32019
  ENST ID: ENST00000373023
  CDS Start-End: 95-3076
aaatgtagtcactgtcccggaacctggggcagcggagtcccgtgcgccctgtggtgacagctcaggagggtgtgtgcgctcagcaggggccagcatggaccagtctgtggcaatccaggagacgctggctgagggggaatactgcgtcatcgcggtgcaaggtgtgctgtgtgagggggacagccggcagagccgcctcctgggactcgtgcgctaccgcctggagcacggcggccaggaacacgctctcttcctctatacgcaccggaggatggccattaccggggacgatgtctctctggaccagatagtgccagtctcgcgggattttacgctggaagaagtgtccccagatggtgaactctacatccttggctcagatgtgaccgtccagctggacacagcagagcttagcctcgtattccaactgccctttggttcacaaaccaggatgttcctccacgaagttgccagggcctgtccaggcttcgattctgcgacccgggatcctgaattcctgtggctgtctcggtataggtgcgcagagctggagctggagatgccaacgccgcgcggttgtaactcggccctagttacctggccagggtacgcgacaattggcggaggcaggtatccgtcccggaagaaacggtggggattggaggaggcccggccacagggggcgggctccgttctgttttggggcggagcgatggagaagacaggctttcgattgatggagcgggcacacgggggcgggttcgtctgggggcggagcgcgcgggacgggcggcgggatgaggagcttgaggaagcaggcagggaaatgtctgccgccgccggctctcgggagcgcaacactgcaggtggttctaactttgatggtttgagaccaaatgggaagggagtgcctatggaccaaagctccaggggtcaagataaaccagaaagcttgcaaccaagacagaataaatccaagtccgaaattactgacatggttcgctcctccactatcacagtgtcggacaaggctcatattttatccatgcagaagtttggactgcgagatacaattgtgaaatcacatctactacagaaagaagaggattacacctatatccagaacttcaggttttttgcgggaacatacaatgtaaatgggcagtcccccaaagaatgcctccggctgtggctgagcaatggtatccaggccccagatgtctattgtgtagggttccaggagcttgatctgagtaaggaagcttttttctttcacgataccccaaaggaggaagagtggttcaaagctgtgtcagagggtcttcatccagatgccaaatatgcaaaggtgaagcttatccgactggttgggattatgctgctgttatatgtcaaacaggagcatgcagcttatatctcagaagtggaagccgagactgtggggacaggaatcatggggaggatgggcaacaagggaggcgtggcgatcaggttccagttccacaacaccagcatctgcgttgtgaattctcacttggcagcccacattgaagagtatgagaggaggaaccaggactataaggacatttgttctcgaatgcagttttgtcagcctgacccaagccttccccctctcaccatcagcaaccatgatgtgatcttgtggctgggggacctcaactacaggatagaagagctggatgtggaaaaagtgaaaaagctcatcgaagagaaggactttcaaatgctgtatgcatatgatcagctgaaaattcaggtggccgcaaagactgtctttgaaggcttcacagagggtgagctcacattccagcctacttacaagtatgatacgggctctgacgactgggataccagtgagaagtgccgtgctcctgcctggtgtgatcggattctctggaaagggaagaacatcactcagctgagttaccagagccacatggccctgaagaccagtgaccacaagcctgtcagctcagtgtttgacatcggggtgagggtcgtaaatgacgagctttaccggaagacactggaggaaattgttcgctccctggataagatggaaaatgccaacattccttctgtgtccctgtccaagcgagagttctgttttcagaatgtgaagtacatgcaattgaaagtagaatcctttacaattcataatggacaagtaccctgtcattttgaattcatcaacaagcctgatgaagagtcttactgtaagcagtggctgaatgccaaccccagcagaggcttcctcctgccagattctgatgttgagattgacttggagctcttcgtaaataagatgacagctacaaagctcaactcgggtgaagacaaaattgaggacattctggttctgcacttggacaggggaaaggattactttttgtctgtgtctgggaactacctgcccagctgttttgggtctcccattcatacactgtgttacatgagagagccaatcttggacctaccacttgaaaccattagtgagctgactctgatgccagtatggactggagatgatgggagccagttggatagccccatggaaatccccaaagagctctggatgatggttgattacctgtaccgaaatgctgtccagcaggaagatctgtttcagcaaccaggcctgaggtcagaatttgaacatatcagggactgcttggatactggaatgattgataacctctctgccagcaatcattctgtagccgaagccctgctgcttttcctggagagccttccagagcctgtcatctgttacagcacctaccataactgcttggagtgttctggcaactacacagcaagcaaacaggtcatttctactctccccatattccacaaaaatgtcttccactacttgatggcgtttttgcgagaactgctgaaaaattcagcaaaaaatcatttggatgagaatattctagctagcatatttggcagcttattgcttcgaaacccagctggtcaccaaaagcttgatatgacagagaagaagaaggctcaagaatttattcaccagttcctctgcaacccactctgagcctctctctcctcctattttacttgaggctgccaattaccagccccacctgtttcagctcaagagatgccttaagataattatgtgaggccacttggtagcaagaatggcagctatttcctgagcctagtaccccaattaagcccaccattggttagcacactcagcgctgtgagtcgtgaagacacgggagaaaatccaccataataaaactgacattcaattttcaactttagttatttaacacagatttttttattttttatttttttttattttgagacggagttttgctctgtcgcgcagggtggagtgcggtggcacgatctcggctcactgcaacctctgcctcctgggtgcaagcaattatcctgcctcagcctcccgagtagctgggactgcaggcacacactgccacgcccagctaattttttgcattttagtagagacggggtttcaccgtgttgcccaggctgttctaaaactcctgaactcaggtaatctgcctgcctcggcctccccaagtgctaggattacagatgtgagccaccacgcccggccttttttttttttttttcttttttgagatggagtttcactcttgttgcccaggctggagtgcgttggcgtggtcttggctcactgcaacctctgcctccttggttcaagcaattctcctgcctcagcctctcgagtagctgggattataggcgtccgccaccatgcctggctaatttttttgtgtgtttttagtatagacacggtttcaccatgttggccaggctggtctcgaatgcctggcctcaggtgatccacctgccttggcctcccaaagtgctgggattacaggcatgaaccaccacgcctggcctaaaatgtttttaaataactgtacttgtactcactcaccctacctccagggcatagtcagtctgggctgagatccccatgatcagatatttgatggaaagtcctgaaaggccaatgagttggatggcaagaatgcaggcagaagctgctggataaaataggctacagccacctcagatgctttcagtgctctgtctgaggatgtgtatatgcatatgcaaactcgacccccgttcctgcccagataatggctcaataactctgaggctggttgctcagcctctgagggcaatacaggcatttaaaaaattaaaatgaccaggcacagtggctcacgcctgtaatctcggcactttgggagactgaggtgggagcatcacttgagaccaggagtttgggaccaggctgggcaacacagggagaccccctctctacaaaaacatttttaaaaaattagctgggtgtggtgatgcatgcctgtggtcccagttacttgggaggctgacgtgggtggctcacttgagcacaggagtttgaggctgcagtgacctatgaccacatcactgtacgccagcccgggtgagagagggagaccccgtctctaaaaataaaatgtaaaatcactgaaaaaatgagtgttcggtgaaacaagtgggattttctgggccagcaagtcttccaaactgtatatgatgcatcctgtctccatgtgtaatatattttaatgataaatgtatttttaacagtg

SEQ ID NO: 142881 - DNA, 3060 bp, Homo sapiens
  Payload ID: 8227
  Gene Symbol: INPP5B
  Gene Name: inositol polyphosphate-5-phosphatase B
  Uniprot ID: P32019
  ENST ID: ENST00000373024
  CDS Start-End: 89-2830
agtcactgtcccggaacctggggcagcggagtcccgtgcgccctgtggtgacagctcaggagggtgtgtgcgctcagcaggggccagcatggaccagtctgtggcaatccaggagacgctggctgagggggaatactgcgtcatcgcggtgcaaggtgtgctgtgtgagggggacagccggcagagccgcctcctgggactcgtgcgctaccgcctggagcacggcggccaggaacacgctctcttcctctatacgcaccggaggatggccattaccggggacgatgtctctctggaccagatagtgccagtctcgcgggattttacgctggaagaagtgtccccagatggtgaactctacatccttggctcagatgtgaccgtccagctggacacagcagagcttagcctcgtattccaactgccctttggttcacaaaccaggatgttcctccacgaagttgccagggcctgtccaggcttcgattctgcgacccgggatcctgaattcctgtggctgtctcggtataggtgcgcagagctggagctggagatgccaacgccgcgcggttgtaactcggccctagttacctggccagggtacgcgacaattggcggaggtggttctaactttgatggtttgagaccaaatgggaagggagtgcctatggaccaaagctccaggggtcaagataaaccagaaagcttgcaaccaagacagaataaatccaagtccgaaattactgacatggttcgctcctccactatcacagtgtcggacaaggctcatattttatccatgcagaagtttggactgcgagatacaattgtgaaatcacatctactacagaaagaagaggattacacctatatccagaacttcaggttttttgcgggaacatacaatgtaaatgggcagtcccccaaagaatgcctccggctgtggctgagcaatggtatccaggccccagatgtctattgtgtagggttccaggagcttgatctgagtaaggaagcttttttctttcacgataccccaaaggaggaagagtggttcaaagctgtgtcagagggtcttcatccagatgccaaatatgcaaaggtgaagcttatccgactggttgggattatgctgctgttatatgtcaaacaggagcatgcagcttatatctcagaagtggaagccgagactgtggggacaggaatcatggggaggatgggcaacaagggaggcgtggcgatcaggttccagttccacaacaccagcatctgcgttgtgaattctcacttggcagcccacattgaagagtatgagaggaggaaccaggactataaggacatttgttctcgaatgcagttttgtcagcctgacccaagccttccccctctcaccatcagcaaccatgatgtgatcttgtggctgggggacctcaactacaggatagaagagctggatgtggaaaaagtgaaaaagctcatcgaagagaaggactttcaaatgctgtatgcatatgatcagctgaaaattcaggtggccgcaaagactgtctttgaaggcttcacagagggtgagctcacattccagcctacttacaagtatgatacgggctctgacgactgggataccagtgagaagtgccgtgctcctgcctggtgtgatcggattctctggaaagggaagaacatcactcagctgagttaccagagccacatggccctgaagaccagtgaccacaagcctgtcagctcagtgtttgacatcggggtgagggtcgtaaatgacgagctttaccggaagacactggaggaaattgttcgctccctggataagatggaaaatgccaacattccttctgtgtccctgtccaagcgagagttctgttttcagaatgtgaagtacatgcaattgaaagtagaatcctttacaattcataatggacaagtaccctgtcattttgaattcatcaacaagcctgatgaagagtcttactgtaagcagtggctgaatgccaaccccagcagaggcttcctcctgccagattctgatgttgagattgacttggagctcttcgtaaataagatgacagctacaaagctcaactcgggtgaagacaaaattgaggacattctggttctgcacttggacaggggaaaggattactttttgtctgtgtctgggaactacctgcccagctgttttgggtctcccattcatacactgtgttacatgagagagccaatcttggacctaccacttgaaaccattagtgagctgactctgatgccagtatggactggagatgatgggagccagttggatagccccatggaaatccccaaagagctctggatgatggttgattacctgtaccgaaatgctgtccagcaggaagatctgtttcagcaaccaggcctgaggtcagaatttgaacatatcagggactgcttggatactggaatgattgataacctctctgccagcaatcattctgtagccgaagccctgctgcttttcctggagagccttccagagcctgtcatctgttacagcacctaccataactgcttggagtgttctggcaactacacagcaagcaaacaggtcatttctactctccccatattccacaaaaatgtcttccactacttgatggcgtttttgcgagaactgctgaaaaattcagcaaaaaatcatttggatgagaatattctagctagcatatttggcagcttattgcttcgaaacccagctggtcaccaaaagcttgatatgacagagaagaagaaggctcaagaatttattcaccagttcctctgcaacccactctgagcctctctctcctcctattttacttgaggctgccaattaccagccccacctgtttcagctcaagagatgccttaagataattatgtgaggccacttggtagcaagaatggcagctatttcctgagcctagtaccccaattaagcccaccattggttagcacactcagcgctgtgagtcgtgaagacacgggagaaaatccaccataataaaactgacattcaattttcaa

SEQ ID NO: 142882 - DNA, 3230 bp, Homo sapiens
  Payload ID: 8227
  Gene Symbol: INPP5B
  Gene Name: inositol polyphosphate-5-phosphatase B
  Uniprot ID: P32019
  ENST ID: ENST00000373026
  CDS Start-End: 2-2983
catggaccagtctgtggcaatccaggagacgctggctgagggggaatactgcgtcatcgcggtgcaaggtgtgctgtgtgagggggacagccggcagagccgcctcctgggactcgtgcgctaccgcctggagcacggcggccaggaacacgctctcttcctctatacgcaccggaggatggccattaccggggacgatgtctctctggaccagatagtgccagtctcgcgggattttacgctggaagaagtgtccccagatggtgaactctacatccttggctcagatgtgaccgtccagctggacacagcagagcttagcctcgtattccaactgccctttggttcacaaaccaggatgttcctccacgaagttgccagggcctgtccaggcttcgattctgcgacccgggatcctgaattcctgtggctgtctcggtataggtgcgcagagctggagctggagatgccaacgccgcgcggttgtaactcggccctagttacctggccagggtacgcgacaattggcggaggcaggtatccgtcccggaagaaacggtggggattggaggaggcccggccacagggggcgggctccgttctgttttggggcggagcgatggagaagacaggctttcgattgatggagcgggcacacgggggcgggttcgtctgggggcggagcgcgcgggacgggcggcgggatgaggagcttgaggaagcaggcagggaaatgtctgccgccgccggctctcgggagcgcaacactgcaggtggttctaactttgatggtttgagaccaaatgggaagggagtgcctatggaccaaagctccaggggtcaagataaaccagaaagcttgcaaccaagacagaataaatccaagtccgaaattactgacatggttcgctcctccactatcacagtgtcggacaaggctcatattttatccatgcagaagtttggactgcgagatacaattgtgaaatcacatctactacagaaagaagaggattacacctatatccagaacttcaggttttttgcgggaacatacaatgtaaatgggcagtcccccaaagaatgcctccggctgtggctgagcaatggtatccaggccccagatgtctattgtgtagggttccaggagcttgatctgagtaaggaagcttttttctttcacgataccccaaaggaggaagagtggttcaaagctgtgtcagagggtcttcatccagatgccaaatatgcaaaggtgaagcttatccgactggttgggattatgctgctgttatatgtcaaacaggagcatgcagcttatatctcagaagtggaagccgagactgtggggacaggaatcatggggaggatgggcaacaagggaggcgtggcgatcaggttccagttccacaacaccagcatctgcgttgtgaattctcacttggcagcccacattgaagagtatgagaggaggaaccaggactataaggacatttgttctcgaatgcagttttgtcagcctgacccaagccttccccctctcaccatcagcaaccatgatgtgatcttgtggctgggggacctcaactacaggatagaagagctggatgtggaaaaagtgaaaaagctcatcgaagagaaggactttcaaatgctgtatgcatatgatcagctgaaaattcaggtggccgcaaagactgtctttgaaggcttcacagagggtgagctcacattccagcctacttacaagtatgatacgggctctgacgactgggataccagtgagaagtgccgtgctcctgcctggtgtgatcggattctctggaaagggaagaacatcactcagctgagttaccagagccacatggccctgaagaccagtgaccacaagcctgtcagctcagtgtttgacatcggggtgagggtcgtaaatgacgagctttaccggaagacactggaggaaattgttcgctccctggataagatggaaaatgccaacattccttctgtgtccctgtccaagcgagagttctgttttcagaatgtgaagtacatgcaattgaaagtagaatcctttacaattcataatggacaagtaccctgtcattttgaattcatcaacaagcctgatgaagagtcttactgtaagcagtggctgaatgccaaccccagcagaggcttcctcctgccagattctgatgttgagattgacttggagctcttcgtaaataagatgacagctacaaagctcaactcgggtgaagacaaaattgaggacattctggttctgcacttggacaggggaaaggattactttttgtctgtgtctgggaactacctgcccagctgttttgggtctcccattcatacactgtgttacatgagagagccaatcttggacctaccacttgaaaccattagtgagctgactctgatgccagtatggactggagatgatgggagccagttggatagccccatggaaatccccaaagagctctggatgatggttgattacctgtaccgaaatgctgtccagcaggaagatctgtttcagcaaccaggcctgaggtcagaatttgaacatatcagggactgcttggatactggaatgattgataacctctctgccagcaatcattctgtagccgaagccctgctgcttttcctggagagccttccagagcctgtcatctgttacagcacctaccataactgcttggagtgttctggcaactacacagcaagcaaacaggtcatttctactctccccatattccacaaaaatgtcttccactacttgatggcgtttttgcgagaactgctgaaaaattcagcaaaaaatcatttggatgagaatattctagctagcatatttggcagcttattgcttcgaaacccagctggtcaccaaaagcttgatatgacagagaagaagaaggctcaagaatttattcaccagttcctctgcaacccactctgagcctctctctcctcctattttacttgaggctgccaattaccagccccacctgtttcagctcaagagatgccttaagataattatgtgaggccacttggtagcaagaatggcagctatttcctgagcctagtaccccaattaagcccaccattggttagcacactcagcgctgtgagtcgtgaagacacgggagaaaatccaccataataaaactgacattcaattttcaactttagttatttaacac

SEQ ID NO: 142883 - DNA, 3905 bp, Homo sapiens
  Payload ID: 8227
  Gene Symbol: INPP5B
  Gene Name: inositol polyphosphate-5-phosphatase B
  Uniprot ID: P32019
  ENST ID: ENST00000373027
  CDS Start-End: 38-2287
gcggcgggatgaggagcttgaggaagcaggcagggaaatgtctgccgccgccggctctcgggagcgcaacactgcaggtggttctaactttgatggtttgagaccaaatgggaagggagtgcctatggaccaaagctccaggggtcaagataaaccagaaagcttgcaaccaagacagaataaatccaagtccgaaattactgacatggttcgctcctccactatcacagtgtcggacaaggctcatattttatccatgcagaagtttggactgcgagatacaattgtgaaatcacatctactacagaaagaagaggattacacctatatccagaacttcaggttttttgcgggaacatacaatgtaaatgggcagtcccccaaagaatgcctccggctgtggctgagcaatggtatccaggccccagatgtctattgtgtagggttccaggagcttgatctgagtaaggaagcttttttctttcacgataccccaaaggaggaagagtggttcaaagctgtgtcagagggtcttcatccagatgccaaatatgcaaaggtgaagcttatccgactggttgggattatgctgctgttatatgtcaaacaggagcatgcagcttatatctcagaagtggaagccgagactgtggggacaggaatcatggggaggatgggcaacaagggaggcgtggcgatcaggttccagttccacaacaccagcatctgcgttgtgaattctcacttggcagcccacattgaagagtatgagaggaggaaccaggactataaggacatttgttctcgaatgcagttttgtcagcctgacccaagccttccccctctcaccatcagcaaccatgatgtgatcttgtggctgggggacctcaactacaggatagaagagctggatgtggaaaaagtgaaaaagctcatcgaagagaaggactttcaaatgctgtatgcatatgatcagctgaaaattcaggtggccgcaaagactgtctttgaaggcttcacagagggtgagctcacattccagcctacttacaagtatgatacgggctctgacgactgggataccagtgagaagtgccgtgctcctgcctggtgtgatcggattctctggaaagggaagaacatcactcagctgagttaccagagccacatggccctgaagaccagtgaccacaagcctgtcagctcagtgtttgacatcggggtgagggtcgtaaatgacgagctttaccggaagacactggaggaaattgttcgctccctggataagatggaaaatgccaacattccttctgtgtccctgtccaagcgagagttctgttttcagaatgtgaagtacatgcaattgaaagtagaatcctttacaattcataatggacaagtaccctgtcattttgaattcatcaacaagcctgatgaagagtcttactgtaagcagtggctgaatgccaaccccagcagaggcttcctcctgccagattctgatgttgagattgacttggagctcttcgtaaataagatgacagctacaaagctcaactcgggtgaagacaaaattgaggacattctggttctgcacttggacaggggaaaggattactttttgtctgtgtctgggaactacctgcccagctgttttgggtctcccattcatacactgtgttacatgagagagccaatcttggacctaccacttgaaaccattagtgagctgactctgatgccagtatggactggagatgatgggagccagttggatagccccatggaaatccccaaagagctctggatgatggttgattacctgtaccgaaatgctgtccagcaggaagatctgtttcagcaaccaggcctgaggtcagaatttgaacatatcagggactgcttggatactggaatgattgataacctctctgccagcaatcattctgtagccgaagccctgctgcttttcctggagagccttccagagcctgtcatctgttacagcacctaccataactgcttggagtgttctggcaactacacagcaagcaaacaggtcatttctactctccccatattccacaaaaatgtcttccactacttgatggcgtttttgcgagaactgctgaaaaattcagcaaaaaatcatttggatgagaatattctagctagcatatttggcagcttattgcttcgaaacccagctggtcaccaaaagcttgatatgacagagaagaagaaggctcaagaatttattcaccagttcctctgcaacccactctgagcctctctctcctcctattttacttgaggctgccaattaccagccccacctgtttcagctcaagagatgccttaagataattatgtgaggccacttggtagcaagaatggcagctatttcctgagcctagtaccccaattaagcccaccattggttagcacactcagcgctgtgagtcgtgaagacacgggagaaaatccaccataataaaactgacattcaattttcaactttagttatttaacacagatttttttattttttatttttttttattttgagacggagttttgctctgtcgcgcagggtggagtgcggtggcacgatctcggctcactgcaacctctgcctcctgggtgcaagcaattatcctgcctcagcctcccgagtagctgggactgcaggcacacactgccacgcccagctaattttttgcattttagtagagacggggtttcaccgtgttgcccaggctgttctaaaactcctgaactcaggtaatctgcctgcctcggcctccccaagtgctaggattacagatgtgagccaccacgcccggccttttttttttttttttcttttttgagatggagtttcactcttgttgcccaggctggagtgcgttggcgtggtcttggctcactgcaacctctgcctccttggttcaagcaattctcctgcctcagcctctcgagtagctgggattataggcgtccgccaccatgcctggctaatttttttgtgtgtttttagtatagacacggtttcaccatgttggccaggctggtctcgaatgcctggcctcaggtgatccacctgccttggcctcccaaagtgctgggattacaggcatgaaccaccacgcctggcctaaaatgtttttaaataactgtacttgtactcactcaccctacctccagggcatagtcagtctgggctgagatccccatgatcagatatttgatggaaagtcctgaaaggccaatgagttggatggcaagaatgcaggcagaagctgctggataaaataggctacagccacctcagatgctttcagtgctctgtctgaggatgtgtatatgcatatgcaaactcgacccccgttcctgcccagataatggctcaataactctgaggctggttgctcagcctctgagggcaatacaggcatttaaaaaattaaaatgaccaggcacagtggctcacgcctgtaatctcggcactttgggagactgaggtgggagcatcacttgagaccaggagtttgggaccaggctgggcaacacagggagaccccctctctacaaaaacatttttaaaaaattagctgggtgtggtgatgcatgcctgtggtcccagttacttgggaggctgacgtgggtggctcacttgagcacaggagtttgaggctgcagtgacctatgaccacatcactgtacgccagcccgggtgagagagggagaccccgtctctaaaaataaaatgtaaaatcactgaaaaaatgagtgttcggtgaaacaagtgggattttctgggccagcaagtcttccaaactgtatatgatgcatcctgtctccatgtgtaatatattttaatgataaatgtatttttaacagtg

SEQ ID NO: 142884 - DNA, 3979 bp, Homo sapiens
  Payload ID: 8227
  Gene Symbol: INPP5B
  Gene Name: inositol polyphosphate-5-phosphatase B
  ENST ID: ENST00000458109
  CDS Start-End: 59-2305
gtcccgtgcgccctgtggtgacagctcaggagggtgtgtgcgctcagcaggggccagcatggaccagtctgtggcaatccaggagacgctggctgagggggaatactgcgtcatcgcggtgcaaggtgtgctgtgtgagggggacagccggcagagccgcctcctgggactcgtgcgctaccgcctggagcacggcggccaggaacacgctctcttcctctatacgcaccggaggatggccattaccggggacgatgtctctctggaccagatagtgccagtctcgcgggattttacgctggaagaagtgtccccagatggtgaactctacatccttggctcagatgtgaccgtccagctggacacagcagagcttagcctcgtattccaactgccctttggttcacaaaccaggatgttcctccacgaagttgccagggcctgtccaggcttcgattctgcgacccgggatcctgaattcctgtggctgtctcggtataggtgcgcagagctggagctggagatgccaacgccgcgcggttgtaactcggccctagttacctggccagggtacgcgacaattggcggaggtggttctaactttgatggtttgagaccaaatgggaagggagtgcctatggaccaaagctccaggggtcaagataaaccagaaagcttgcaaccaagacagaataaatccaagtccgaaattactgacatggttcgctcctccactatcacagtgtcggacaaggctcatattttatccatgcagaagtttggactgcgagatacaattgtgaaatcacatctactacagaaagaagaggattacacctatatccagaacttcaggttttttgcgggaacatacaatgtaaatgggcagtcccccaaagaatgcctccggctgtggctgagcaatggtatccaggccccagatgtctattgtgtagggttccaggagcttgatctgagtaaggaagcttttttctttcacgataccccaaaggaggaagagtggttcaaagctgtgtcagagggtcttcatccagatgccaaatatgcaaaggtgaagcttatccgactggttgggattatgctgctgttatatgtcaaacaggagcatgcagcttatatctcagaagtggaagccgagactgtggggacaggaatcatggggaggatgggcaacaagggaggcgtggcgatcaggttccagttccacaacaccagcatctgcgttgtgaattctcacttggcagcccacattgaagagtatgagaggaggaaccaggactataaggacatttgttctcgaatgcagttttgtcagcctgacccaagccttccccctctcaccatcagcaaccatgatgtgatcttgtggctgggggacctcaactacaggatagaagagctggatgtggaaaaagtgaaaaagctcatcgaagagaaggactttcaaatgctgtatgcatatgatcagctgaaaattcaggtggccgcaaagactgtctttgaaggcttcacagagggtgagctcacattccagcctacttacaagtatgatacgggctctgacgactgggataccagtgagaagtgccgtgctcctgcctggtgtgatcggattctctggaaagggaagaacatcactcagctgagttaccagagccacatggccctgaagaccagtgaccacaagcctgtcagctcagtgtttgacatcggggtgagggtcgtaaatgacgagctttaccggaagacactggaggaaattgttcgctccctggataagatggaaaatgccaacattccttctgtgtccctgtccaagcgagagttctgttttcagaatgtgaagtacatgcaattgaaagtagaatcctttacaattcataatggacaagtaccctgtcattttgaattcatcaacaagcctgatgaagagtcttactgtaagcagtggctgaatgccaaccccagcagaggcttcctcctgccagattctgatgttgagattgacttggagctcttcgtaaataagatgacagctacaaagctcaactcgggtgaagacaaaattgaggacattctggttctgcacttggacaggggaaaggattactttttgtctgtgtctgggaactacctgcccagctgttttgggtctcccattcatacactgtgttacatgagagagccaatcttggacctaccacttgaaaccattagtgagctgctagcatatttggcagcttattgcttcgaaacccagctggtcaccaaaagcttgatatgacagagaagaagaaggctcaagaatttattcaccagttcctctgcaacccactctgagcctctctctcctcctattttacttgaggctgccaattaccagccccacctgtttcagctcaagagatgccttaagataattatgtgaggccacttggtagcaagaatggcagctatttcctgagcctagtaccccaattaagcccaccattggttagcacactcagcgctgtgagtcgtgaagacacgggagaaaatccaccataataaaactgacattcaattttcaactttagttatttaacacagatttttttattttttatttttttttattttgagacggagttttgctctgtcgcgcagggtggagtgcggtggcacgatctcggctcactgcaacctctgcctcctgggtgcaagcaattatcctgcctcagcctcccgagtagctgggactgcaggcacacactgccacgcccagctaattttttgcattttagtagagacggggtttcaccgtgttgcccaggctgttctaaaactcctgaactcaggtaatctgcctgcctcggcctccccaagtgctaggattacagatgtgagccaccacgcccggccttttttttttttttttcttttttgagatggagtttcactcttgttgcccaggctggagtgcgttggcgtggtcttggctcactgcaacctctgcctccttggttcaagcaattctcctgcctcagcctctcgagtagctgggattataggcgtccgccaccatgcctggctaatttttttgtgtgtttttagtatagacacggtttcaccatgttggccaggctggtctcgaatgcctggcctcaggtgatccacctgccttggcctcccaaagtgctgggattacaggcatgaaccaccacgcctggcctaaaatgtttttaaataactgtacttgtactcactcaccctacctccagggcatagtcagtctgggctgagatccccatgatcagatatttgatggaaagtcctgaaaggccaatgagttggatggcaagaatgcaggcagaagctgctggataaaataggctacagccacctcagatgctttcagtgctctgtctgaggatgtgtatatgcatatgcaaactcgacccccgttcctgcccagataatggctcaataactctgaggctggttgctcagcctctgagggcaatacaggcatttaaaaaattaaaatgaccaggcacagtggctcacgcctgtaatctcggcactttgggagactgaggtgggagcatcacttgagaccaggagtttgggaccaggctgggcaacacagggagaccccctctctacaaaaacatttttaaaaaattagctgggtgtggtgatgcatgcctgtggtcccagttacttgggaggctgacgtgggtggctcacttgagcacaggagtttgaggctgcagtgacctatgaccacatcactgtacgccagcccgggtgagagagggagaccccgtctctaaaaataaaatgtaaaatcactgaaaaaatgagtgttcggtgaaacaagtgggattttctgggccagcaagtcttccaaactgtatatgatgcatcctgtctccatgtgtaatatattttaatgataaatgtatttttaacagtg

SEQ ID NO: 142885 - DNA, 5274 bp, Homo sapiens
  Payload ID: 8228
  Gene Symbol: INPP5D
  Gene Name: inositol polyphosphate-5-phosphatase D
  Uniprot ID: Q92835
  ENST ID: ENST00000359570
  CDS Start-End: 513-4079
ctagggcatggcatcccacgtgggtgtcagcacggccgcagaagaaccacttctctggcccacccatgcctgctaggccatgcttcttcagaagtggccacaactctcctgacgtctccagagccggtcattccacccagggggacttcagctgccactggacacttcaattgtacgctgcgaccagttgccaggaaggagagggctggcaagagagccgcggcagccgtggcagggtgtaggggacggtggacggccagggcccccccctctctctctttctctctctctctcttgcttggtttctgtaatgaggaagttctccgcagctcagtttcctttccctcactgagcgcctgaaacaggaagtcagtcagttaagctggtggcagcagccgaggccaccaagaggcaacgggcggcaggttgcagtggaggggcctccgctcccctcggtggtgtgtgggtcctgggggtgcctgccggcccggccgaggaggcccacgcccaccatggtcccctgctggaaccatggcaacatcacccgctccaaggcggaggagctgctttccaggacaggcaaggacgggagcttcctcgtgcgtgccagcgagtccatctcccgggcatacgcgctctgcgtgctgtatcggaattgcgtttacacttacagaattctgcccaatgaagatgataaattcactgttcaggcatccgaaggcgtctccatgaggttcttcaccaagctggaccagctcatcgagttttacaagaaggaaaacatggggctggtgacccatctgcaataccctgtgccgctggaggaagaggacacaggcgacgaccctgaggaggacacagaaagtgtcgtgtctccacccgagctgcccccaagaaacatcccgctgactgccagctcctgtgaggccaaggaggttcctttttcaaacgagaatccccgagcgaccgagaccagccggccgagcctctccgagacattgttccagcgactgcaaagcatggacaccagtgggcttccagaagagcatcttaaggccatccaagattatttaagcactcagctcgcccaggactctgaatttgtgaagacagggtccagcagtcttcctcacctgaagaaactgaccacactgctctgcaaggagctctatggagaagtcatccggaccctcccatccctggagtctctgcagaggttatttgaccagcagctctccccgggcctccgtccacgtcctcaggttcctggtgaggccaatcccatcaacatggtgtccaagctcagccaactgacaagcctgttgtcgtccattgaagacaaggtcaaggccttgctgcacgagggtcctgagtctccgcaccggccctcccttatccctccagtcacctttgaggtgaaggcagagtctctggggattcctcagaaaatgcagctcaaagtcgacgttgagtctgggaaactgatcattaagaagtccaaggatggttctgaggacaagttctacagccacaagaaaatcctgcagctcattaagtcacagaaatttctgaataagttggtgatcttggtggaaacagagaaggagaagatcctgcggaaggaatatgtttttgctgactccaaaaagagagaaggcttctgccagctcctgcagcagatgaagaacaagcactcagagcagccggagcccgacatgatcaccatcttcatcggcacctggaacatgggtaacgccccccctcccaagaagatcacgtcctggtttctctccaaggggcagggaaagacgcgggacgactctgcggactacatcccccatgacatttacgtgatcggcacccaagaggaccccctgagtgagaaggagtggctggagatcctcaaacactccctgcaagaaatcaccagtgtgacttttaaaacagtcgccatccacacgctctggaacatccgcatcgtggtgctggccaagcctgagcacgagaaccggatcagccacatctgtactgacaacgtgaagacaggcattgcaaacacactggggaacaagggagccgtgggggtgtcgttcatgttcaatggaacctccttagggttcgtcaacagccacttgacttcaggaagtgaaaagaaactcaggcgaaaccaaaactatatgaacattctccggttcctggccctgggcgacaagaagctgagtccctttaacatcactcaccgcttcacgcacctcttctggtttggggatcttaactaccgtgtggatctgcctacctgggaggcagaaaccatcatccagaaaatcaagcagcagcagtacgcagacctcctgtcccacgaccagctgctcacagagaggagggagcagaaggtcttcctacacttcgaggaggaagaaatcacgtttgccccaacctaccgttttgagagactgactcgggacaaatacgcctacaccaagcagaaagcgacagggatgaagtacaacttgccttcctggtgtgaccgagtcctctggaagtcttatcccctggtgcacgtggtgtgtcagtcttatggcagtaccagcgacatcatgacgagtgaccacagccctgtctttgccacatttgaggcaggagtcacttcccagtttgtctccaagaacggtcccgggactgttgacagccaaggacagattgagtttctcaggtgctatgccacattgaagaccaagtcccagaccaaattctacctggagttccactcgagctgcttggagagttttgtcaagagtcaggaaggagaaaatgaagaaggaagtgagggggagctggtggtgaagtttggtgagactcttccaaagctgaagcccattatctctgaccctgagtacctgctagaccagcacatcctcatcagcatcaagtcctctgacagcgacgaatcctatggcgagggctgcattgcccttcggttagaggccacagaaacgcagctgcccatctacacgcctctcacccaccatggggagttgacaggccacttccagggggagatcaagctgcagacctctcagggcaagacgagggagaagctctatgactttgtgaagacggagcgtgatgaatccagtgggccaaagaccctgaagagcctcaccagccacgaccccatgaagcagtgggaagtcactagcagggcccctccgtgcagtggctccagcatcactgaaatcatcaaccccaactacatgggagtggggccctttgggccaccaatgcccctgcacgtgaagcagaccttgtcccctgaccagcagcccacagcctggagctacgaccagccgcccaaggactccccgctggggccctgcaggggagaaagtcctccgacacctcccggccagccgcccatatcacccaagaagtttttaccctcaacagcaaaccggggtctccctcccaggacacaggagtcaaggcccagtgacctggggaagaacgcaggggacacgctgcctcaggaggacctgccgctgacgaagcccgagatgtttgagaaccccctgtatgggtccctgagttccttccctaagcctgctcccaggaaggaccaggaatcccccaaaatgccgcggaaggaacccccgccctgcccggaacccggcatcttgtcgcccagcatcgtgctcaccaaagcccaggaggctgatcgcggcgaggggcccggcaagcaggtgcccgcgccccggctgcgctccttcacgtgctcatcctctgccgagggcagggcggccggcggggacaagagccaagggaagcccaagaccccggtcagctcccaggccccggtgccggccaagaggcccatcaagccttccagatcggaaatcaaccagcagaccccgcccaccccgacgccgcggccgccgctgccagtcaagagcccggcggtgctgcacctccagcactccaagggccgcgactaccgcgacaacaccgagctcccgcatcacggcaagcaccggccggaggaggggccaccagggcctctaggcaggactgccatgcagtgaagccctcagtgagctgccactgagtcgggagcccagaggaacggcgtgaagccactggaccctctcccgggacctcctgctggctcctcctgcccagcttcctatgcaaggctttgtgttttcaggaaagggcctagcttctgtgtggcccacagagttcactgcctgtgagacttagcaccaagtgctgaggctggaagaaaaacgcacaccagacgggcaacaaacagtctgggtccccagctcgctcttggtacttgggaccccagtgcctcgttgagggcgccattctgaagaaaggaactgcagcgccgatttgagggtggagatatagataataataatattaataataataatggccacatggatcgaacactcatgatgtgccaagtgctgtgctaagtgctttacgaacattcgtcatatcaggatgacctcgagagctgaggctctagccacctaaaaccacgtgcccaaacccaccagtttaaaacggtgtgtgttcggaggggtgaaagcattaagaagcccagtgccctcctggagtgagacaagggctcggccttaaggagctgaagagtctgggtagcttgtttagggtacaagaagcctgttctgtccagcttcagtgacacaagctgctttagctaaagtcccgcgggttccggcatggctaggctgagagcagggatctacctggcttctcagttctttggttggaaggagcaggaaatcagctcctattctccagtggagagatctggcctcagcttgggctagagatgccaaggcctgtgccaggttccctgtgccctcctcgaggtgggcagccatcaccagccacagttaagccaagccccccaacatgtattccatcgtgctggtagaagagtctttgctgttgctcccgaaagccgtgctctccagcctggctgccagggagggtgggcctcttggttccaggctcttgaaatagtgcagccttttcttcctatctctgtggctttcagctctgcttccttggttattaggagaatagatgggtgatgtctttccttatgttgctttttcaacatagcagaattaatgtagggagctaaatccagtggtgtgtgtgaatgcagaagggaatgcaccccacattcccatgatggaagtctgcgtaaccaataaattgtgcctttctcactca

SEQ ID NO: 142886 - DNA, 3628 bp, Homo sapiens
  Payload ID: 8228
  Gene Symbol: INPP5D
  Gene Name: inositol polyphosphate-5-phosphatase D
  ENST ID: ENST00000415617
  CDS Start-End: 1-2433
aagagagaaggcttctgccagctcctgcagcagatgaagaacaagcactcagagcagccggagcccgacatgatcaccatcttcatcggcacctggaacatgggtaacgccccccctcccaagaagatcacgtcctggtttctctccaaggggcagggaaagacgcgggacgactctgcggactacatcccccatgacatttacgtgatcggcacccaagaggaccccctgagtgagaaggagtggctggagatcctcaaacactccctgcaagaaatcaccagtgtgacttttaaaacagtcgccatccacacgctctggaacatccgcatcgtggtgctggccaagcctgagcacgagaaccggatcagccacatctgtactgacaacgtgaagacaggcattgcaaacacactggggaacaagggagccgtgggggtgtcgttcatgttcaatggaacctccttagggttcgtcaacagccacttgacttcaggaagtgaaaagaaactcaggcgaaaccaaaactatatgaacattctccggttcctggccctgggcgacaagaagctgagtccctttaacatcactcaccgcttcacgcacctcttctggtttggggatcttaactaccgtgtggatctgcctacctgggaggcagaaaccatcatccagaaaatcaagcagcagcagtacgcagacctcctgtcccacgaccagctgctcacagagaggagggagcagaaggtcttcctacacttcgaggaggaagaaatcacgtttgccccaacctaccgttttgagagactgactcgggacaaatacgcctacaccaagcagaaagcgacagggatgaagtacaacttgccttcctggtgtgaccgagtcctctggaagtcttatcccctggtgcacgtggtgtgtcagtcttatggcagtaccagcgacatcatgacgagtgaccacagccctgtctttgccacatttgaggcaggagtcacttcccagtttgtctccaagaacggtcccgggactgttgacagccaaggacagattgagtttctcaggtgctatgccacattgaagaccaagtcccagaccaaattctacctggagttccactcgagctgcttggagagttttgtcaagagtcaggaaggagaaaatgaagaaggaagtgagggggagctggtggtgaagtttggtgagactcttccaaagctgaagcccattatctctgaccctgagtacctgctagaccagcacatcctcatcagcatcaagtcctctgacagcgacgaatcctatggcgagggctgcattgcccttcggttagaggccacagaaacgcagctgcccatctacacgcctctcacccaccatggggagttgacaggccacttccagggggagatcaagctgcagacctctcagggcaagacgagggagaagctctatgactttgtgaagacggagcgtgatgaatccagtgggccaaagaccctgaagagcctcaccagccacgaccccatgaagcagtgggaagtcactagcagggcccctccgtgcagtggctccagcatcactgaaatcatcaaccccaactacatgggagtggggccctttgggccaccaatgcccctgcacgtgaagcagaccttgtcccctgaccagcagcccacagcctggagctacgaccagccgcccaaggactccccgctggggccctgcaggggagaaagtcctccgacacctcccggccagccgcccatatcacccaagaagtttttaccctcaacagcaaaccggggtctccctcccaggacacaggagtcaaggcccagtgacctggggaagaacgcaggggacacgctgcctcaggaggacctgccgctgacgaagcccgagatgtttgagaaccccctgtatgggtccctgagttccttccctaagcctgctcccaggaaggaccaggaatcccccaaaatgccgcggaaggaacccccgccctgcccggaacccggcatcttgtcgcccagcatcgtgctcaccaaagcccaggaggctgatcgcggcgaggggcccggcaagcaggtgcccgcgccccggctgcgctccttcacgtgctcatcctctgccgagggcagggcggccggcggggacaagagccaagggaagcccaagaccccggtcagctcccaggccccggtgccggccaagaggcccatcaagccttccagatcggaaatcaaccagcagaccccgcccaccccgacgccgcggccgccgctgccagtcaagagcccggcggtgctgcacctccagcactccaagggccgcgactaccgcgacaacaccgagctcccgcatcacggcaagcaccggccggaggaggggccaccagggcctctaggcaggactgccatgcagtgaagccctcagtgagctgccactgagtcgggagcccagaggaacggcgtgaagccactggaccctctcccgggacctcctgctggctcctcctgcccagcttcctatgcaaggctttgtgttttcaggaaagggcctagcttctgtgtggcccacagagttcactgcctgtgagacttagcaccaagtgctgaggctggaagaaaaacgcacaccagacgggcaacaaacagtctgggtccccagctcgctcttggtacttgggaccccagtgcctcgttgagggcgccattctgaagaaaggaactgcagcgccgatttgagggtggagatatagataataataatattaataataataatggccacatggatcgaacactcatgatgtgccaagtgctgtgctaagtgctttacgaacattcgtcatatcaggatgacctcgagagctgaggctctagccacctaaaaccacgtgcccaaacccaccagtttaaaacggtgtgtgttcggaggggtgaaagcattaagaagcccagtgccctcctggagtgagacaagggctcggccttaaggagctgaagagtctgggtagcttgtttagggtacaagaagcctgttctgtccagcttcagtgacacaagctgctttagctaaagtcccgcgggttccggcatggctaggctgagagcagggatctacctggcttctcagttctttggttggaaggagcaggaaatcagctcctattctccagtggagagatctggcctcagcttgggctagagatgccaaggcctgtgccaggttccctgtgccctcctcgaggtgggcagccatcaccagccacagttaagccaagccccccaacatgtattccatcgtgctggtagaagagtctttgctgttgctcccgaaagccgtgctctccagcctggctgccagggagggtgggcctcttggttccaggctcttgaaatagtgcagccttttcttcctatctctgtggctttcagctctgcttccttggttattaggagaatagatgggtgatgtctttccttatgttgctttttcaacatagcagaattaatgtagggagctaaatccagtggtgtgtgtgaatgcagaagggaatgcaccccacattcccatgatggaagtctgcgtaaccaataaattgtgcctttctcactca

SEQ ID NO: 142887 - DNA, 4845 bp, Homo sapiens
  Payload ID: 8228
  Gene Symbol: INPP5D
  Gene Name: inositol polyphosphate-5-phosphatase D
  Uniprot ID: Q92835
  ENST ID: ENST00000445964
  CDS Start-End: 82-3651
gtggaggggcctccgctcccctcggtggtgtgtgggtcctgggggtgcctgccggcccggccgaggaggcccacgcccaccatggtcccctgctggaaccatggcaacatcacccgctccaaggcggaggagctgctttccaggacaggcaaggacgggagcttcctcgtgcgtgccagcgagtccatctcccgggcatacgcgctctgcgtgctgtatcggaattgcgtttacacttacagaattctgcccaatgaagatgataaattcactgttcaggcatccgaaggcgtctccatgaggttcttcaccaagctggaccagctcatcgagttttacaagaaggaaaacatggggctggtgacccatctgcaataccctgtgccgctggaggaagaggacacaggcgacgaccctgaggaggacacagtagaaagtgtcgtgtctccacccgagctgcccccaagaaacatcccgctgactgccagctcctgtgaggccaaggaggttcctttttcaaacgagaatccccgagcgaccgagaccagccggccgagcctctccgagacattgttccagcgactgcaaagcatggacaccagtgggcttccagaagagcatcttaaggccatccaagattatttaagcactcagctcgcccaggactctgaatttgtgaagacagggtccagcagtcttcctcacctgaagaaactgaccacactgctctgcaaggagctctatggagaagtcatccggaccctcccatccctggagtctctgcagaggttatttgaccagcagctctccccgggcctccgtccacgtcctcaggttcctggtgaggccaatcccatcaacatggtgtccaagctcagccaactgacaagcctgttgtcgtccattgaagacaaggtcaaggccttgctgcacgagggtcctgagtctccgcaccggccctcccttatccctccagtcacctttgaggtgaaggcagagtctctggggattcctcagaaaatgcagctcaaagtcgacgttgagtctgggaaactgatcattaagaagtccaaggatggttctgaggacaagttctacagccacaagaaaatcctgcagctcattaagtcacagaaatttctgaataagttggtgatcttggtggaaacagagaaggagaagatcctgcggaaggaatatgtttttgctgactccaaaaagagagaaggcttctgccagctcctgcagcagatgaagaacaagcactcagagcagccggagcccgacatgatcaccatcttcatcggcacctggaacatgggtaacgccccccctcccaagaagatcacgtcctggtttctctccaaggggcagggaaagacgcgggacgactctgcggactacatcccccatgacatttacgtgatcggcacccaagaggaccccctgagtgagaaggagtggctggagatcctcaaacactccctgcaagaaatcaccagtgtgacttttaaaacagtcgccatccacacgctctggaacatccgcatcgtggtgctggccaagcctgagcacgagaaccggatcagccacatctgtactgacaacgtgaagacaggcattgcaaacacactggggaacaagggagccgtgggggtgtcgttcatgttcaatggaacctccttagggttcgtcaacagccacttgacttcaggaagtgaaaagaaactcaggcgaaaccaaaactatatgaacattctccggttcctggccctgggcgacaagaagctgagtccctttaacatcactcaccgcttcacgcacctcttctggtttggggatcttaactaccgtgtggatctgcctacctgggaggcagaaaccatcatccagaaaatcaagcagcagcagtacgcagacctcctgtcccacgaccagctgctcacagagaggagggagcagaaggtcttcctacacttcgaggaggaagaaatcacgtttgccccaacctaccgttttgagagactgactcgggacaaatacgcctacaccaagcagaaagcgacagggatgaagtacaacttgccttcctggtgtgaccgagtcctctggaagtcttatcccctggtgcacgtggtgtgtcagtcttatggcagtaccagcgacatcatgacgagtgaccacagccctgtctttgccacatttgaggcaggagtcacttcccagtttgtctccaagaacggtcccgggactgttgacagccaaggacagattgagtttctcaggtgctatgccacattgaagaccaagtcccagaccaaattctacctggagttccactcgagctgcttggagagttttgtcaagagtcaggaaggagaaaatgaagaaggaagtgagggggagctggtggtgaagtttggtgagactcttccaaagctgaagcccattatctctgaccctgagtacctgctagaccagcacatcctcatcagcatcaagtcctctgacagcgacgaatcctatggcgagggctgcattgcccttcggttagaggccacagaaacgcagctgcccatctacacgcctctcacccaccatggggagttgacaggccacttccagggggagatcaagctgcagacctctcagggcaagacgagggagaagctctatgactttgtgaagacggagcgtgatgaatccagtgggccaaagaccctgaagagcctcaccagccacgaccccatgaagcagtgggaagtcactagcagggcccctccgtgcagtggctccagcatcactgaaatcatcaaccccaactacatgggagtggggccctttgggccaccaatgcccctgcacgtgaagcagaccttgtcccctgaccagcagcccacagcctggagctacgaccagccgcccaaggactccccgctggggccctgcaggggagaaagtcctccgacacctcccggccagccgcccatatcacccaagaagtttttaccctcaacagcaaaccggggtctccctcccaggacacaggagtcaaggcccagtgacctggggaagaacgcaggggacacgctgcctcaggaggacctgccgctgacgaagcccgagatgtttgagaaccccctgtatgggtccctgagttccttccctaagcctgctcccaggaaggaccaggaatcccccaaaatgccgcggaaggaacccccgccctgcccggaacccggcatcttgtcgcccagcatcgtgctcaccaaagcccaggaggctgatcgcggcgaggggcccggcaagcaggtgcccgcgccccggctgcgctccttcacgtgctcatcctctgccgagggcagggcggccggcggggacaagagccaagggaagcccaagaccccggtcagctcccaggccccggtgccggccaagaggcccatcaagccttccagatcggaaatcaaccagcagaccccgcccaccccgacgccgcggccgccgctgccagtcaagagcccggcggtgctgcacctccagcactccaagggccgcgactaccgcgacaacaccgagctcccgcatcacggcaagcaccggccggaggaggggccaccagggcctctaggcaggactgccatgcagtgaagccctcagtgagctgccactgagtcgggagcccagaggaacggcgtgaagccactggaccctctcccgggacctcctgctggctcctcctgcccagcttcctatgcaaggctttgtgttttcaggaaagggcctagcttctgtgtggcccacagagttcactgcctgtgagacttagcaccaagtgctgaggctggaagaaaaacgcacaccagacgggcaacaaacagtctgggtccccagctcgctcttggtacttgggaccccagtgcctcgttgagggcgccattctgaagaaaggaactgcagcgccgatttgagggtggagatatagataataataatattaataataataatggccacatggatcgaacactcatgatgtgccaagtgctgtgctaagtgctttacgaacattcgtcatatcaggatgacctcgagagctgaggctctagccacctaaaaccacgtgcccaaacccaccagtttaaaacggtgtgtgttcggaggggtgaaagcattaagaagcccagtgccctcctggagtgagacaagggctcggccttaaggagctgaagagtctgggtagcttgtttagggtacaagaagcctgttctgtccagcttcagtgacacaagctgctttagctaaagtcccgcgggttccggcatggctaggctgagagcagggatctacctggcttctcagttctttggttggaaggagcaggaaatcagctcctattctccagtggagagatctggcctcagcttgggctagagatgccaaggcctgtgccaggttccctgtgccctcctcgaggtgggcagccatcaccagccacagttaagccaagccccccaacatgtattccatcgtgctggtagaagagtctttgctgttgctcccgaaagccgtgctctccagcctggctgccagggagggtgggcctcttggttccaggctcttgaaatagtgcagccttttcttcctatctctgtggctttcagctctgcttccttggttattaggagaatagatgggtgatgtctttccttatgttgctttttcaacatagcagaattaatgtagggagctaaatccagtggtgtgtgtgaatgcagaagggaatgcaccccacattcccatgatggaagtctgcgtaaccaataaattgtgcctttctcactc

SEQ ID NO: 142888 - DNA, 588 bp, Homo sapiens
  Payload ID: 8228
  Gene Symbol: INPP5D
  Gene Name: inositol polyphosphate-5-phosphatase D
  ENST ID: ENST00000417661
  CDS Start-End: 1-393
aagaccctgaagagcctcaccagccacgaccccatgaagcagtgggaagtcactagcagggcccctccgtgcagtggctccagcatcactgaaatcatcaaccccaactacatgggagtggggccctttgggccaccaatgcccctgcacgtgaagcagaccttgtcccctgaccagcagcccacagcctggagctacgaccagccgcccaaggactccccgctggggccctgcaggggagaaagtcctccgacacctcccggccagccgcccatatcacccaagaagtttttaccctcaacagcaaaccggggtctccctcccaggacacaggagtcaagtgaagccctcagtgagctgccactgagtcgggagcccagaggaacggcgtgaagccactggaccctctcccgggacctcctgctggctcctcctgcccagcttcctatgcaaggctttgtgttttcaggaaagggcctagcttctgtgtggcccacagagttcactgcctgtgagacttagcaccaagtgctgaggctggaagaaaaacgcacaccagacgggcaacaaacagtctgggtccccagc

SEQ ID NO: 142889 - DNA, 528 bp, Homo sapiens
  Payload ID: 8228
  Gene Symbol: INPP5D
  Gene Name: inositol polyphosphate-5-phosphatase D
  ENST ID: ENST00000491070
  CDS Start-End: 1-130
caccgagctcccgcatcacggcaagcaccggccggaggaggggccaccagggcctctaggcaggactgccatgcaggtgcgctgcgccacacgtgggttcgtgtgcatttgtgtgtgtgtgcatgcgtgagtgcgtatgtgtgtacctatgcatatgtgtgtgcatgtgtgtgtgcacgcatgcatatgtgcgtgcatgtgtgaacgcatgcatgtgcacacatgcgagtgatggtcctgggaactgctccatgagaagggagagtcaggatttgaacccaggtctgcctgtcccacacatccctgaccctgcattgcctctgcagcagttgttaaaaggaagaaaggcggggctgtggataaacttagtctagtgtcagtcccagaggaagaagattccataaagaaaaggagcctaaatcatttatatctcattgttattataaatttgttttgcaactgagtttcgccaggtgatctgcctgcctgggcctcccaaagttctgggattacaggcatgagccactg

SEQ ID NO: 142890 - DNA, 528 bp, Homo sapiens; identical to SEQ ID NO: 142889
  Payload ID: 8228
  Gene Symbol: INPP5D
  Gene Name: inositol polyphosphate-5-phosphatase D
  ENST ID: ENST00000629792
  CDS Start-End: 1-130

SEQ ID NO: 142891 - DNA, 5274 bp, Homo sapiens; identical to SEQ ID NO: 142885
  Payload ID: 8228
  Gene Symbol: INPP5D
  Gene Name: inositol polyphosphate-5-phosphatase D
  Uniprot ID: Q92835
  ENST ID: ENST00000629761
  CDS Start-End: 513-4079

SEQ ID NO: 142892 - DNA, 4845 bp, Homo sapiens; identical to SEQ ID NO: 142887
  Payload ID: 8228
  Gene Symbol: INPP5D
  Gene Name: inositol polyphosphate-5-phosphatase D
  Uniprot ID: Q92835
  ENST ID: ENST00000630854
  CDS Start-End: 82-3651

SEQ ID NO: 142893 - DNA, 588 bp, Homo sapiens; identical to SEQ ID NO: 142888
  Payload ID: 8228
  Gene Symbol: INPP5D
  Gene Name: inositol polyphosphate-5-phosphatase D
  ENST ID: ENST00000628842
  CDS Start-End: 1-393

SEQ ID NO: 142894 - DNA, 3628 bp, Homo sapiens; identical to SEQ ID NO: 142886
  Payload ID: 8228
  Gene Symbol: INPP5D
  Gene Name: inositol polyphosphate-5-phosphatase D
  ENST ID: ENST00000627169
  CDS Start-End: 1-2433

SEQ ID NO: 142895 - DNA, 3394 bp, Homo sapiens
  Payload ID: 8229
  Gene Symbol: INPP5E
  Gene Name: inositol polyphosphate-5-phosphatase E
  Uniprot ID: Q9NRR6
  ENST ID: ENST00000371712
  CDS Start-End: 404-2338
gccgggctgactccgcttctgggcggccgggcctccgcgagtaccgggtcgacttcggagtctgcgagcccagccaggggtgcccgcttcccacccctctccccgagcggcgtccccgtcggggtcgaacctcccccgcgacaggcgcccagccgcctgttcccccaggccttgcctgcggaccgccctgggaacggcgtctgggagccccgaggggctggcgggactcggggcccgggccatgcggcagccgcccccgcccctccgcgaccatccccggcccaagcgggagccgcagcggcgtttctgctcctcgctgcgccggcgaccccggacccggcacccgtgacccctcgcgctgcctgcggcctcgcgccgaggcctgccccgggagagaccgtccatgccgtccaaggcggagaatctgcggccctccgagccggccccgcagccgccggaagggaggacgctccaaggacagcttcccggcgctccgccggcccagcgcgcggggtccccacccgatgctccgggctccgagagccccgcgcttgcctgcagcactccggccacgcccagcggcgaggacccgccagcccgagcagcacccatcgccccgcggccccccgccaggcctcgactggagcgagccctgtccctggacgacaagggctggaggaggaggcgttttcgaggcagccaggaggacctggaagcccggaatgggaccagtccctccaggggctcagtgcagagcgagggccccggggcccccgcccacagctgctccccgccctgcctgagcacctccttgcaggaaatccccaagtcccgcggggtcctgagcagtgagagagggagcccgtcctcggggggtaaccctctctctggggtggccagcagctccccgaacctcccgcacagagacgccgccgtggcggggagctcgcccaggctgcccagcctgctgcccccgcgcccaccgcctgccctgagcctggacatcgcctccgactccctgaggacagcaaacaaggtcgactcggatcttgcagactacaagctccgcgcgcagccgctcctggtgcgggcccacagcagcctgggccccggccggccgcggagccccctggcctgcgacgactgttcccttcgctcggccaaatcctccttcagcctcctggcgcccatccgcagcaaggacgtccgcagcaggagttacctggagggcagcctcctggccagcggggccctgttgggggcggatgagctggcccgctacttcccagaccggaacgtggcactcttcgtggccacctggaacatgcagggccagaaggagctcccgcccagcctggacgagttcctgctcccagccgaggccgactatgcccaggacctgtatgtcatcggggtccaggagggctgttctgacaggcgggagtgggagactcgtctgcaggagacgctgggcccgcactatgtgctgctgtcctcggcggcccacggcgtgctctacatgtcgctcttcatccgcagggacctcatctggttctgctcagaggtggagtgctccacggtgaccacacgcatcgtgtctcagatcaagaccaagggggccttgggcatcagcttcaccttttttggcacttccttcctcttcatcacgtcccacttcacctcaggtgacgggaaggtggcggagcggctgctggactacaccaggactgtacaagccctggtcctgcccagaaatgtgcccgacaccaacccctatcgctccagcgcagcggacgtcaccacccgcttcgatgaggtgttctggtttggagacttcaacttccgcctgagtggcgggcgcacagtcgtggacgccctcctgtgccagggcctggtggtggacgtgccggcgctgctgcagcacgaccagctcatccgggagatgcggaaagggtccatcttcaagggcttccaggagccggacatccacttcctcccatcatacaagtttgacatcgggaaggacacgtacgacagcacctccaagcagaggacgccctcatacacggaccgcgtcttgtacagaagccgccacaagggtgacatctgtcctgtgagctactcttcctgccccgggatcaagacgtccgaccaccgccctgtgtatggcctcttccgggtgaaagtgaggccggggcgagacaacattccgttggcagctggcaaatttgatagagaactgtacttactaggaattaaaagacggatttcgaaggagattcagaggcagcaagcactacagagtcagaactccagcaccatctgctccgtttcttgaagtttgctgaacgaggactcacagctgcaacgtggggtgattgtattgatcaaaacccactgggaaggacaaagagtttgccgcctttcggggatccgagggactgtggcgaccgtgcctctgtgccagcgtcccaggaaggaagccaaccctgagcgagcctgtcctctgtggcaggtccacacggtgtgggtgggcagggcttggacccccgtctccatggcaggtccatacagcatgggtggcagggtttggacccgcccagcagcaccacggaccccagccactctcgggggcagacgtcagaatccgttcctgagcagctcctgtgccctgggggcagtcacagagccccccaacacccccgtgctctgcaccagcctctccctccacacccgaagcaggcgtccatctgtgtcctcctggcagcccctcaaacacacaccaccccatgtcacacgggtatccagagcaaggctggatctgggctaggtgacccctggggcctcagacctctgagtgggccccagagcccagctgaggaagccacacagcctccaggacgtggcacggttcccctccacttggctgcaagtcgcctgccatggggcgaggaggcctgcaccccagtataagggcctccccagctgagtaagaagctgcttcccctcctctcataggccaagcctattgtgtgaaaccatctcatggtcttggtgacgtagaccatttttgaaaccgtctcatggtcttggtgacgtagaccgtttgcttctttaactccagccgcggaatgacattagtggaaccgggctagggaactgctggaagttcaggatgccaccaccttgaacacctaggccagggatccccaccatgtcccgggtttctttcttcgagagtatagaaccgttcattcttgctttgtgtcccattccatctcttgaaaaaatgtagtctttgaatgtgtgaaaatctagggacattcaatctagtcttttaaattatttttccatatttatatttttaaataaatgcatatattgagtcttaaaa

SEQ ID NO: 142896 - DNA, 5063 bp, Homo sapiens
  Payload ID: 8230
  Gene Symbol: INPP5F
  Gene Name: inositol polyphosphate-5-phosphatase F
  Uniprot ID: Q9Y2H2
  ENST ID: ENST00000361976
  CDS Start-End: 167-3565
tctcctcctaccggtcgggtgccccggggcgttccctctgccgctgcttctcggcgcggttcctacccggccgctccccgaggcgcgggctctggcggcctcgaccgactaggacgccccgtgcgccgcccgcgggccgccgcctccctgggcgcgcggggccagcatggagctcttccaagccaaggaccactacatcctgcagcagggcgagcgcgcgctgtggtgcagccgccgcgacggcggcctccagctccgacccgctactgatctacttcttgcctggaatcccatttgtttggggttggtagaaggtgttattgggaaaattcaacttcattcagatcttccatggtggcttattctaattcggcagaaagcattggtgggcaaactcccaggagaccatgaggtctgtaaagttaccaaaattgctgtgctctcactttctgaaatggaacctcaggatcttgagctagagctctgtaagaagcatcattttggtattaacaaaccagagaagatcataccatctcctgatgactcaaagtttctactgaagacctttacgcatattaaatccaatgtgtctgctcctaataaaaagaaagttaaggaaagtaaagagaaggagaagttggagaggagattacttgaagagttgctgaagatgttcatggactcagaatccttttattatagcttgacctatgacctgaccaattccgtgcagaggcagagcactggggagagggacggtcggcccctctggcagaaggttgatgaccgatttttttggaataaatacatgatacaagatcttactgagattggtactccagatgtggacttttggattatccccatgatccaaggttttgtgcagattgaagaacttgtggttaattataccgaatcatctgatgatgagaaaagcagcccagagaccccccctcaggagtccacctgtgtagatgatattcacccacgatttctagtggctctcatttcacgccgaagtaggcacagagcaggaatgcgctataaacgaagaggagtggataaaaatggaaatgttgccaattatgtggagactgagcagttgattcatgttcataatcataccctgtcatttgttcaaacacgaggctctgtgcctgtcttttggagccaggttgggtatcgatataacccaagaccgcggctggacagaagtgaaaaggaaactgttgcctatttctgtgcccatttcgaagaacaactgaacatttacaaaaaacaggttattattaacttggtagaccaggcaggaagagagaagattattggcgatgcttacctgaagcaagtgttgcttttcaacaactcacacctcacttacgtttcgtttgacttccatgagcactgccgaggaatgaagtttgagaatgttcagacactaacagatgccatttatgacattattcttgatatgaagtggtgttgggttgatgaagctggggtaatatgtaagcaggaagggatttttcgtgttaattgtatggactgcctggatcgcaccaacgtggtccaagctgccatcgcgagagtggtcatggaacagcagctgaaaaaattaggtgtgatgcccccggaacagccattacctgtgaaatgtaatcgcatctaccagataatgtgggccaataatggtgactccattagcagacagtatgctgggacagctgctctgaagggtgactttacaaggacaggagaaaggaagttagcaggagttatgaaagatggagtgaactcagcaaacagatattacctcaaccgatttaaggatgcttataggcaagctgttatagatttgatgcaaggcattccagtgacagaagatctttattccatatttaccaaggagaaagaacatgaagctttgcataaggaaaatcagagaagccaccaggaactaattagccagctcttacaaagttacatgaagttactactgcctgatgatgagaagttccatgggggctgggccctcattgactgtgaccctagcctcattgatgctactcacagagacgtggatgtgctgttactgctttctaactctgcctactacgtggcctattatgatgatgaagttgataaagtaaaccagtatcaacgactaagtctagaaaacctggaaaaaattgaaataggccctgaacccactctttttggtaagccaaagttctcctgcatgcgactgcactacagatacaaagaagcgagtggctatttccacacattgcgagctgtaatgcgtaatcctgaagaggatggaaaagatacccttcagtgcattgcagagatgctgcagatcaccaagcaagccatgggatcggatttacccataattgagaagaaacttgagaggaagagcagtaaacctcacgaagacatcattggtatcaggtctcaaaaccaaggttctttggcccagggaaagaattttttaatgagcaaattttcatctctaaatcaaaaagtgaagcagaccaaatccaatgtaaatattggcaacctccgaaagctaggaaactttaccaaacctgaaatgaaagttaactttctaaaaccaaacttaaaagtaaatctttggaaatcagatagtagtcttgaaactatggaaaacacaggagtgatggataaggttcaggcagagtctgatggggacatgtcttcagataatgactcataccactctgatgaattccttacaaattctaagtctgatgaagacaggcagctagctaactcattagagagtgtagggccaatagattacgttcttcctagttgtggtattattgcctcagcgcctcgattgggcagtcggtcccagtctcttagcagcacagatagtagcgttcatgctccttcagagattactgttgctcatgggagtgggcttggaaaaggccaggagtctcctttgaagaaaagtccttctgctggcgacgtacacatattgactggctttgccaagcctatggatatttactgccacagatttgtgcaagatgcacagaacaaagtgacccacctatcagagaccagatctgtgtctcagcaggctagtcaggaaagaaatcaaatgaccaatcaagtttcaaatgaaacccaatcagaatcaacagaacagacaccttctcggccatcgcaattagatgtctctctttctgcaacaggcccacagtttttgtcagttgagccagcgcattcagttgcatctcaaaaaacccccacctccgcttccagcatgcttgaacttgagacagggcttcatgtaactccttctccttcagagagcagtagcagcagagcagtctctccctttgccaagattcgaagttccatggtccaggttgctagtattacccaagctggattaacccatgggataaactttgcagtgtcaaaagttcagaagagtcctccagaacctgaaatcattaatcaagtccagcaaaatgaacttaaaaagatgtttatacaatgccagacacggataattcagatttagcttttagccataagaatccttccatggcttttatttaaaaatatgaaattttcacctcttggggtattttaattgtactgtctgaacccagggatcacaaattctgttcattggaaagggttttaaacggagtcggaacctgagtagatttccaaattttacagccaggactacagaagtgcatcattctagaatgtgtagacctgagtagcttatacactacagagcactttgcttatttgaaagtaattcagcaacaggtcactttgggatataacctgaacctttttttggagtggggtgggtagactacagtagacacaagggctggacatgcagatgcttaggggattagcgtttttcataatttgttctgtttgtcagttcattcctgtgtgttcttacctctacaaagtaaattacacatttagtttttagtgactttaacatgttactgaagcatttgaatataaagctattttagttttgatggcttaactgttccctgaggagttgagggttattgacactagagaaatgaattctcatttgatcctaattttccccgtattctacttgaacacattaaaaatactctgctgcctatacaatgtaaacctaggagcattaagacttgtcacacagtaaacctgatacatcagaggtgaataccagcacctattaggtttcattttgctgttttcaggaatgtaagaacacccatattggctactggaaattctagaagtcagtcaggttttaatttattccaggaggggcatcctcgacatcttatgtagatgatccacaacttcaaaatttagtctgggcctagtgcagtggctcacacctataatcccaacactttgggaggccaggagttttgagaccagcctgggaaacatctgtctctacaaaaaaatacaaaaattagctgggcatagtggtgcatgcctgtgtttctagctacgcaggaggattgcttgagcccatgagattgaggctgcagtgagctgtgatcgtgccactgacctccagcctgggggacagagcaagaccgtgtctcaaaaacaatttagtctgaaacacaattgtgctgaatctgtctgactataactctgaccacacagaaccagggctgcccctgtaatccccacagtaagaaagttgtatggcatattccaacaagtattggttcgtctggtgtctttagagctttactctgttgaagtgactgattctcaactgaacattatgtcgttactttgataagcattccacttttgttatttattagtgctatcttttttttttacgtgttaaatcttgtgattattaaaataaagtaccattgtaatttaaagtgacaaatgggtatgagaattccttgcataacagattaaagaatttgtaaacggcagatttgctataactgaacacttggtctagctgttgccagtatgttactcctttgaaatatactcatgatgtaaaaagg

SEQ ID NO: 142897 - DNA, 2882 bp, Homo sapiens
  Payload ID: 8230
  Gene Symbol: INPP5F
  Gene Name: inositol polyphosphate-5-phosphatase F
  Uniprot ID: Q9Y2H2
  ENST ID: ENST00000369080
  CDS Start-End: 769-2337
gcattcgccgcattcgctgcaggcgcgaggttgggtgcaggcagctgtttgagcctcgaggcatcgacggacggacagacggacggactgactgacgatgccgcgctctcacaggcctccgcctaccgcgcagcgggctgccactgccgcagcagccgagcccaagtctgagggcgttgtggctatgactttcaagatttttctcctttttgcagggcttatggttaaagttcctgtggggttatatttttcctgcaaattacttcttttccaaagtctgatgttgatgtcccctgaagacagcggcttttatgcgaccattgttgcagtggtcgggcttcatgtggtgctggcaattttcgtcttcatagtgtggaaggagggcttgccccagtggcgggaaaacaaaaacgaatagagcagcttcttcagagctgcagacgtggggggtggggaaatacctaaagggtttttgtcttgtttcttgttcgtattgaacgtgctttttttttttttttttttttttttaaaggggaagggtgggtggggagggaattaaatatttactgcagctaagacttcagtaaaattgggggtggggggagggttgacattttccgactgcctgttacgtgccaagtgctttttgttaaggacataatgtttttgactggggatcatgtttggctgatgtaaatattaatgccaaaataggagctaggatgaaagtaacactgtaattagtagtagaatttatttcatattaaaatgtgtcatgacgtaatttttatggcttggctcaagcaacaattttcagagtgcaccctcattgatgctactcacagagacgtggatgtgctgttactgctttctaactctgcctactacgtggcctattatgatgatgaagttgataaagtaaaccagtatcaacgactaagtctagaaaacctggaaaaaattgaaataggccctgaacccactctttttggtaagccaaagttctcctgcatgcgactgcactacagatacaaagaagcgagtggctatttccacacattgcgagctgtaatgcgtaatcctgaagaggatggaaaagatacccttcagtgcattgcagagatgctgcagatcaccaagcaagccatgggatcggatttacccataattgagaagaaacttgagaggaagagcagtaaacctcacgaagacatcattggtatcaggtctcaaaaccaaggttctttggcccagggaaagaattttttaatgagcaaattttcatctctaaatcaaaaagtgaagcagaccaaatccaatgtaaatattggcaacctccgaaagctaggaaactttaccaaacctgaaatgaaagttaactttctaaaaccaaacttaaaagtaaatctttggaaatcagatagtagtcttgaaactatggaaaacacaggagtgatggataaggttcaggcagagtctgatggggacatgtcttcagataatgactcataccactctgatgaattccttacaaattctaagtctgatgaagacaggcagctagctaactcattagagagtgtagggccaatagattacgttcttcctagttgtggtattattgcctcagcgcctcgattgggcagtcggtcccagtctcttagcagcacagatagtagcgttcatgctccttcagagattactgttgctcatgggagtgggcttggaaaaggccaggagtctcctttgaagaaaagtccttctgctggcgacgtacacatattgactggctttgccaagcctatggatatttactgccacagatttgtgcaagatgcacagaacaaagtgacccacctatcagagaccagatctgtgtctcagcaggctagtcaggaaagaaatcaaatgaccaatcaagtttcaaatgaaacccaatcagaatcaacagaacagacaccttctcggccatcgcaattagatgtctctctttctgcaacaggcccacagtttttgtcagttgagccagcgcattcagttgcatctcaaaaaacccccacctccgcttccagcatgcttgaacttgagacagggcttcatgtaactccttctccttcagagagcagtagcagcagagcagtctctccctttgccaagattcgaagttccatggtccaggttgctagtattacccaagctggattaacccatgggataaactttgcagtgtcaaaagttcagaagagtcctccagaacctgaaatcattaatcaagtccagcaaaatgaacttaaaaagatgtttatacaatgccagacacggataattcagatttagcttttagccataagaatccttccatggcttttatttaaaaatatgaaattttcacctcttggggtattttaattgtactgtctgaacccagggatcacaaattctgttcattggaaagggttttaaacggagtcggaacctgagtagatttccaaattttacagccaggactacagaagtgcatcattctagaatgtgtagacctgagtagcttatacactacagagcactttgcttatttgaaagtaattcagcaacaggtcactttgggatataacctgaacctttttttggagtggggtgggtagactacagtagacacaagggctggacatgcagatgcttaggggattagcgtttttcataatttgttctgtttgtcagttcattcctgtgtgttcttacctctacaaagtaaattacacatttagtttttagtgactttaacatgttactgaagcatttgaatataaagctattttagttttgatggcttaactgttccctgaggagttgagggttattgacactagagaaatgaattc

SEQ ID NO: 142898 - DNA, 686 bp, Homo sapiens
  Payload ID: 8230
  Gene Symbol: INPP5F
  Gene Name: inositol polyphosphate-5-phosphatase F
  ENST ID: ENST00000490818
  CDS Start-End: 516-686
ggcttggctcaagcaacaattttcagagtgcacgtaagtatcaacgcgtaaaacttaacattttacagtgttatttggtattattctctatgaagctgtctggatcggtctccttttcccattggttaattggttaatgctcagattttggctcctagaatcgatctgtgtgttcccggtcttggcatctcattatgtcatttgctgtattttttgatatattattgtacgtgcaaattgaggtgaatttgttgttttagattaagactgttggactcaagctacaacgaggtgtctctgatgtaaaaaactgcagtttaagattatgcctcattgatgctactcacagagacgtggatgtgctgttactgctttctaactctgcctactacgtggcctattatgatgatgaagttgataaagtaaaccagtatcaacgactaagtctagaaaacctggaaaaaattgaaataggccctgaacccactctttttggtaagccaaagttctcctgcatgcgactgcactacagatacaaagaagcgagtggctatttccacacattgcgagctgtaatgcgtaatcctgaagaggatggaaaagatacccttcagtgcattgcagagatgctgcagatcaccaagcaagccatgggatcggatttacccataattgagaagaaactt

SEQ ID NO: 142899 - DNA, 583 bp, Homo sapiens
  Payload ID: 8230
  Gene Symbol: INPP5F
  Gene Name: inositol polyphosphate-5-phosphatase F
  ENST ID: ENST00000631485
  CDS Start-End: 267-583
gtgacttggcactgccgcgtcgcagttgccgcattcgccgcattcgctgcaggcgcgagcaacaattttcagagtgcaccctcattgatgctactcacagagacgtggatgtgctgttactgctttctaactctgcctactacgtggcctattatgatgatgaagttgataaagtaaaccagtatcaacgactaagtctagaaaacctggaaaaaattgaaataggccctgaacccactctttttggtaagccaaagttctcctgcatgcgactgcactacagatacaaagaagcgagtggctatttccacacattgcgagctgtaatgcgtaatcctgaagaggatggaaaagatacccttcagtgcattgcagagatgctgcagatcaccaagcaagccatgggatcggatttacccataattgagaagaaacttgagaggaagagcagtaaacctcacgaagacatcattggtatcaggtctcaaaaccaaggttctttggcccagggaaagaattttttaatgagcaaattttcatctctaaatcaaaaagtgaagcagaccaaatccaatgtaaatat

SEQ ID NO: 142900 - DNA, 552 bp, Homo sapiens
  Payload ID: 8230
  Gene Symbol: INPP5F
  Gene Name: inositol polyphosphate-5-phosphatase F
  ENST ID: ENST00000631572
  CDS Start-End: 4-552
acgatgccgcgctctcacaggcctccgcctaccgcgcagcgggctgccactgccgcagcagccgagcccaagtctgagggcgttgtggctatgactttcaagatttttctcctttttgcagggcttatggttaaagttcctgtggggttatatttttcctgcaaattacttcttttccaaagtctgatgttgatgtcccctgaagacagcggcttttatgcgaccattgttgcagtggtcgggcttcatgtgcaacaattttcagagtgcaccctcattgatgctactcacagagacgtggatgtgctgttactgctttctaactctgcctactacgtggcctattatgatgatgaagttgataaagtaaaccagtatcaacgactaagtctagaaaacctggaaaaaattgaaataggccctgaacccactctttttggtaagccaaagttctcctgcatgcgactgcactacagatacaaagaagcgagtggctatttccacacattgcgagctgtaatgcgtaatcctgaagaggatggaaaagatacc

SEQ ID NO: 142901 - DNA, 596 bp, Homo sapiens
  Payload ID: 8230
  Gene Symbol: INPP5F
  Gene Name: inositol polyphosphate-5-phosphatase F
  ENST ID: ENST00000631555
  CDS Start-End: 349-596
acactgtaattagtagtagaatttatttcatattaaaatgtgtcatgacgtaatttttatggcttggctcaagcaacaattttcagagtgcacattaagactgttggactcaagctacaacgaggtgtctctgatgtaaaaaactgcagtttaagattatgcctcattgatgctactcacagagacgtggatgtgctgttactgctttctaactctgcctactacgtggcctattatgatgatgaagttgataaagtaaaccagtatcaacgactaagtctagaaaacctggaaaaaattgaaataggccctgaacccactctttttggtaagccaaagttctcctgcatgcgactgcactacagatacaaagaagcgagtggctatttccacacattgcgagctgtaatgcgtaatcctgaagaggatggaaaagatacccttcagtgcattgcagagatgctgcagatcaccaagcaagccatgggatcggatttacccataattgagaagaaacttgagaggaagagcagtaaacctcacgaagacatcattggtatcaggtctcaaaaccaaggttctttggcccagggaaa

SEQ ID NO: 142902 - DNA, 3347 bp, Homo sapiens
  Payload ID: 8231
  Gene Symbol: INPP5J
  Gene Name: inositol polyphosphate-5-phosphatase J
  Uniprot ID: Q15735
  ENST ID: ENST00000331075
  CDS Start-End: 50-3070
agagctggagccggagccaagggagtccaggctgccgggggctgcagacatggagggccagagcagcaggggcagcaggaggccagggacccgggctggcctgggttccctgcccatgccccagggtgttgcccaaactggggcaccctccaaggtggactcaagttttcagctcccagcaaagaagaacgcagccctaggaccctcggaaccaaggttggctctggcacctgtagggccacgggcagctatgtcagcttcctcggaaggaccgaggctggctctggcatctccccgaccaatcctggctccactgtgtacccctgaagggcagaaaacagctactgcccaccgcagctccagcctggccccaacatctgtgggccagctggtgatgtctgcctcagctggaccaaagcctcccccagcgaccacaggctcagttctggctccgacgtccctggggctggtgatgcctgcctcagcagggccaagatctcccccagtcaccctggggcccaatctggccccaacctccagagaccagaagcaggagccacctgcctccgtgggacccaagccaacactggcagcctctggcctgagcctggccctggcttctgaggagcagcccccagaactcccctccaccccttccccggtgcccagtccagttctgtctccaactcaggaacaggccctggctccagcatccacggcatcaggcgcagcctctgtgggacagacatcagctagaaagagggatgccccagcccctagacctctccctgcttctgaggggcatctccagcctccagctcagacatctggtcctacaggctccccaccctgcatccaaacctccccagaccctcggctctccccctccttccgagcccggcctgaggccctccacagcagccctgaggatcctgttttgccacggccaccccagaccttgcccttggatgtgggccagggtccttcagagcctggcactcactcccctggacttctgtcccccaccttccggcctggggccccctcaggccagactgtgcccccacctctgcccaagccaccccgatcacccagccgttccccaagccactccccgaatcgctctccctgtgttcccccagcccctgacatggccctcccaaggcttggcacacagagtacagggcctggcaggtgcctgagccccaaccttcaggcccaagaagccccagccccagtcaccacctcctcttctacatccaccctgtcatcctccccttggtcagctcagcctacctggaagagcgaccccggcttccggatcactgtggtcacatggaacgtgggcactgccatgcccccagacgatgtcacatccctcctccacctgggcggtggtgacgacagcgacggcgcagacatgatcgccatagggttgcaggaagtgaactccatgctcaacaagcgactcaaggacgccctcttcacggaccagtggagtgagctgttcatggatgcgctagggcccttcaacttcgtgctggtgagttcggtgaggatgcagggtgtcatcctgctgctgttcgccaagtactaccacctgcccttcctgcgagacgtgcagaccgactgcacgcgcactggcctgggcggctactggggtaacaagggtggcgtgagcgtgcgcctggcggccttcgggcacatgctctgcttcctgaactgccacttgcctgcgcatatggacaaggcggagcagcgcaaagacaacttccagaccatcctcagcctccagcagttccaagggccgggcgcacagggcatcctggatcatgacctcgtgttctggttcggggacctgaacttccgcattgagagctatgacctgcactttgtcaagtttgccatcgacagtgaccagctccatcagctctgggagaaggaccagctcaacatggccaagaacacctggcccattctgaagggctttcaggaggggcccctcaacttcgctcccaccttcaagtttgatgtgggtaccaacaaatacgataccagtgccaagaaacggaagccagcttggacagaccgtatcctatggaaggtcaaggctccaggtgggggtcccagcccctcaggacggaagagccaccgactccaggtgacgcagcacagctaccgcagccacatggaatacacagtcagcgaccacaagcctgtggctgcccagttcctcctgcagtttgccttcagggacgacatgccactggtgcggctggaggtggcagatgagtgggtgcggcccgagcaggcggtggtgaggtaccgcatggaaacagtgttcgcccgcagctcctgggactggatcggcttataccgggtgggtttccgccattgcaaggactatgtggcttatgtctgggccaaacatgaagatgtggatgggaatacctaccaggtaacattcagtgaggaatcactgcccaagggccatggagacttcatcctgggctactatagtcacaaccacagcatcctcatcggcatcactgaacccttccagatctcgctgccttcctcggagttggccagcagcagcacagacagctcaggcaccagctcagagggagaggatgacagcacactggagctccttgcacccaagtcccgcagccccagtcctggcaagtccaagcgacaccgcagccgcagcccgggactggccaggttccctgggcttgccctacggccctcatcccgtgaacgccgtggtgccagccgtagcccctcaccccagagccgccgcctgtcccgagtggctcctgacaggagcagtaatggcagcagccggggcagtagtgaagaggggccctctgggttgcctggcccctgggccttcccaccagctgtgcctcgaagcctgggcctgttgcccgccttgcgcctagagactgtagaccctggtggtggtggctcctggggacctgatcgggaggccctggcgcccaacagcctgtctcctagtccccagggccatcgggggctggaggaagggggcctggggccctgagggtggggtaggcagatgggccaaggtgaccaccattctgcctcaatcttttgcaagcccacctgcctctctcctgctgctcctccagctgtatctgcacctgcctctctgtcctggccaggggtggacaactggggtcccccaaaactcagtcctggcacctcaactgtgacaatcagcaaagccccacccaggcccccatctgggatgatgggagagctctggcagatgtcccaatcctggaggtcatccattaggaattaaattctccagcctc

SEQ ID NO: 142903 - DNA, 2393 bp, Homo sapiens
  Payload ID: 8231
  Gene Symbol: INPP5J
  Gene Name: inositol polyphosphate-5-phosphatase J
  Uniprot ID: Q15735
  ENST ID: ENST00000400294
  CDS Start-End: 197-2116
aggctgccgggggctgcagacatggagggccagagcagcaggggcagcaggaggccagggacccgggctggcctgggttccctgcccatgccccagggtgttgcccaaactggggcaccctccaaggtggactcaagttttcagctcccagcaaagaagaacgcagccctaggaccctcggaaccaagcccctgacatggccctcccaaggcttggcacacagagtacagggcctggcaggtgcctgagccccaaccttcaggcccaagaagccccagccccagtcaccacctcctcttctacatccaccctgtcatcctccccttggtcagctcagcctacctggaagagcgaccccggcttccggatcactgtggtcacatggaacgtgggcactgccatgcccccagacgatgtcacatccctcctccacctgggcggtggtgacgacagcgacggcgcagacatgatcgccatagggttgcaggaagtgaactccatgctcaacaagcgactcaaggacgccctcttcacggaccagtggagtgagctgttcatggatgcgctagggcccttcaacttcgtgctggtgagttcggtgaggatgcagggtgtcatcctgctgctgttcgccaagtactaccacctgcccttcctgcgagacgtgcagaccgactgcacgcgcactggcctgggcggctactggggtaacaagggtggcgtgagcgtgcgcctggcggccttcgggcacatgctctgcttcctgaactgccacttgcctgcgcatatggacaaggcggagcagcgcaaagacaacttccagaccatcctcagcctccagcagttccaagggccgggcgcacagggcatcctggatcatgacctcgtgttctggttcggggacctgaacttccgcattgagagctatgacctgcactttgtcaagtttgccatcgacagtgaccagctccatcagctctgggagaaggaccagctcaacatggccaagaacacctggcccattctgaagggctttcaggaggggcccctcaacttcgctcccaccttcaagtttgatgtgggtaccaacaaatacgataccagtgccaagaaacggaagccagcttggacagaccgtatcctatggaaggtcaaggctccaggtgggggtcccagcccctcaggacggaagagccaccgactccaggtgacgcagcacagctaccgcagccacatggaatacacagtcagcgaccacaagcctgtggctgcccagttcctcctgcagtttgccttcagggacgacatgccactggtgcggctggaggtggcagatgagtgggtgcggcccgagcaggcggtggtgaggtaccgcatggaaacagtgttcgcccgcagctcctgggactggatcggcttataccgggtgggtttccgccattgcaaggactatgtggcttatgtctgggccaaacatgaagatgtggatgggaatacctaccaggtaacattcagtgaggaatcactgcccaagggccatggagacttcatcctgggctactatagtcacaaccacagcatcctcatcggcatcactgaacccttccagatctcgctgccttcctcggagttggccagcagcagcacagacagctcaggcaccagctcagagggagaggatgacagcacactggagctccttgcacccaagtcccgcagccccagtcctggcaagtccaagcgacaccgcagccgcagcccgggactggccaggttccctgggcttgccctacggccctcatcccgtgaacgccgtggtgccagccgtagcccctcaccccagagccgccgcctgtcccgagtggctcctgacaggagcagtaatggcagcagccggggcagtagtgaagaggggccctctgggttgcctggcccctgggccttcccaccagctgtgcctcgaagcctgggcctgttgcccgccttgcgcctagagactgtagaccctggtggtggtggctcctggggacctgatcgggaggccctggcgcccaacagcctgtctcctagtccccagggccatcgggggctggaggaagggggcctggggccctgagggtggggtaggcagatgggccaaggtgaccaccattctgcctcaatcttttgcaagcccacctgcctctctcctgctgctcctccagctgtatctgcacctgcctctctgtcctggccaggggtggacaactggggtcccccaaaactcagtcctggcacctcaactgtgacaatcagcaaagccccacccaggcccccatctgggatgatgggagagctctggcagatgtcccaatcctggaggtcatccattaggaattaaattctccagcctc

SEQ ID NO: 142904 - DNA, 2215 bp, Homo sapiens
  Payload ID: 8231
  Gene Symbol: INPP5J
  Gene Name: inositol polyphosphate-5-phosphatase J
  Uniprot ID: Q15735
  ENST ID: ENST00000404390
  CDS Start-End: 22-1938
aggctgccgggggctgcagacatggagggccagagcagcaggggcagcaggaggccagggacccgggctggcctgggttccctgcccatgccccagggtgttgcccaaactggggcaccctccaaggtggactcaagttttcagctcccagcaaagaagaacgcagccctaggaccctcggaaccaaggatcactgtggtcacatggaacgtgggcactgccatgcccccagacgatgtcacatccctcctccacctgggcggtggtgacgacagcgacggcgcagacatgatcgccatagggttgcaggaagtgaactccatgctcaacaagcgactcaaggacgccctcttcacggaccagtggagtgagctgttcatggatgcgctagggcccttcaacttcgtgctggtgagttcggtgaggatgcagggtgtcatcctgctgctgttcgccaagtactaccacctgcccttcctgcgagacgtgcagaccgactgcacgcgcactggcctgggcggctactggggtaacaagggtggcgtgagcgtgcgcctggcggccttcgggcacatgctctgcttcctgaactgccacttgcctgcgcatatggacaaggcggagcagcgcaaagacaacttccagaccatcctcagcctccagcagttccaagggccgggcgcacagggcatcctggatcatgacctcgtgttctggttcggggacctgaacttccgcattgagagctatgacctgcactttgtcaagtttgccatcgacagtgaccagctccatcagctctgggagaaggaccagctcaacatggccaagaacacctggcccattctgaagggctttcaggaggggcccctcaacttcgctcccaccttcaagtttgatgtgggtaccaacaaatacgataccagtgccaagaaacggaagccagcttggacagaccgtatcctatggaaggtcaaggctccaggtgggggtcccagcccctcaggacggaagagccaccgactccaggtgacgcagcacagctaccgcagccacatggaatacacagtcagcgaccacaagcctgtggctgcccagttcctcctgcagtttgccttcagggacgacatgccactggtgcggctggaggtggcagatgagtgggtgcggcccgagcaggcggtggtgaggtaccgcatggaaacagtgttcgcccgcagctcctgggactggatcggcttataccgggtgggtttccgccattgcaaggactatgtggcttatgtctgggccaaacatgaagatgtggatgggaatacctaccaggtaacattcagtgaggaatcactgcccaagggccatggagacttcatcctgggctactatagtcacaaccacagcatcctcatcggcatcactgaacccttccagatctcgctgccttcctcggagttggccagcagcagcacagacagctcaggcaccagctcagagggagaggatgacagcacactggagctccttgcacccaagtcccgcagccccagtcctggcaagtccaagcgacaccgcagccgcagcccgggactggccaggttccctgggcttgccctacggccctcatcccgtgaacgccgtggtgccagccgtagcccctcaccccagagccgccgcctgtcccgagtggctcctgacaggagcagtaatggcagcagccggggcagtagtgaagaggggccctctgggttgcctggcccctgggccttcccaccagctgtgcctcgaagcctgggcctgttgcccgccttgcgcctagagactgtagaccctggtggtggtggctcctggggacctgatcgggaggccctggcgcccaacagcctgtctcctagtccccagggccatcgggggctggaggaagggggcctggggccctgagggtggggtaggcagatgggccaaggtgaccaccattctgcctcaatcttttgcaagcccacctgcctctctcctgctgctcctccagctgtatctgcacctgcctctctgtcctggccaggggtggacaactggggtcccccaaaactcagtcctggcacctcaactgtgacaatcagcaaagccccacccaggcccccatctgggatgatgggagagctctggcagatgtcccaatcctggaggtcatccattaggaattaaattctccagcctc

SEQ ID NO: 142905 - DNA, 1751 bp, Homo sapiens
  Payload ID: 8231
  Gene Symbol: INPP5J
  Gene Name: inositol polyphosphate-5-phosphatase J
  ENST ID: ENST00000401755
  CDS Start-End: 419-1534
gggctggaggctctggcaccactcacccactcactacatcccctcgggttggatgggctggaaggatctgggctgagcccttatcctccatggacctgttgacaccccccactgccccccacatctctcccatcccccaccccaaacagcctcgtgttctggttcggggacctgaacttccgcattgagagctatgacctgcactttgtcaagtttgccatcgacagtgaccagctccatcagctctgggagaaggaccaggtggggtccttgtccccagaagcacacagagcatgtcccaggacacgcctgtaccttagactatggtccctgtcctcacctgccccaccccctccctgggcacagcagagcccaagctgttgtccaatctgctctcctggaccccccacagctcaacatggccaagaacacctggcccattctgaagggctttcaggaggggcccctcaacttcgctcccaccttcaagtttgatgtgggtaccaacaaatacgataccagtgccaagaaacggaagccagcttggacagaccgtatcctatggaaggtcaaggctccaggtgggggtcccagcccctcaggacggaagagccaccgactccaggtgacgcagcacagctaccgcagccacatggaatacacagtcagcgaccacaagcctgtggctgcccagttcctcctgcagtttgccttcagggacgacatgccactggtgcggctggaggtggcagatgagtgggtgcggcccgagcaggcggtggtgaggtaccgcatggaaacagtgttcgcccgcagctcctgggactggatcggcttataccgggtgggtttccgccattgcaaggactatgtggcttatgtctgggccaaacatgaagatgtggatgggaatacctaccaggtaacattcagtgaggaatcactgcccaagggccatggagacttcatcctgggctactatagtcacaaccacagcatcctcatcggcatcactgaacccttccagatctcgctgccttcctcggagttggccagcagcagcacagacagctcaggcaccagctcagagggagaggatgacagcacactggagctccttgcacccaagtcccgcagccccagtcctggcaagtccaagcgacaccgcagccgcagcccgggactggccaggttccctgggcttgccctacggccctcatcccgtgaacgccgtggtgccagccgtagcccctcaccccagagccgccgcctgtcccgagtggctcctgacaggagcagtaatggcagcagccggggcagtagtgaagaggggccctctgggttgcctggcccctgggccttcccaccagctgtgcctcgaagcctgggcctgttgcccgccttgcgcctagagactgtagaccctggtggtggtggctcctggggacctgatcgggaggccctggcgcccaacagcctgtctcctagtccccagggccatcgggggctggaggaagggggcctggggccctgagggtggggtaggcagatgggccaaggtgaccaccattctgcctcaatcttttgcaagcccacctgcctctctcctgctgctcctccagctgtatctgcacctgcctctctgtcctggccaggggtggacaactggggtcccccaaaactcagtcctggcacctcaactgtgacaatcagcaaagccccacccaggcccccatctgggatgatgggag

SEQ ID NO: 142906 - DNA, 2515 bp, Homo sapiens
  Payload ID: 8231
  Gene Symbol: INPP5J
  Gene Name: inositol polyphosphate-5-phosphatase J
  Uniprot ID: Q15735
  ENST ID: ENST00000405300
  CDS Start-End: 319-2238
aggctgccgggggctgcagacatggagggccagagcagcaggggcagcaggaggccagggacccgggctggcctgggttccctgcccatgccccagggtgttgcccaaactggggcaccctccaagacagagaaactgaggcgctgggcagagaggtacttgcctaaggtcacacagagctgggctttgaatctacacagccagtctcagctcccagctcttgctcctgagtggagctctgggaatgggtggactcaagttttcagctcccagcaaagaagaacgcagccctaggaccctcggaaccaagcccctgacatggccctcccaaggcttggcacacagagtacagggcctggcaggtgcctgagccccaaccttcaggcccaagaagccccagccccagtcaccacctcctcttctacatccaccctgtcatcctccccttggtcagctcagcctacctggaagagcgaccccggcttccggatcactgtggtcacatggaacgtgggcactgccatgcccccagacgatgtcacatccctcctccacctgggcggtggtgacgacagcgacggcgcagacatgatcgccatagggttgcaggaagtgaactccatgctcaacaagcgactcaaggacgccctcttcacggaccagtggagtgagctgttcatggatgcgctagggcccttcaacttcgtgctggtgagttcggtgaggatgcagggtgtcatcctgctgctgttcgccaagtactaccacctgcccttcctgcgagacgtgcagaccgactgcacgcgcactggcctgggcggctactggggtaacaagggtggcgtgagcgtgcgcctggcggccttcgggcacatgctctgcttcctgaactgccacttgcctgcgcatatggacaaggcggagcagcgcaaagacaacttccagaccatcctcagcctccagcagttccaagggccgggcgcacagggcatcctggatcatgacctcgtgttctggttcggggacctgaacttccgcattgagagctatgacctgcactttgtcaagtttgccatcgacagtgaccagctccatcagctctgggagaaggaccagctcaacatggccaagaacacctggcccattctgaagggctttcaggaggggcccctcaacttcgctcccaccttcaagtttgatgtgggtaccaacaaatacgataccagtgccaagaaacggaagccagcttggacagaccgtatcctatggaaggtcaaggctccaggtgggggtcccagcccctcaggacggaagagccaccgactccaggtgacgcagcacagctaccgcagccacatggaatacacagtcagcgaccacaagcctgtggctgcccagttcctcctgcagtttgccttcagggacgacatgccactggtgcggctggaggtggcagatgagtgggtgcggcccgagcaggcggtggtgaggtaccgcatggaaacagtgttcgcccgcagctcctgggactggatcggcttataccgggtgggtttccgccattgcaaggactatgtggcttatgtctgggccaaacatgaagatgtggatgggaatacctaccaggtaacattcagtgaggaatcactgcccaagggccatggagacttcatcctgggctactatagtcacaaccacagcatcctcatcggcatcactgaacccttccagatctcgctgccttcctcggagttggccagcagcagcacagacagctcaggcaccagctcagagggagaggatgacagcacactggagctccttgcacccaagtcccgcagccccagtcctggcaagtccaagcgacaccgcagccgcagcccgggactggccaggttccctgggcttgccctacggccctcatcccgtgaacgccgtggtgccagccgtagcccctcaccccagagccgccgcctgtcccgagtggctcctgacaggagcagtaatggcagcagccggggcagtagtgaagaggggccctctgggttgcctggcccctgggccttcccaccagctgtgcctcgaagcctgggcctgttgcccgccttgcgcctagagactgtagaccctggtggtggtggctcctggggacctgatcgggaggccctggcgcccaacagcctgtctcctagtccccagggccatcgggggctggaggaagggggcctggggccctgagggtggggtaggcagatgggccaaggtgaccaccattctgcctcaatcttttgcaagcccacctgcctctctcctgctgctcctccagctgtatctgcacctgcctctctgtcctggccaggggtggacaactggggtcccccaaaactcagtcctggcacctcaactgtgacaatcagcaaagccccacccaggcccccatctgggatgatgggagagctctggcagatgtcccaatcctggaggtcatccattaggaattaaattctccagcctc

SEQ ID NO: 142907 - DNA, 1564 bp, Homo sapiens
  Payload ID: 8231
  Gene Symbol: INPP5J
  Gene Name: inositol polyphosphate-5-phosphatase J
  ENST ID: ENST00000402238
  CDS Start-End: 310-1347
ttcctgtagaccggtccctctgcttttcctctgccctttggtgggctggaggctctggcaccactcacccactcactacatcccctcgggttggatgggctggaaggatctgggctgagcccttatcctccatggacctgttgacaccccccactgccccccacatctctcccatcccccaccccaaacagcctcgtgttctggttcggggacctgaacttccgcattgagagctatgacctgcactttgtcaagtttgccatcgacagtgaccagctccatcagctctgggagaaggaccagctcaacatggccaagaacacctggcccattctgaagggctttcaggaggggcccctcaacttcgctcccaccttcaagtttgatgtgggtaccaacaaatacgataccagtgccaagaaacggaagccagcttggacagaccgtatcctatggaaggtcaaggctccaggtgggggtcccagcccctcaggacggaagagccaccgactccaggtgacgcagcacagctaccgcagccacatggaatacacagtcagcgaccacaagcctgtggctgcccagttcctcctgcagtttgccttcagggacgacatgccactggtgcggctggaggtggcagatgagtgggtgcggcccgagcaggcggtggtgaggtaccgcatggaaacagtgttcgcccgcagctcctgggactggatcggcttataccgggtaacattcagtgaggaatcactgcccaagggccatggagacttcatcctgggctactatagtcacaaccacagcatcctcatcggcatcactgaacccttccagatctcgctgccttcctcggagttggccagcagcagcacagacagctcaggcaccagctcagagggagaggatgacagcacactggagctccttgcacccaagtcccgcagccccagtcctggcaagtccaagcgacaccgcagccgcagcccgggactggccaggttccctgggcttgccctacggccctcatcccgtgaacgccgtggtgccagccgtagcccctcaccccagagccgccgcctgtcccgagtggctcctgacaggagcagtaatggcagcagccggggcagtagtgaagaggggccctctgggttgcctggcccctgggccttcccaccagctgtgcctcgaagcctgggcctgttgcccgccttgcgcctagagactgtagaccctggtggtggtggctcctggggacctgatcgggaggccctggcgcccaacagcctgtctcctagtccccagggccatcgggggctggaggaagggggcctggggccctgagggtggggtaggcagatgggccaaggtgaccaccattctgcctcaatcttttgcaagcccacctgcctctctcctgctgctcctccagctgtatctgcacctgcctctctgtcctggccaggggtggacaactggggtcccccaaaactcagtcctggcacctcaactgtgacaatcagcaaagccccacccaggcccccatctgggatgatgggag

SEQ ID NO: 142908 - DNA, 1613 bp, Homo sapiens
  Payload ID: 8231
  Gene Symbol: INPP5J
  Gene Name: inositol polyphosphate-5-phosphatase J
  ENST ID: ENST00000404453
  CDS Start-End: 281-1396
tctgccctttggtgggctggaggctctggcaccactcacccactcactacatcccctcgggttggatgggctggaaggatctgggctgagcccttatcctccatggacctgttgacaccccccactgccccccacatctctcccatcccccaccccaaacagcctcgtgttctggttcggggacctgaacttccgcattgagagctatgacctgcactttgtcaagtttgccatcgacagtgaccagctccatcagctctgggagaaggaccagctcaacatggccaagaacacctggcccattctgaagggctttcaggaggggcccctcaacttcgctcccaccttcaagtttgatgtgggtaccaacaaatacgataccagtgccaagaaacggaagccagcttggacagaccgtatcctatggaaggtcaaggctccaggtgggggtcccagcccctcaggacggaagagccaccgactccaggtgacgcagcacagctaccgcagccacatggaatacacagtcagcgaccacaagcctgtggctgcccagttcctcctgcagtttgccttcagggacgacatgccactggtgcggctggaggtggcagatgagtgggtgcggcccgagcaggcggtggtgaggtaccgcatggaaacagtgttcgcccgcagctcctgggactggatcggcttataccgggtgggtttccgccattgcaaggactatgtggcttatgtctgggccaaacatgaagatgtggatgggaatacctaccaggtaacattcagtgaggaatcactgcccaagggccatggagacttcatcctgggctactatagtcacaaccacagcatcctcatcggcatcactgaacccttccagatctcgctgccttcctcggagttggccagcagcagcacagacagctcaggcaccagctcagagggagaggatgacagcacactggagctccttgcacccaagtcccgcagccccagtcctggcaagtccaagcgacaccgcagccgcagcccgggactggccaggttccctgggcttgccctacggccctcatcccgtgaacgccgtggtgccagccgtagcccctcaccccagagccgccgcctgtcccgagtggctcctgacaggagcagtaatggcagcagccggggcagtagtgaagaggggccctctgggttgcctggcccctgggccttcccaccagctgtgcctcgaagcctgggcctgttgcccgccttgcgcctagagactgtagaccctggtggtggtggctcctggggacctgatcgggaggccctggcgcccaacagcctgtctcctagtccccagggccatcgggggctggaggaagggggcctggggccctgagggtggggtaggcagatgggccaaggtgaccaccattctgcctcaatcttttgcaagcccacctgcctctctcctgctgctcctccagctgtatctgcacctgcctctctgtcctggccaggggtggacaactggggtcccccaaaactcagtcctggcacctcaactgtgacaatcagcaaagccccacccaggcccccatctgggatgatgggag

SEQ ID NO: 142909 - DNA, 3512 bp, Homo sapiens
  Payload ID: 8231
  Gene Symbol: INPP5J
  Gene Name: inositol polyphosphate-5-phosphatase J
  ENST ID: ENST00000412277
  CDS Start-End: 416-3235
caggttgaaatggctgatgacatcactggttcccgggagcggtagagctggagccggagccaagggagtccaggctgccgggggctgcagacatggagggccagagcagcaggggcagcaggaggccagggacccgggctggcctgggttccctgcccatgccccagggtgttgcccaaactggggcaccctccaagacagagaaactgaggcgctgggcagagaggtacttgcctaaggtcacacagagctgggctttgaatctacacagccagtctcagctcccagctcttgctcctgagtggagctctgggaatgggtggactcaagttttcagctcccagcaaagaagaacgcagccctaggaccctcggaaccaaggttggctctggcacctgtagggccacgggcagctatgtcagcttcctcggaaggaccgaggctggctctggcatctccccgaccaatcctggctccactgtgtacccctgaagggcagaaaacagctactgcccaccgcagctccagcctggccccaacatctgtgggccagctggtgatgtctgcctcagctggaccaaagcctcccccagcgaccacaggctcagttctggctccgacgtccctggggctggtgatgcctgcctcagcagggccaagatctcccccagtcaccctggggcccaatctggccccaacctccagagaccagaagcaggagccacctgcctccgtgggacccaagccaacactggcagcctctggcctgagcctggccctggcttctgaggagcagcccccagaactcccctccaccccttccccggtgcccagtccagttctgtctccaactcaggaacaggccctggctccagcatccacggcatcaggcgcagcctctgtgggacagacatcagctagaaagagggatgccccagcccctagacctctccctgcttctgaggggcatctccagcctccagctcagacatctggtcctacaggctccccaccctgcatccaaacctccccagaccctcggctctccccctccttccgagcccggcctgaggccctccacagcagccctgaggatcctgttttgccacggccaccccagaccttgcccttggatgtgggccagggtccttcagagcctggcactcactcccctggacttctgtcccccaccttccggcctggggccccctcaggccagactgtgcccccacctctgcccaagccaccccgatcacccagccgttccccaagccactccccgaatcgctctccctgtgttcccccagcccctgacatggccctcccaaggcttggcacacagagtacagggcctggcaggtgcctgagccccaaccttcaggcccaagaagccccagccccagtcaccacctcctcttctacatccaccctgtcatcctccccttggtcagctcagcctacctggaagagcgaccccggcttccggatcactgtggtcacatggaacgtgggcactgccatgcccccagacgatgtcacatccctcctccacctgggcggtggtgacgacagcgacggcgcagacatgatcgccatagggttgcaggaagtgaactccatgctcaacaagcgactcaaggacgccctcttcacggaccagtggagtgagctgttcatggatgcgctagggcccttcaacttcgtgctggtgagttcggtgaggatgcagggtgtcatcctgctgctgttcgccaagtactaccacctgcccttcctgcgagacgtgcagaccgactgcacgcgcactggcctgggcggctactggggtaacaagggtggcgtgagcgtgcgcctggcggccttcgggcacatgctctgcttcctgaactgccacttgcctgcgcatatggacaaggcggagcagcgcaaagacaacttccagaccatcctcagcctccagcagttccaagggccgggcgcacagggcatcctggatcatgacctcgtgttctggttcggggacctgaacttccgcattgagagctatgacctgcactttgtcaagtttgccatcgacagtgaccagctccatcagctctgggagaaggaccagctcaacatggccaagaacacctggcccattctgaagggctttcaggaggggcccctcaacttcgctcccaccttcaagtttgatgtgggtaccaacaaatacgataccagtgccaagaaacggaagccagcttggacagaccgtatcctatggaaggtcaaggctccaggtgggggtcccagcccctcaggacggaagagccaccgactccaggtgacgcagcacagctaccgcagccacatggaatacacagtcagcgaccacaagcctgtggctgcccagttcctcctgcagtttgccttcagggacgacatgccactggtgcggctggaggtggcagatgagtgggtgcggcccgagcaggcggtggtgaggtaccgcatggaaacagtgttcgcccgcagctcctgggactggatcggcttataccgggtgggtttccgccattgcaaggactatgtggcttatgtctgggccaaacatgaagatgtggatgggaatacctaccaggtaacattcagtgaggaatcactgcccaagggccatggagacttcatcctgggctactatagtcacaaccacagcatcctcatcggcatcactgaacccttccagatctcgctgccttcctcggagttggccagcagcagcacagacagctcaggcaccagctcagagggagaggatgacagcacactggagctccttgcacccaagtcccgcagccccagtcctggcaagtccaagcgacaccgcagccgcagcccgggactggccaggttccctgggcttgccctacggccctcatcccgtgaacgccgtggtgccagccgtagcccctcaccccagagccgccgcctgtcccgagtggctcctgacaggagcagtaatggcagcagccggggcagtagtgaagaggggccctctgggttgcctggcccctgggccttcccaccagctgtgcctcgaagcctgggcctgttgcccgccttgcgcctagagactgtagaccctggtggtggtggctcctggggacctgatcgggaggccctggcgcccaacagcctgtctcctagtccccagggccatcgggggctggaggaagggggcctggggccctgagggtggggtaggcagatgggccaaggtgaccaccattctgcctcaatcttttgcaagcccacctgcctctctcctgctgctcctccagctgtatctgcacctgcctctctgtcctggccaggggtggacaactggggtcccccaaaactcagtcctggcacctcaactgtgacaatcagcaaagccccacccaggcccccatctgggatgatgggagagctctggcagatgtcccaatcctggaggtcatccattaggaattaaattctccagcctc

SEQ ID NO: 142910 - DNA, 805 bp, Homo sapiens
  Payload ID: 8231
  Gene Symbol: INPP5J
  Gene Name: inositol polyphosphate-5-phosphatase J
  ENST ID: ENST00000412985
  CDS Start-End: 373-805
agagctggagccggagccaagggagtccaggctgccgggggctgcagacatggagggccagagcagcaggggcagcaggaggccagggacccgggctggcctgggttccctgcccatgccccagggtgttgcccaaactggggcaccctccaagacagagaaactgaggcgctgggcagagaggtacttgcctaaggtcacacagagctgggctttgaatctacacagccagtctcagctcccagctcttgctcctgagtggagctctgggaatgggtggactcaagttttcagctcccagcaaagaagaacgcagccctaggaccctcggaaccaaggttggctctggcacctgtagggccacgggcagctatgtcagcttcctcggaaggaccgaggctggctctggcatctccccgaccaatcctggctccactgtgtacccctgaagggcagaaaacagctactgcccaccgcagctccagcctggccccaacatctgtgggccagctggtgatgtctgcctcagctggaccaaagcctcccccagcgaccacaggctcagttctggctccgacgtccctggggctggtgatgcctgcctcagcagggccaagatctcccccagtcaccctggggcccaatctggccccaacctccagagaccagaagcaggagccacctgcctccgtgggacccaagccaacactggcagcctctggcctgagcctggccctggcttctgaggagcagcccccagaactcccctccaccccttccccggtgcccagtccagttctgtctc

SEQ ID NO: 142911 - DNA, 558 bp, Homo sapiens
  Payload ID: 8231
  Gene Symbol: INPP5J
  Gene Name: inositol polyphosphate-5-phosphatase J
  ENST ID: ENST00000420017
  CDS Start-End: 253-558
aagggagtccaggctgccgggggctgcagacatggagggccagagcagcaggggcagcaggaggccagggacccgggctggcctgggttccctgcccatgccccagggtgttgcccaaactggggcaccctccaagttccccagggagtcctgtgaaaggaagcttgagggtgagggagtggtgccaggactacaccctcatatgcccctgccctcaggatcactgtggtcacatggaacgtgggcactgccatgcccccagacgatgtcacatccctcctccacctgggcggtggtgacgacagcgacggcgcagacatgatcgccatagggttgcaggaagtgaactccatgctcaacaagcgactcaaggacgccctcttcacggaccagtggagtgagctgttcatggatgcgctagggcccttcaacttcgtgctggtgagttcggtgaggatgcagggtgtcatcctgctgctgttcgccaagtactaccacctgcccttcctgcgagacgtgcagaccgactgcacgcgcactggcctgggcggctactgg

SEQ ID NO: 142912 - DNA, 2306 bp, Homo sapiens
  Payload ID: 8231
  Gene Symbol: INPP5J
  Gene Name: inositol polyphosphate-5-phosphatase J
  ENST ID: ENST00000620191
  CDS Start-End: 314-2029
caggttgaaatggctgatgacatcactggttcccgggagcggtagagctggagccggagccaagggagtccaggctgccgggggctgcagacatggagggccagagcagcaggggcagcaggaggccagggacccgggctggcctgggttccctgcccatgccccagggtgttgcccaaactggggcaccctccaagttccccagggagtcctgtgaaaggaagcttgagggtgagggagtggtgccaggactacaccctcatatgcccctgccctcaggatcactgtggtcacatggaacgtgggcactgccatgcccccagacgatgtcacatccctcctccacctgggcggtggtgacgacagcgacggcgcagacatgatcgccatagggttgcaggaagtgaactccatgctcaacaagcgactcaaggacgccctcttcacggaccagtggagtgagctgttcatggatgcgctagggcccttcaacttcgtgctggtgagttcggtgaggatgcagggtgtcatcctgctgctgttcgccaagtactaccacctgcccttcctgcgagacgtgcagaccgactgcacgcgcactggcctgggcggctactggggtaacaagggtggcgtgagcgtgcgcctggcggccttcgggcacatgctctgcttcctgaactgccacttgcctgcgcatatggacaaggcggagcagcgcaaagacaacttccagaccatcctcagcctccagcagttccaagggccgggcgcacagggcatcctggatcatgacctcgtgttctggttcggggacctgaacttccgcattgagagctatgacctgcactttgtcaagtttgccatcgacagtgaccagctccatcagctctgggagaaggaccagctcaacatggccaagaacacctggcccattctgaagggctttcaggaggggcccctcaacttcgctcccaccttcaagtttgatgtgggtaccaacaaatacgataccagtgccaagaaacggaagccagcttggacagaccgtatcctatggaaggtcaaggctccaggtgggggtcccagcccctcaggacggaagagccaccgactccaggtgacgcagcacagctaccgcagccacatggaatacacagtcagcgaccacaagcctgtggctgcccagttcctcctgcagtttgccttcagggacgacatgccactggtgcggctggaggtggcagatgagtgggtgcggcccgagcaggcggtggtgaggtaccgcatggaaacagtgttcgcccgcagctcctgggactggatcggcttataccgggtgggtttccgccattgcaaggactatgtggcttatgtctgggccaaacatgaagatgtggatgggaatacctaccaggtaacattcagtgaggaatcactgcccaagggccatggagacttcatcctgggctactatagtcacaaccacagcatcctcatcggcatcactgaacccttccagatctcgctgccttcctcggagttggccagcagcagcacagacagctcaggcaccagctcagagggagaggatgacagcacactggagctccttgcacccaagtcccgcagccccagtcctggcaagtccaagcgacaccgcagccgcagcccgggactggccaggttccctgggcttgccctacggccctcatcccgtgaacgccgtggtgccagccgtagcccctcaccccagagccgccgcctgtcccgagtggctcctgacaggagcagtaatggcagcagccggggcagtagtgaagaggggccctctgggttgcctggcccctgggccttcccaccagctgtgcctcgaagcctgggcctgttgcccgccttgcgcctagagactgtagaccctggtggtggtggctcctggggacctgatcgggaggccctggcgcccaacagcctgtctcctagtccccagggccatcgggggctggaggaagggggcctggggccctgagggtggggtaggcagatgggccaaggtgaccaccattctgcctcaatcttttgcaagcccacctgcctctctcctgctgctcctccagctgtatctgcacctgcctctctgtcctggccaggggtggacaactggggtcccccaaaactcagtcctggcacctcaactgtgacaatcagcaaagccccacccaggcccccatctgggatgatgggagagctctggcagatgtcccaatcctggaggtcatccattaggaattaaattctccagcctc

SEQ ID NO: 142913 - DNA, 1505 bp, Homo sapiens
  Payload ID: 8232
  Gene Symbol: INPP5K
  Gene Name: inositol polyphosphate-5-phosphatase K
  ENST ID: ENST00000350761
  CDS Start-End: 120-311
aaaaacagtccgcgacagctaggcgcgtgagaccggccgcccgcagggctgctctggccgggacccgctggccgggagacgcgaacctgccggaccaccgcgcggggacgacggcggccatgagctcgcggaagctgagcgggccgaaaggcaggaggctcaggtctcccatgtccgtatgcaggggatcctcttactggtctttgccaagtatcagcatttgccctatatccagattctgtctactaaatccacccccactggcctgtttgggtactgggggaacaaaggtggagtcaacatctgcctgaagctttatggctactatgtcagcatcatcaactgccacctgcctccccacatttccaacaattaccagcggctggagcactttgaccggatcctggagatgcagaattgtgaggggcgagacatcccaaacatcctggaccacgacctcattatctggtttggagacatgaactttcggatcgaggactttgggttgcactttgttcgggaatccattaaaaatcggtgctacggtggcctgtgggagaaggaccagctcagcattgccaagaaacatgacccgctgctccgggagttccaggagggccgcctactcttcccgcccacctacaagtttgataggaactccaacgactatgacaccagtgagaaaaaacgcaagcctgcatggaccgatcgcatcctgtggaggctgaagcggcagccctgtgctggccccgacactcccataccgccggcgtcacacttctccttgtctctgaggggctacagcagccacatgacgtacggcatcagcgaccacaagcctgtctccggcacgttcgacttggagctgaagccattggtgtctgctccgctgatcgtcctgatgcccgaggacctgtggaccgtggaaaatgacatgatggtcagctactcttcaacctcggacttccccagcagcccgtgggactggattggactgtacaaggtggggctgcgggacgttaatgactacgtgtcctatgcctgggtcggggacagcaaggtctcctgcagcgacaacctgaaccaggtttacatcgacatcagcaatatccctaccactgaagatgagtttctcctctgttactacagcaacagtctgcgttctgtggtggggataagcagacccttccagatcccgcctggctccttgagggaggacccactgggtgaagcacagccacagatctgagccaggatgggagtgaatcccaggcggaggccagagctggcagccagctctgcctttccactgccgggagtgctgggggcccagcctggccccctgaagagacagccaagtgtcgtccacatactcctcccagagtgagctctaaccaggctcatttgctctctccactactcatctctggaattagccgcttaaatacaggtttttgttgctgagatgtgagtgaaaccagctagtgtgtcaacagtgaagacct

SEQ ID NO: 142914 - DNA, 2880 bp, Homo sapiens
  Payload ID: 8232
  Gene Symbol: INPP5K
  Gene Name: inositol polyphosphate-5-phosphatase K
  Uniprot ID: Q9BT40
  ENST ID: ENST00000320345
  CDS Start-End: 696-1814
agctttgcgctcgtgggagagtcccgcctccttctgcgaaccgcaccacccagatcccggggtgcgcggagggcgcgtctctgacggaagccggggcggacggtcggagtccggaagaaaaacagtccgcgacagctaggcgcgtgagaccggccgcccgcagggctgctctggccgggacccgctggccgggagacgcgaacctgccggaccaccgcgcggggacgacggcggccatgagctcgcggaagctgagcgggccgaaaggcaggaggctcagcacatacatcaggaggtctgcctgatcccatggtgaaccccgggaatccgaaatcagattgagataagatcctttagggaagtgacttagcctggtctcttgcctgctctttcacggggaacaacgctaatcgcccacttagtctaagtcacgatgcttggatttgctgctaatcgtcggatttgagagtgggaacaagaaatccggacttttgctctccatcctcttagacatacacgtcgtgacttggaacgtggcttcggcagcgccccctctagatctcagtgacctgcttcagctgaacaaccggaacctcaatcttgacatatatgttattggtttgcaggaattgaactctgggatcataagcctcctttccgatgctgcctttaatgactcgtggagcagtttcctcatggatgtgctttcccctctgagcttcatcaaggtctcccatgtccgtatgcaggggatcctcttactggtctttgccaagtatcagcatttgccctatatccagattctgtctactaaatccacccccactggcctgtttgggtactgggggaacaaaggtggagtcaacatctgcctgaagctttatggctactatgtcagcatcatcaactgccacctgcctccccacatttccaacaattaccagcggctggagcactttgaccggatcctggagatgcagaattgtgaggggcgagacatcccaaacatcctggaccacgacctcattatctggtttggagacatgaactttcggatcgaggactttgggttgcactttgttcgggaatccattaaaaatcggtgctacggtggcctgtgggagaaggaccagctcagcattgccaagaaacatgacccgctgctccgggagttccaggagggccgcctactcttcccgcccacctacaagtttgataggaactccaacgactatgacaccagtgagaaaaaacgcaagcctgcatggaccgatcgcatcctgtggaggctgaagcggcagccctgtgctggccccgacactcccataccgccggcgtcacacttctccttgtctctgaggggctacagcagccacatgacgtacggcatcagcgaccacaagcctgtctccggcacgttcgacttggagctgaagccattggtgtctgctccgctgatcgtcctgatgcccgaggacctgtggaccgtggaaaatgacatgatggtcagctactcttcaacctcggacttccccagcagcccgtgggactggattggactgtacaaggtggggctgcgggacgttaatgactacgtgtcctatgcctgggtcggggacagcaaggtctcctgcagcgacaacctgaaccaggtttacatcgacatcagcaatatccctaccactgaagatgagtttctcctctgttactacagcaacagtctgcgttctgtggtggggataagcagacccttccagatcccgcctggctccttgagggaggacccactgggtgaagcacagccacagatctgagccaggatgggagtgaatcccaggcggaggccagagctggcagccagctctgcctttccactgccgggagtgctgggggcccagcctggccccctgaagagacagccaagtgtcgtccacatactcctcccagagtgagctctaaccaggctcatttgctctctccactactcatctctggaattagccgcttaaatacaggtttttgttgctgagatgtgagtgaaaccagctagtgtgtcaacagtgaagacctggggacagttctgcgtctcatttctggattcctaccccctcttctagtcttgcccaagtagtcctgccaggcacatgccccatttggcacaggcctgcattcttgtcgtgccgtcctgggcctcaggctgtctgggaggggagatgctcacatttgtacaggctacatagactggtgcaagcagtgctggattccaggagtcttggcatctcatagcttgtccccgtgaggagtgagcagagggtctgggatttctgctttcagcaaaagcagtctgactcagtgggcagaatggaggggcccctctagccaggctcttacgccatggttatgagcaggttgatgagggtccttcggccagcacaaccttcctccctactcacggcatggagtctgactgcatggaagttccagatcctgacagagagaactgggaaggatccaggttcgcttccgttggtagcttgagtcccatgcctccaccctgccatctgaggaaggggtgacaagtggtcaaggagctgtggccacagacttttccagggtggtccttggcaggtgaggtgcgtctgtgccacccttgtcaggagccattgacgacgggccccccctggaccccccgggacctcagagtgggggcaggcagaagggagaaccagctcaagacattttggaggatctggccctggggttcttcagagaacaccctctaggggctttggggacatggcctgtccccacatccagcacttgcctccgccatggtcactcggcagcccttttcccaggagaagacacctctgggagcct

SEQ ID NO: 142915 - DNA, 3194 bp, Homo sapiens
  Payload ID: 8232
  Gene Symbol: INPP5K
  Gene Name: inositol polyphosphate-5-phosphatase K
  Uniprot ID: Q9BT40
  ENST ID: ENST00000406424
  CDS Start-End: 862-1980
ctctcgcagctttgcgctcgtgggagagtcccgcctccttctgcgaaccgcaccacccagatcccggggtgcgcggagggcgcgtctctgacggaagccggggcggacggtcggagtccggaagaaaaacagtccgcgacagctaggcgcgtgagaccggccgcccgcagggctgctctggccgggacccgctggccgggagacgcgaacctgccggaccaccgcgcggggacgacggcggccatgagctcgcggaagctgagcgggccgaaaggcaggaggctcagcacatacatcaggaggtctgcctgatcccatggtgaaccccgggaatccgaaatcagattgagataagatcctttagggaagtgacttagcctggtctcttgcctgctctttcacggggaacaacgctaatcgcccacttagtctaagtcacgatgcttggatttgctgctaatcgtcggatttgagagtgggaacaagaaatccggacttttgctctccatcctcttagaatctccagctgctgcaggtactcctcatcgtgtgcctaggactcatgctaggctgttcctggtctctgcagggtctgtagctcctgcccgctctgtgctccgcacagtctgaggcttcttgaagagctgctgtgactgactgttccactaaagacatctcatacacgtcgtgacttggaacgtggcttcggcagcgccccctctagatctcagtgacctgcttcagctgaacaaccggaacctcaatcttgacatatatgttattggtttgcaggaattgaactctgggatcataagcctcctttccgatgctgcctttaatgactcgtggagcagtttcctcatggatgtgctttcccctctgagcttcatcaaggtctcccatgtccgtatgcaggggatcctcttactggtctttgccaagtatcagcatttgccctatatccagattctgtctactaaatccacccccactggcctgtttgggtactgggggaacaaaggtggagtcaacatctgcctgaagctttatggctactatgtcagcatcatcaactgccacctgcctccccacatttccaacaattaccagcggctggagcactttgaccggatcctggagatgcagaattgtgaggggcgagacatcccaaacatcctggaccacgacctcattatctggtttggagacatgaactttcggatcgaggactttgggttgcactttgttcgggaatccattaaaaatcggtgctacggtggcctgtgggagaaggaccagctcagcattgccaagaaacatgacccgctgctccgggagttccaggagggccgcctactcttcccgcccacctacaagtttgataggaactccaacgactatgacaccagtgagaaaaaacgcaagcctgcatggaccgatcgcatcctgtggaggctgaagcggcagccctgtgctggccccgacactcccataccgccggcgtcacacttctccttgtctctgaggggctacagcagccacatgacgtacggcatcagcgaccacaagcctgtctccggcacgttcgacttggagctgaagccattggtgtctgctccgctgatcgtcctgatgcccgaggacctgtggaccgtggaaaatgacatgatggtcagctactcttcaacctcggacttccccagcagcccgtgggactggattggactgtacaaggtggggctgcgggacgttaatgactacgtgtcctatgcctgggtcggggacagcaaggtctcctgcagcgacaacctgaaccaggtttacatcgacatcagcaatatccctaccactgaagatgagtttctcctctgttactacagcaacagtctgcgttctgtggtggggataagcagacccttccagatcccgcctggctccttgagggaggacccactgggtgaagcacagccacagatctgagccaggatgggagtgaatcccaggcggaggccagagctggcagccagctctgcctttccactgccgggagtgctgggggcccagcctggccccctgaagagacagccaagtgtcgtccacatactcctcccagagtgagctctaaccaggctcatttgctctctccactactcatctctggaattagccgcttaaatacaggtttttgttgctgagatgtgagtgaaaccagctagtgtgtcaacagtgaagacctggggacagttctgcgtctcatttctggattcctaccccctcttctagtcttgcccaagtagtcctgccaggcacatgccccatttggcacaggcctgcattcttgtcgtgccgtcctgggcctcaggctgtctgggaggggagatgctcacatttgtacaggctacatagactggtgcaagcagtgctggattccaggagtcttggcatctcatagcttgtccccgtgaggagtgagcagagggtctgggatttctgctttcagcaaaagcagtctgactcagtgggcagaatggaggggcccctctagccaggctcttacgccatggttatgagcaggttgatgagggtccttcggccagcacaaccttcctccctactcacggcatggagtctgactgcatggaagttccagatcctgacagagagaactgggaaggatccaggttcgcttccgttggtagcttgagtcccatgcctccaccctgccatctgaggaaggggtgacaagtggtcaaggagctgtggccacagacttttccagggtggtccttggcaggtgaggtgcgtctgtgccacccttgtcaggagccattgacgacgggccccccctggaccccccgggacctcagagtgggggcaggcagaagggagaaccagctcaagacattttggaggatctggccctggggttcttcagagaacaccctctaggggctttggggacatggcctgtccccacatccagcacttgcctccgccatggtcactcggcagcccttttcccaggagaagacacctctgggagcctgctcagtgcttgtcctgccatcctgtgtcctgggactgagggttactccagttgctctgtgttgcatactctcccccgcaagcctgtgtatgaagaattgtcccctggcttccagcaggccatggctggctgttttgtgactgttaca

SEQ ID NO: 142916 - DNA, 565 bp, Homo sapiens
  Payload ID: 8232
  Gene Symbol: INPP5K
  Gene Name: inositol polyphosphate-5-phosphatase K
  ENST ID: ENST00000445774
  CDS Start-End: 182-340
cccggggtgcgcggagggcgcgtctctgacggaagccggggcggacggtcggagtccggaagaaaaacagtccgcgacagctaggcgcgtgagaccggccgcccgcagggctgctctggccgggacccgctggccgggagacgcgaacctgccggaccaccgcgcggggacgacggcggccatgagctcgcggaagctgagcgggccgaaaggcaggaggctcagcatacacgtcgtgacttggaacgtggcttcggcagcgccccctctagatctcagtgacctgcttcagctgaacaaccggaacctcaatcttgacatatatgttattgggaattgaactctgggatcataagcctcctttccgatgctgcctttaatgactcgtggagcagtttcctcatggatgtgctttcccctctgagcttcatcaaggtctcccatgtccgtatgcaggggatcctcttactggtctttgccaagtatcagcatttgccctatatccagattctgtctactaaatccacccccactggcctgtttgggtactgggggaacaaaggtg

SEQ ID NO: 142917 - DNA, 949 bp, Homo sapiens
  Payload ID: 8232
  Gene Symbol: INPP5K
  Gene Name: inositol polyphosphate-5-phosphatase K
  ENST ID: ENST00000449479
  CDS Start-End: 263-949
gcgtgagaccggccgcccgcagggctgctctggccgggacccgctggccgggagacgcgaacctgccggaccaccgcgcggggacgacggcggccatgagctcgcggaagctgagcgggccgaaaggcaggaggctcagcatacacgtcgtgacttggaacgtggcttcggcagcgccccctctagatctcagtgacctgcttcagctgaacaaccggaacctcaatcttgacatatatgttattgggtctcccatgtccgtatgcaggggatcctcttactggtctttgccaagtatcagcatttgccctatatccagattctgtctactaaatccacccccactggcctgtttgggtactgggggaacaaaggtggagtcaacatctgcctgaagctttatggctactatgtcagcatcatcaactgccacctgcctccccacatttccaacaattaccagcggctggagcactttgaccggatcctggagatgcagaattgtgaggggcgagacatcccaaacatcctggaccacgacctcattatctggtttggagacatgaactttcggatcgaggactttgggttgcactttgttcgggaatccattaaaaatcggtgctacggtggcctgtgggagaaggaccagctcagcattgccaagaaacatgacccgctgctccgggagttccaggagggccgcctactcttcccgcccacctacaagtttgataggaactccaacgactatgacaccagtgagaaaaaacgcaagcctgcatggaccgatcgcatcctgtggaggctgaagcggcagccctgtgctggccccgacactcccataccgccggcgtcacacttctccttgtctctgaggggctacagcagccacatgacgtacggcatcagcgaccacaagcctgtctccggcacgttcgacttggag

SEQ ID NO: 142918 - DNA, 2988 bp, Homo sapiens
  Payload ID: 8232
  Gene Symbol: INPP5K
  Gene Name: inositol polyphosphate-5-phosphatase K
  Uniprot ID: Q9BT40
  ENST ID: ENST00000421807
  CDS Start-End: 390-1736
acgctgggagctgcggacggcgggcgcgggctgggccgggtctagtggcggccgcacacctcgcgtcgtctggggcagtgttgcgcgtgcgctgatgacaggcccgacacgcccctcttacgtccgcgaacccgtcttcgctcagcctctcgcagctttgcgctcgtgggagagtcccgcctccttctgcgaaccgcaccacccagatcccggggtgcgcggagggcgcgtctctgacggaagccggggcggacggtcggagtccggaagaaaaacagtccgcgacagctaggcgcgtgagaccggccgcccgcagggctgctctggccgggacccgctggccgggagacgcgaacctgccggaccaccgcgcggggacgacggcggccatgagctcgcggaagctgagcgggccgaaaggcaggaggctcagcatacacgtcgtgacttggaacgtggcttcggcagcgccccctctagatctcagtgacctgcttcagctgaacaaccggaacctcaatcttgacatatatgttattggtttgcaggaattgaactctgggatcataagcctcctttccgatgctgcctttaatgactcgtggagcagtttcctcatggatgtgctttcccctctgagcttcatcaaggtctcccatgtccgtatgcaggggatcctcttactggtctttgccaagtatcagcatttgccctatatccagattctgtctactaaatccacccccactggcctgtttgggtactgggggaacaaaggtggagtcaacatctgcctgaagctttatggctactatgtcagcatcatcaactgccacctgcctccccacatttccaacaattaccagcggctggagcactttgaccggatcctggagatgcagaattgtgaggggcgagacatcccaaacatcctggaccacgacctcattatctggtttggagacatgaactttcggatcgaggactttgggttgcactttgttcgggaatccattaaaaatcggtgctacggtggcctgtgggagaaggaccagctcagcattgccaagaaacatgacccgctgctccgggagttccaggagggccgcctactcttcccgcccacctacaagtttgataggaactccaacgactatgacaccagtgagaaaaaacgcaagcctgcatggaccgatcgcatcctgtggaggctgaagcggcagccctgtgctggccccgacactcccataccgccggcgtcacacttctccttgtctctgaggggctacagcagccacatgacgtacggcatcagcgaccacaagcctgtctccggcacgttcgacttggagctgaagccattggtgtctgctccgctgatcgtcctgatgcccgaggacctgtggaccgtggaaaatgacatgatggtcagctactcttcaacctcggacttccccagcagcccgtgggactggattggactgtacaaggtggggctgcgggacgttaatgactacgtgtcctatgcctgggtcggggacagcaaggtctcctgcagcgacaacctgaaccaggtttacatcgacatcagcaatatccctaccactgaagatgagtttctcctctgttactacagcaacagtctgcgttctgtggtggggataagcagacccttccagatcccgcctggctccttgagggaggacccactgggtgaagcacagccacagatctgagccaggatgggagtgaatcccaggcggaggccagagctggcagccagctctgcctttccactgccgggagtgctgggggcccagcctggccccctgaagagacagccaagtgtcgtccacatactcctcccagagtgagctctaaccaggctcatttgctctctccactactcatctctggaattagccgcttaaatacaggtttttgttgctgagatgtgagtgaaaccagctagtgtgtcaacagtgaagacctggggacagttctgcgtctcatttctggattcctaccccctcttctagtcttgcccaagtagtcctgccaggcacatgccccatttggcacaggcctgcattcttgtcgtgccgtcctgggcctcaggctgtctgggaggggagatgctcacatttgtacaggctacatagactggtgcaagcagtgctggattccaggagtcttggcatctcatagcttgtccccgtgaggagtgagcagagggtctgggatttctgctttcagcaaaagcagtctgactcagtgggcagaatggaggggcccctctagccaggctcttacgccatggttatgagcaggttgatgagggtccttcggccagcacaaccttcctccctactcacggcatggagtctgactgcatggaagttccagatcctgacagagagaactgggaaggatccaggttcgcttccgttggtagcttgagtcccatgcctccaccctgccatctgaggaaggggtgacaagtggtcaaggagctgtggccacagacttttccagggtggtccttggcaggtgaggtgcgtctgtgccacccttgtcaggagccattgacgacgggccccccctggaccccccgggacctcagagtgggggcaggcagaagggagaaccagctcaagacattttggaggatctggccctggggttcttcagagaacaccctctaggggctttggggacatggcctgtccccacatccagcacttgcctccgccatggtcactcggcagcccttttcccaggagaagacacctctgggagcctgctcagtgcttgtcctgccatcctgtgtcctgggactgagggttactccagttgctctgtgttgcatactctcccccgcaagcctgtgtatgaagaattgtcccctggcttccagcaggccatggctggctgttttgtgactgttacattgtgcaggggtaattattagcgtggcttttacacttg

SEQ ID NO: 142919 - DNA, 571 bp, Homo sapiens
  Payload ID: 8232
  Gene Symbol: INPP5K
  Gene Name: inositol polyphosphate-5-phosphatase K
  ENST ID: ENST00000571274
  CDS Start-End: 318-571
atttcttgaagtgcttttgagaacgtcgacctctaaggacggggtctgttggaggagagatgttttggcattaactgcccttttctcccatccccctgtaccctctgccattccagatctccagctgctgcagcatacacgtcgtgacttggaacgtggcttcggcagcgccccctctagatctcagtgacctgcttcagctgaacaaccggaacctcaatcttgacatatatgttattggtttgcaggaattgaactctgggatcataagcctcctttccgatgctgcctttaatgactcgtggagcagtttcctcatggatgtgctttcccctctgagcttcatcaaggtctcccatgtccgtatgcaggggatcctcttactggtctttgccaagtatcagcatttgccctatatccagattctgtctactaaatccacccccactggcctgtttgggtactgggggaacaaaggtggagtcaacatctgcctgaagctttatggctactatgtcagcatcatcaactgccacctgcctccccacatttccaacaattaccagcggct

SEQ ID NO: 142920 - DNA, 566 bp, Homo sapiens
  Payload ID: 8232
  Gene Symbol: INPP5K
  Gene Name: inositol polyphosphate-5-phosphatase K
  ENST ID: ENST00000574955
  CDS Start-End: 163-318
gcgtctctgacggaagccggggcggacggtcggagtccggaagaaaaacagtccgcgacagctaggcgcgtgagaccggccgcccgcagggctgctctggccgggacccgctggccgggagacgcgaacctgccggaccaccgcgcggggacgacggcggccatgagctcgcggaagctgagcgggccgaaaggcaggaggctcagatctccagctgctgcaggtactcctcatcgtgtgcctaggactcatgctaggctgttcctggtctctgcagggtctgtagctcctgcccgctctgtgctccgcacagtctgaggcttcttgaagagctgctgtgactgactgttccactaaagacatctcatacacgtcgtgacttggaacgtggcttcggcagcgccccctctagatctcagtgacctgcttcagctgaacaaccggaacctcaatcttgacatatatgttattggaatgcttggccgggcgcggtggctcacgcctacaatcccagcactttgagaggccaaggcaggcagatcacctgaggtcgagagttcaagacc

SEQ ID NO: 142921 - DNA, 594 bp, Homo sapiens
  Payload ID: 8232
  Gene Symbol: INPP5K
  Gene Name: inositol polyphosphate-5-phosphatase K
  ENST ID: ENST00000575172
  CDS Start-End: 120-594
aaaaacagtccgcgacagctaggcgcgtgagaccggccgcccgcagggctgctctggccgggacccgctggccgggagacgcgaacctgccggaccaccgcgcggggacgacggcggccatgagctcgcggaagctgagcgggccgaaaggcaggaggctcagcatacacgtcgtgacttggaacgtggcttcggcagcgccccctctagatctcagtgacctgcttcagctgaacaaccggaacctcaatcttgacatatatgttattggtttgcaggaattgaactctgggatcataagcctcctttccgatgctgcctttaatgactcgtggagcagtttcctcatggatgtgctttcccctctgagcttcatcaaggtctcccatgtccgtatgcaggggatcctcttactggtctttgccaagtatcagcatttgccctatatccagattctgtctactaaatccacccccactggcctgtttgggtactggctcagcattgccaagaaacatgacccgctgctccgggagttccaggagggccgcctactcttcccgcccacctacaagtttgataggaactccaacg

SEQ ID NO: 142922 - DNA, 591 bp, Homo sapiens
  Payload ID: 8232
  Gene Symbol: INPP5K
  Gene Name: inositol polyphosphate-5-phosphatase K
  ENST ID: ENST00000574561
  CDS Start-End: 129-591
gtccggaagaaaaacagtccgcgacagctaggcgcgtgagaccggccgcccgcagggctgctctggccgggacccgctggccgggagacgcgaacctgccggaccaccgcgcggggacgacggcggccatgagctcgcggaagctgagcgggccgaaaggcaggaggctcagtgagaaaaaacgcaagcctgcatggaccgatcgcatcctgtggaggctgaagcggcagccctgtgctggccccgacactcccataccgccggcgtcacacttctccttgtctctgaggggctacagcagccacatgacgtacggcatcagcgaccacaagcctgtctccggcacgttcgacttggagctgaagccattggtgtctgctccgctgatcgtcctgatgcccgaggacctgtggaccgtggaaaatgacatgatggtcagctactcttcaacctcggacttccccagcagcccgtgggactggattggactgtacaaggtggggctgcgggacgttaatgactacgtgtcctatgcctgggtcggggacagcaaggtctcctgcagcgacaacctgaaccaggtttacatcg

SEQ ID NO: 142923 - DNA, 635 bp, Homo sapiens
  Payload ID: 8232
  Gene Symbol: INPP5K
  Gene Name: inositol polyphosphate-5-phosphatase K
  ENST ID: ENST00000573790
  CDS Start-End: 84-383
ccgcccgcagggctgctctggccgggacccgctggccgggagacgcgaacctgccggaccaccgcgcggggacgacggcggccatgagctcgcggaagctgagcgggccgaaaggcaggaggctcagcatacacgtcgtgacttggaacgtggcttcggcagcgccccctctagatctcagtgacctgcttcagctgaacaaccggaacctcaatcttgacatatatgttattgggtctcccatgtccgtatgcaggggatcctcttactggtctttgccaagtatcagcatttgccctatatccagattctgtctactaaatccacccccactggcctgtttgggtactgggggaacaaaggtggagtcaacatctgcctgaagctttatggctactatgtcagcatcatcaactgccacctgcctccccacatttccaacaattaccagcggctggagcactttgaccggatcctggagatgcagaattgtgaggggcgagacatcccaaacatcctggaccacgagtgagcctggcctcattatctggtttggagacatgaactttcggatcgaggactttgggttgcactttgttcgggaatccattaaaaatcggtgctacggtggcctg

SEQ ID NO: 142924 - DNA, 629 bp, Homo sapiens
  Payload ID: 8232
  Gene Symbol: INPP5K
  Gene Name: inositol polyphosphate-5-phosphatase K
  ENST ID: ENST00000576646
  CDS Start-End: 1-115
catacacgtcgtgacttggaacgtggcttcggcagcgccccctctagatctcagtgacctgcttcagctgaacaaccggaacctcaatcttgacatatatgttattgggaattgaactctgggatcataagcctcctttccgatgctgcctttaatgactcgtggagcagtttcctcatggatgtgctttcccctctgagcttcatcaaggtctcccatgtccgtatgcaggggatcctcttactggtctttgccaagtatcagcatttgccctatatccagattctgtctactaaatccacccccactggcctgtttgggtactgggggaacaaaggtggagtcaacatctgcctgaagctttatggctactatgtcagcatcatcaactgccacctgcctccccacatttccaacaattaccagcggctggagcactttgaccggatcctggagatgcagaattgtgaggggcgagacatcccaaacatcctggaccacgagtgagcctggcctcattatctggtttggagacatgaactttcggatcgaggactttgggttgcactttgttcgggaatccattaaaaatcggtgctacggtggcctgtgggagaaggaccagctca

SEQ ID NO: 142925 - DNA, 622 bp, Homo sapiens
  Payload ID: 8232
  Gene Symbol: INPP5K
  Gene Name: inositol polyphosphate-5-phosphatase K
  ENST ID: ENST00000498390
  CDS Start-End: 553-622
gacggaagccggggcggacggtcggagtccggaagaaaaacagtccgcgacagctaggcgcgtgagaccggccgcccgcagggctgctctggccgggacccgctggccgggagacgcgaacctgccggaccaccgcgcggggacgacggcggccatgagctcgcggaagctgagcgggccgaaaggcaggaggctcagcacatacatcaggaggtctgcctgatcccatggtgaaccccgggaatccgaaatcagattgagataagatcctttagggaagtgacttagcctggtctcttgcctgctctttcacggggaacaacgctaatcgcccacttagtctaagtcacgatgcttggatttgctgctaatcgtcggatttgagagtgggaacaagaaatccggacttttgctctccatcctcttagacatacacgtcgtgacttggaacgtggcttcggcagcgccccctctagatctcagtgacctgcttcagctgaacaaccggaacctcaatcttgacatatatgttattgggtctcccatgtccgtatgcaggggatcctcttactggtctttgccaagtatcagcatttgccctatatccagattctgtctacta

SEQ ID NO: 142926 - DNA, 739 bp, Homo sapiens
  Payload ID: 8232
  Gene Symbol: INPP5K
  Gene Name: inositol polyphosphate-5-phosphatase K
  ENST ID: ENST00000477910
  CDS Start-End: 590-739
agtccgcgacagctaggcgcgtgagaccggccgcccgcagggctgctctggccgggacccgctggccgggagacgcgaacctgccggaccaccgcgcggggacgacggcggccatgagctcgcggaagctgagcgggccgaaaggcaggaggctcagcacatacatcaggaggtctgcctgatcccatggtgaaccccgggaatccgaaatcagattgagataagatcctttagggaagtgacttagcctggtctcttgcctgctctttcacggggaacaacgctaatcgcccacttagtctaagtcacgatgcttggatttgctgctaatcgtcggatttgagagtgggaacaagaaatccggacttttgctctccatcctcttagaatctccagctgctgcagcatacacgtcgtgacttggaacgtggcttcggcagcgccccctctagatctcagtgacctgcttcagctgaacaaccggaacctcaatcttgacatatatgttattggtttgcaggaattgaactctgggatcataagcctcctttccgatgctgcctttaatgactcgtggagcagtttcctcatggatgtgctttcccctctgagcttcatcaaggtctcccatgtccgtatgcaggggatcctcttactggtctttgccaagtatcagcatttgccctatatccagattctgtctactaaatccacccccactggcctgtttgggtactgg

SEQ ID NO: 142927 - DNA, 2690 bp, Homo sapiens
  Payload ID: 8233
  Gene Symbol: IMPA1
  Gene Name: inositol(myo)-1(or 4)-monophosphatase 1
  Uniprot ID: P29218
  ENST ID: ENST00000256108
  CDS Start-End: 467-1300
gttagcacctaaaagctgcataatcggaatcatatctgcaatctgggttttgtcaaaatagtactatagaataaatgggagaaagaagaaagcaagctaaatgggaaaccgtgaatgaatggaggacgaaagaagaaaaaggcaaagtaaagagagaagtaatgtttaaaaactgagagatgaaaagacaagcaggagaaaagaaccagaagctagaatgaagaggcagtatcccatgctccagcgcgggtcaggacccggcccggcctggcagaggctcgcagggcgcagctcggggcggggcccagcaaagcaaccacgccccctcaggaatggagtttttaagggcggaacttcctgttgcgagtagcccctctacctccggaagagacgagtgcggtaacaccgttcacagagctagccggacgtcctccgactcaagatatttgtcaaatattttcagaagatggctgatccttggcaggaatgcatggattatgcagtaactctagcaagacaagctggagaggtagtttgtgaagctataaaaaatgaaatgaatgttatgctgaaaagttctccagttgatttggtaactgctacggaccaaaaagttgaaaaaatgcttatctcttccataaaggaaaagtatccatctcacagtttcattggtgaagaatctgtggcagctggggaaaaaagtatcttaaccgacaaccccacatggatcattgaccctattgatggaacaactaactttgtacatagatttccttttgtagctgtttcaattggctttgctgtaaataaaaagatagaatttggagttgtgtacagttgtgtggaaggcaagatgtacactgccagaaaaggaaaaggtgccttttgtaatggtcaaaaactacaagtttcacaacaagaagatattaccaaatctctcttggtgactgagttgggctcttccagaacaccagagactgtgagaatggttctttctaatatggaaaagcttttttgcattcctgttcatgggatccggagtgttggaacagcagctgttaatatgtgccttgtggcaactggcggagcagatgcatattatgaaatgggaattcactgctgggatgttgcaggagctggcattattgttactgaagctggtggcgtgctaatggatgttacaggtggaccatttgatttgatgtcacgaagagtaattgctgcaaataatagaatattagcagaaaggatagctaaagaaattcaggttatacctttgcaacgagacgacgaagattaattaaggcagcctcatagtcaatcccagttgcttttccccagatttggtgactcatcaatggatatgtgttttggatgtatgatatgcttggtttaaattctctttgtccaggtcaaaaatttggaacttgtttcttattttactatgtctaggtttgcaagaattgacataatgtttgtttcactgatttaaaaaattttgcatgtaagaatgtactttaggaaacatacccaggaagtacagttgataaatataacatcaactgaaatagtcaattagcaattttgtgtttctaaatatctatggtcccctgaaattttgacttagtatataggtgcagagacacccacttagaaagttaactgtttggaaaaacatttctctttagtttcaaaaaccatatataattaaatttgtaaggatatactgagtaccctaggccaacttttttttctttgcagagaaccttttttgttttattcttcagtgttcatatagcacctggcccattacatatctaggcaactaaaaacaaacattgtaagaatgaatatttttaatgtagtaattcctagttacaatagatacataaagtaatgaactcagcattctgtacttttgcttcaggtttgaagtaaaaattatctagttaaattttttttatttcacgttaccatgccatttcacattaccataccatcagatagcatggcttattgtgggcatttctgcagtgaatacattttccaaaacagttaaattgtctgtttggatttgctttaaagtcttgtgtaagagagaagaaactatttctataataaaaagcactctcatcagatatctgacataattagatacaatataacattttactaagttcagtattcatgttttaaaggtgtttatactgatttgattgtgctggcaaatatactgtattgttaatattgaactgtttatttttctcttagtcttcttatttaattaacttcattgccgctggattctgttcagcctttaaaaatatttcttagtggtcattgctctgcagaactcaaaaagaaaattgtacttgttcatagacatttttaaagggttaatttattgttcagccttatcccttggcacgtaaacagactactagacttattgtaggttcgtttgagctttgtgttgtaaaattaaaaatgcttctgtaaagttttcaaggtagggagtgattttattattgtgtatatctaatatattaagtatgtgtgatactaaggtttgactgctataattatttgtactgttgatcacatgtacttaaaacatctgatactgtattctaagacaggttgtttttgcaattaaatttattttaataagacgatcatgaataaaactt

SEQ ID NO: 142928 - DNA, 1106 bp, Homo sapiens
  Payload ID: 8233
  Gene Symbol: IMPA1
  Gene Name: inositol(myo)-1(or 4)-monophosphatase 1
  Uniprot ID: P29218
  ENST ID: ENST00000311489
  CDS Start-End: 75-671
gagtgcggtaacaccgttcacagagctagccggacgtcctccgactcaagatatttgtcaaatattttcagaagatggctgatccttggcaggaatgcatggattatgcagtaactctagcaagacaagctggagaggtagtttgtgaagctataaaaaatgaaatgaatgttatgctgaaaagttctccagttgatttggtaactgctacggaccaaaaagttgaaaaaatgcttatctcttccataaaggaaaagtatccatctcacagtttcattggtgaagaatctgtggcagctggggaaaaaagtatcttaaccgacaaccccacatggatcattgaccctattgatggaacaactaactttgtacatagatttccttttgtagctgtttcaattggctttgctgtaaataaaaagatagaatttggagttgtgtacagttgtgtggaaggcaagatgtacactgccagaaaaggaaaaggtgccttttgtaatggtcaaaaactacaagtttcacaacaagaaggatccggagtgttggaacagcagctgttaatatgtgccttgtggcaactggcggagcagatgcatattatgaaatgggaattcactgctgggatgttgcaggagctggcattattgttactgaagctggtggcgtgctaatggatgttacaggtggaccatttgatttgatgtcacgaagagtaattgctgcaaataatagaatattagcagaaaggatagctaaagaaattcaggttatacctttgcaacgagacgacgaagattaattaaggcagcctcatagtcaatcccagttgcttttccccagatttggtgactcatcaatggatatgtgttttggatgtatgatatgcttggtttaaattctctttgtccaggtcaaaaatttggaacttgtttcttattttactatgtctaggtttgcaagaattgacataatgtttgtttcactgatttaaaaaattttgcatgtaagaatgtactttaggaaacatacccaggaagtacagttgataaatataacatcaactgaaatagtcaattagcaattttgtgtttctaaatatctatggt

SEQ ID NO: 142929 - DNA, 1180 bp, Homo sapiens
  Payload ID: 8233
  Gene Symbol: IMPA1
  Gene Name: inositol(myo)-1(or 4)-monophosphatase 1
  Uniprot ID: P29218
  ENST ID: ENST00000449740
  CDS Start-End: 81-1091
cacagagctagccggacgtcctccgactcaagctcctagaaacttggtgcatccccaggcccaggtagtcactctaagtgatggggcagcgcccaggtcctgtgctgcccgcagtcgcggtgctgggacaggtggcaaaaaggaaggtggcctggctcctacgctggaaggctgtgaccaggacagaaacagcaggaaacagttcaggtgtttatggctttgggaaaatgaaaatatttgtcaaatattttcagaagatggctgatccttggcaggaatgcatggattatgcagtaactctagcaagacaagctggagaggtagtttgtgaagctataaaaaatgaaatgaatgttatgctgaaaagttctccagttgatttggtaactgctacggaccaaaaagttgaaaaaatgcttatctcttccataaaggaaaagtatccatctcacagtttcattggtgaagaatctgtggcagctggggaaaaaagtatcttaaccgacaaccccacatggatcattgaccctattgatggaacaactaactttgtacatagatttccttttgtagctgtttcaattggctttgctgtaaataaaaagatagaatttggagttgtgtacagttgtgtggaaggcaagatgtacactgccagaaaaggaaaaggtgccttttgtaatggtcaaaaactacaagtttcacaacaagaagatattaccaaatctctcttggtgactgagttgggctcttccagaacaccagagactgtgagaatggttctttctaatatggaaaagcttttttgcattcctgttcatgggatccggagtgttggaacagcagctgttaatatgtgccttgtggcaactggcggagcagatgcatattatgaaatgggaattcactgctgggatgttgcaggagctggcattattgttactgaagctggtggcgtgctaatggatgttacaggtggaccatttgatttgatgtcacgaagagtaattgctgcaaataatagaatattagcagaaaggatagctaaagaaattcaggttatacctttgcaacgagacgacgaagattaattaaggcagcctcatagtcaatcccagttgcttttccccagatttggtgactcatcaatggatatgtgttttggatgtatgatatgctt

SEQ ID NO: 142930 - DNA, 566 bp, Homo sapiens
  Payload ID: 8233
  Gene Symbol: IMPA1
  Gene Name: inositol(myo)-1(or 4)-monophosphatase 1
  ENST ID: ENST00000521979
  CDS Start-End: 84-413
ggaagagacgagtgcggtaacaccgttcacagagctagccggacgtcctccgactcaagatatttgtcaaatattttcagaagatggctgatccttggcaggaatgcatggattatgcagtaactctagcaagacaagctggagaggtagtttgtgaagctataaaaaatgaaatgaatgttatgctgaaaagttctccagttgatttggtaactgctacggaccaaaaagttgaaaaaatgcttatctcttccataaaggaaaagtatccatctcacagtttcattggtgaagaatctgtggcagctggggaaaaaagtatcttaaccgacaaccccacatggatcattgaccctattgatggaacaactaactttgtacatagctgtttcaattggctttgctgtaaataaaaagatagaatttggagttgtgtacagttgtgtggaaggcaagatgtacactgccagaaaaggaaaaggtgccttttgtaatggtcaaaaactacaagtttcacaacaagaagatattaccaaatctctcttggtgactgagttgggctcttc

SEQ ID NO: 142931 - DNA, 617 bp, Homo sapiens
  Payload ID: 8233
  Gene Symbol: IMPA1
  Gene Name: inositol(myo)-1(or 4)-monophosphatase 1
  ENST ID: ENST00000519816
  CDS Start-End: 56-436
acagagctagccggacgtcctccgactcaagatatttgtcaaatattttcagaagatggctgatccttggcaggaatgcatggattatgcagtaactctagcaagacaagctggagaggtagtttgtgaagctataaaaaatgaaatgaatgttatgctgaaaagttctccagttgatttggtaactgctacggaccaaaaagttgaaaaaatgcttatctcttccataaaggaaaagtatccatctcacagtttcattggtgaagaatctgtggcagctggggaaaaaagtatcttaaccgacaaccccacatggatcattgaccctattgatggaacaactaactttgtacatagatttccttttgtagctgtttcaattggctttgctgtaaataaaaaggtttggaaccgtaggttcttcccccgattatgaggttgatgggagccaaaatgaatttgtggactgtaaaaaaccaacctgtgtgaatatggagagctaaaagggaaatggaagcaatgggagaaggaagaaaaaagcctgaggtgcctaacttttcaggatagaatttggagttgtgtacagttgtgtggaaggcaagatgtacactgccaga

SEQ ID NO: 142932 - DNA, 773 bp, Homo sapiens
  Payload ID: 8233
  Gene Symbol: IMPA1
  Gene Name: inositol(myo)-1(or 4)-monophosphatase 1
  ENST ID: ENST00000518188
  CDS Start-End: 102-407
agtagcccctctacctccggaagagacgagtgcggtaacaccgttcacagagctagccggacgtcctccgactcaagatatttgtcaaatattttcagaagatggctgatccttggcaggaatgcatggattatgcagtaactctagcaagacaagctggagaggtagtttgtgaagctataaaaaatgaaatgaatgttatgctgaaaagttctccagttgatttggtaactgctacggaccaaaaagttgaaaaaatgcttatctcttccataaaggaaaagtatccatctcacagtttcattggtgaagaatctgtggcagctggggaaaaaagtatcttaaccgacaaccccacatggatcattgaccctattgatggaacaactaactttgtacatagatagaatttggagttgtgtacagttgtgtggaaggcaagatgtacactgccagaaaaggaaaaggtgccttttgtaatggtcaaaaactacaagtttcacaacaagaagatattaccaaatctctcttggtgactgagttgggctcttccagaacaccagagactgtgagaatggttctttctaatatggaaaagcttttttgcattcctgttcatgggatccggagtgttggaacagcagctgttaatatgtgccttgtggcaactggcggagcagatgcatattatgaaatgggaattcactgctgggatgttgcaggagctggcattattgttactgaagctggtggcgtgctaatggatgttacag

SEQ ID NO: 142933 - DNA, 653 bp, Homo sapiens
  Payload ID: 8233
  Gene Symbol: IMPA1
  Gene Name: inositol(myo)-1(or 4)-monophosphatase 1
  ENST ID: ENST00000519964
  CDS Start-End: 112-653
ctacctccggaagagacgagtgcggtaacaccgttcacagagctagccggacgtcctccgactcaagatatttgtcaaatattttcagaagatggctgatccttggcaggaatgcatggattatgcagtaactctagcaagacaagctggagagtttgtgaagctataaaaaatgaaatgaatgttatgctgaaaagttctccagttgatttggtaactgctacggaccaaaaagttgaaaaaatgcttatctcttccataaaggaaaagtatccatctcacagtttcattggtgaagaatctgtggcagctggggaaaaaagtatcttaaccgacaaccccacatggatcattgaccctattgatggaacaactaactttgtacatagatttccttttgtagctgtttcaattggctttgctgtaaataaaaagatagaatttggagttgtgtacagttgtgtggaaggcaagatgtacactgccagaaaaggaaaaggtgccttttgtaatggtcaaaaactacaagtttcacaacaagaagatattaccaaatctctcttggtgactgagttgggctcttccagaacaccagagactgtgagaatggttctttctaatatggaaaagcttttttgcattcctgttcatgg

SEQ ID NO: 142934 - DNA, 627 bp, Homo sapiens
  Payload ID: 8233
  Gene Symbol: IMPA1
  Gene Name: inositol(myo)-1(or 4)-monophosphatase 1
  ENST ID: ENST00000518202
  CDS Start-End: 105-627
gcgagtagcccctctacctccggaagagacgagtgcggtaacaccgttcacagagctagccggacgtcctccgactcaagatatttgtcaaatattttcagaagatggctgatccttggcaggaatgcatggattatgcagtaactctagcaagacaagctggagaggtagtttgtgaagctataaaaaatgaaatgaatgttatgctgaaaagttctccagttgatttggtaactgctacggaccaaaaagttgaaaaaatgcttatctcttccataaaggaaaagtatccatctcacagtttcattggtgaagaatctgtggcagctggggaaaaaagtatcttaaccgacaaccccacatggatcattgaccctattgatggaacaactaactttgtacatagatggagtttccctcttgttggccaggctgagatgcaatggcgcagtcttggctcactgcaacccccacctcccgggttcaagcgattcttctgcctcagcctgccaactgtttcaattggctttgctgtaaataaaaagatagaatttggagttgtgtacagttgtgtggaaggcaagatgtacactgccagaaaaggaaaaggtgccttttgtaatggtc

SEQ ID NO: 142935 - DNA, 793 bp, Homo sapiens
  Payload ID: 8233
  Gene Symbol: IMPA1
  Gene Name: inositol(myo)-1(or 4)-monophosphatase 1
  ENST ID: ENST00000523942
  CDS Start-End: 1-793
ctggaaggctgtgaccaggacagaaacagcaggaaacagttcaggtgtttatggctttgggaaaatgaaaaagatggctgatccttggcaggaatgcatggattatgcagtaactctagcaagacaagctggagaggtagtttgtgaagctataaaaaatgaaatgaatgttatgctgaaaagttctccagttgatttggtaactgctacggaccaaaaagttgaaaaaatgcttatctcttccataaaggaaaagtatccatctcacagtttcattggtgaagaatctgtggcagctggggaaaaaagtatcttaaccgacaaccccacatggatcattgaccctattgatggaacaactaactttgtacatagatttccttttgtagctgtttcaattggctttgctgtaaataaaaagatagaatttggagttgtgtacagttgtgtggaaggcaagatgtacactgccagaaaaggaaaaggtgccttttgtaatggtcaaaaactacaagtttcacaacaagaagatattaccaaatctctcttggtgactgagttgggctcttccagaacaccagagactgtgagaatggttctttctaatatggaaaagcttttttgcattcctgttcatgggatccggagtgttggaacagcagctgttaatatgtgccttgtggcaactggcggagcagatgcatattatgaaatgggaattcactgctgggatgttgcaggagctggcattattgttactgaagctggtggcgtgctaatggatgttacaggt

SEQ ID NO: 142936 - DNA, 770 bp, Homo sapiens
  Payload ID: 8233
  Gene Symbol: IMPA1
  Gene Name: inositol(myo)-1(or 4)-monophosphatase 1
  ENST ID: ENST00000522997
  CDS Start-End: 137-770
gtagcggttcgctcacgcgacctcacttaacctctgtggcggcttctgtggaataattgcccctttttatgtccccaactccgaaaagctcctagaaacttggtgcatccccaggcccaggtagtcactctaagtgatggggcagcgcccaggtcctgtgctgcccgcagtcgcggtgctgggacaggtggcaaaaaggaaggtggcctggctcctacgctggaaggctgtgaccaggacagaaacagcaggaaacagttcaggtgtttatggctttgggaaaatgaaaatatttgtcaaatattttcagaagatggctgatccttggcaggaatgcatggattatgcagtaactctagcaagacaagctggagaggtagtttgtgaagctataaaaaatgaaatgaatgttatgctgaaaagttctccagttgatttggtaactgctacggaccaaaaagttgaaaaaatgcttatctcttccataaaggaaaagtatccatctcacagtttcattggtgaagaatctgtggcagctggggaaaaaagtatcttaaccgacaaccccacatggatcattgaccctattgatggaacaactaactttgtacatagatttccttttgtagctgtttcaattggctttgctgtaaataaaaagatagaatttggagttgtgtacagttgtgtggaaggcaagatgtacactgccagaaaaggaaaaggtgccttttgtaatggtcaaaaactacaagtttcacaacaagaag

SEQ ID NO: 142937 - DNA, 543 bp, Homo sapiens
  Payload ID: 8233
  Gene Symbol: IMPA1
  Gene Name: inositol(myo)-1(or 4)-monophosphatase 1
  ENST ID: ENST00000521360
  CDS Start-End: 84-543
ggaagagacgagtgcggtaacaccgttcacagagctagccggacgtcctccgactcaagatatttgtcaaatattttcagaagatggctgatccttggcaggaatgcatggattatgcagtaactctagcaagacaagctggagaggtagtttgtgaagctataaaaaatgaaatgaatgttatgctgaaaagttctccagttgatttggtaactgctacggaccaaaaagttgaaaaaatgcttatctcttccataaaggaaaagtatccatctcacagatttccttttgtagctgtttcaattggctttgctgtaaataaaaagatagaatttggagttgtgtacagttgtgtggaaggcaagatgtacactgccagaaaaggaaaaggtgccttttgtaatggtcaaaaactacaagtttcacaacaagaagatattaccaaatctctcttggtgactgagttgggctcttccagaacaccagagactgtgagaatggttctttctaatatggaaaagcttttttgcattcctgttcatg

SEQ ID NO: 142938 - DNA, 1534 bp, Homo sapiens
  Payload ID: 8234
  Gene Symbol: IMPA2
  Gene Name: inositol(myo)-1(or 4)-monophosphatase 2
  Uniprot ID: O14732
  ENST ID: ENST00000269159
  CDS Start-End: 243-1109
gctgggctgggctcggcacggggcggggcggagggtggggagcggaaagcaggacgcacggctcccgcggcccgctggctgcccttcccgccagcgcaggtgtgggacgggcggcggactaggcacagagctgcgggagcaggcacagggagtgtggagcctggcggcgggacggcgggatccggtgggagccggagtcccgccgaggggggctggaggtggaggggcccggcgaggccgcgatgaagccgagcggcgaggaccaggcggcgctggcggccggcccctgggaggagtgcttccaggcggccgtgcagctggcgctgcgggcaggacagatcatcagaaaagcccttactgaggaaaaacgtgtctcaacaaaaacatcagctgcagatcttgtgacagaaacagatcaccttgtggaagatttaattatttctgagttgcgagagaggtttccttcacacaggttcattgcagaagaggccgcggcttctggggccaagtgtgtgctcacccacagcccgacgtggatcatcgaccccatcgacggcacctgcaattttgtgcacagattcccgactgtggcggttagcattggatttgctgttcgacaagagcttgaattcggagtgatttaccactgcacagaggagcggctgtacacgggccggcggggtcggggcgccttctgcaatggccagcggctccgggtctccggggagacagatctctcaaaggccttggttctgacagaaattggccccaaacgtgaccctgcgaccctgaagctgttcctgagtaacatggagcggctgctgcatgccaaggcgcatggggtccgagtgattggaagctccacattggcactctgccacctggcctcaggggccgcggatgcctattaccagtttggcctgcactgctgggatctggcggctgccacagtcatcatcagagaagcaggcggcatcgtgatagacacttcgggtggacccctcgacctcatggcttgcagagtggttgcggccagcacccgggagatggcgatgctcatagctcaggccttacagacgattaactatgggcgggatgatgagaagtgactgcggctgaggcaaagctgctcccaaggcctccctgggctgctgtgggctcctggggaggtggccctcgtggcccacgctccatgccagtggctcacgctctgctcctggctaccccagagggagttgtcacgctacagtgagtggctggccttttaaatcgacgtctctctcaccaggatttggtgtttagctgtttctctctttaatctcacgtagcctttttcaggttagtacgtgttcttctgtcagggccaaaactcaaatctcctgtgaaatacgtattgataatccaatcttgatttttccccccagaatataaatctcaggtaataaggctttagaactgctgataaagcggatcgttctcaggccctccccccggagtacttcagaatgcaataaatcaaaataatggccctgtg

SEQ ID NO: 142939 - DNA, 1575 bp, Homo sapiens
  Payload ID: 8234
  Gene Symbol: IMPA2
  Gene Name: inositol(myo)-1(or 4)-monophosphatase 2
  ENST ID: ENST00000383376
  CDS Start-End: 155-412
cgccagcgcaggtgtgggacgggcggcggactaggcacagagctgcgggagcaggcacagggagtgtggagcctggcggcgggacggcgggatccggtgggagccggagtcccgccgaggggggctggaggtggaggggcccggcgaggccgcgatgaagccgagcggcgaggaccaggcggcgctggcggccggcccctgggaggagtgcttccaggcggccgtgcagctggcgctgcgggcaggacagatcatcagaaaagcccttactgaggaaaaacgtgtctcaacaaaaacatcagctgcagatcttgtgacagaaacagatcaccttgtggaagatttaattatttctgagttgcgagagaggtttccttcacacaggtctcctttttctctagtacacatgtgaacccggcacaggaactggatagaaaacctctcggcaaggccacatagtcatgcacagaacagatgtttgcttagcgcctgcccaaggcctcacccttagtgaacttgggacagtccaagagtgtcaaaagcactgccctgaatgctttagatctagtcttttctttgatcctgagaatgcctttggaaggtgtaaacagcggccagctccacagggaccagcctgcagaaggttcattgcagaagaggccgcggcttctggggccaagtgtgtgctcacccacagcccgacgtggatcatcgaccccatcgacggcacctgcaattttgtgcacagattcccgactgtggcggttagcattggatttgctgttcgacaagagcttgaattcggagtgatttaccactgcacagaggagcggctgtacacgggccggcggggtcggggcgccttctgcaatggccagcggctccgggtctccggggagacaggatctcactctgtcacccaggctggagtgcggtggtgcagtcttggctcactgcagcctccacatcctaggttcaagcaattctcctgcctcatcctcctgagtagctgggactacaggcatgcgccaccacatctggctaatttttttgtattttttagtagagacggggtttcaccatgttggccaggctggtctcaaactgctgacctcaagtgagccttttgcctcggcctccgaaagtgctggggttacagttgtgagccactgcacctgaccatatttttaaaatatagagtcgataatgagttatactgggtttttttttttctgtttttttttttctgagatggagtttcactcttgttgcccaggctggagtgcaatggggcgatctcggctcactgcaacctccgcctccctggttcaagtgattttcctcctaagcctcccaagtagctgggattacaggcgcatgccaccatgcccagctaatttttgtatttttagtggagacagggttttgtcatgttggccaggctggtcttgaactcctgacctcaggtgatccacccgcccgggcctcccaaagtattgggattacaggcatgagccaccacacccggcctcaaccccatctcttaaaaaaataaaaagataacctttgctctca

SEQ ID NO: 142940 - DNA, 563 bp, Homo sapiens
  Payload ID: 8234
  Gene Symbol: IMPA2
  Gene Name: inositol(myo)-1(or 4)-monophosphatase 2
  ENST ID: ENST00000586230
  CDS Start-End: 1-379
ccacagcccgacgtggatcatcgaccccatcgacggcacctgcaattttgtgcacagattcccgactgtggcggttagcattggatttgctgttcgacaagagcttgaattcggagtgatttaccactgcacagaggagcggctgtacacgggccggcggggtcggggcgccttctgcaatggccagcggctccgggtctccggggagacagagatggggcttcgccatgctgcccaggctggtcttgaagtcctgacctcaaagcgatcggcgcacctcagccttgcaaagtgctgggattacaggcatgaaccaccacgcccagctcatgaatctctcaaaggccttggttctgacagaaattggccccaaacgtgaccctgcgaccctgaagctgttcctgagtaacatggagcggctgctgcatgccaaggcgcatggggtccgagtgattggaagctccacattggcactctgccacctggcctcaggggccgcggatgcctattaccagtttggcctgcactgctgggatctggcggctgccacagtcatcatcaga

SEQ ID NO: 142941 - DNA, 787 bp, Homo sapiens
  Payload ID: 8234
  Gene Symbol: IMPA2
  Gene Name: inositol(myo)-1(or 4)-monophosphatase 2
  ENST ID: ENST00000588927
  CDS Start-End: 488-787
atgaagccgagcggcgaggaccagaaaagcccttactgaggaaaaacgtgtctcaacaaaaacatcagctgcagatcttgtgacagaaacagatcaccttgtggaagatttaattatttctgagttgcgagagaggtttccttcacacaggttcattgcagaagaggccgcggcttctggggccaagtgtgtgctcacccacagcccgacgtggatcatcgaccccatcgacggcacctgcaattttgtgcacagattcccgactgtggcggttagcattggatttgctgttcgacaagagcttgaattcggagtgatttaccactgcacagaggagcggctgtacacgggccggcggggtcggggcgccttctgcaatggccagcggctccgggtctccggggagacagatctctcaaaggccttggttctgacagaaattggccccaaacgtgaccctgcgaccctgaagctgttcctgagtaacatggagcggctgctgcatgccaaggcgcatggggtccgagtgattggaagctccacattggcactctgccacctggcctcaggggccgcggatgcctattaccagtttggcctgcactgctgggatctggcggctgccacagtcatcatcagagaagcaggcggcatcgtgatagacacttcgggtggacccctcgacctcatggcttgcagagtggttgcggccagcacccgggagatggcgatgctcatagctcaggccttacagacgattaactatgggcgggatgatgagaagtga

SEQ ID NO: 142942 - DNA, 923 bp, Homo sapiens
  Payload ID: 8234
  Gene Symbol: IMPA2
  Gene Name: inositol(myo)-1(or 4)-monophosphatase 2
  ENST ID: ENST00000589238
  CDS Start-End: 566-865
cgctctgcgcgctgcgggacggggcacggcggagcagggttgggtccgcctcgagcggggagggtgatgctgcaccacaggggcggggctggagatcatcagaaaagcccttactgaggaaaaacgtgtctcaacaaaaacatcagctgcagatcttgtgacagaaacagatcaccttgtggaagatttaattatttctgagttgcgagagaggtttccttcacacaggttcattgcagaagaggccgcggcttctggggccaagtgtgtgctcacccacagcccgacgtggatcatcgaccccatcgacggcacctgcaattttgtgcacagattcccgactgtggcggttagcattggatttgctgttcgacaagagcttgaattcggagtgatttaccactgcacagaggagcggctgtacacgggccggcggggtcggggcgccttctgcaatggccagcggctccgggtctccggggagacagatctctcaaaggccttggttctgacagaaattggccccaaacgtgaccctgcgaccctgaagctgttcctgagtaacatggagcggctgctgcatgccaaggcgcatggggtccgagtgattggaagctccacattggcactctgccacctggcctcaggggccgcggatgcctattaccagtttggcctgcactgctgggatctggcggctgccacagtcatcatcagagaagcaggcggcatcgtgatagacacttcgggtggacccctcgacctcatggcttgcagagtggttgcggccagcacccgggagatggcgatgctcatagctcaggccttacagacgattaactatgggcgggatgatgagaagtgactgcggctgaggcaaagctgctcccaaggcctccctgggctgctgtgggctcctgggg

SEQ ID NO: 142943 - DNA, 895 bp, Homo sapiens
  Payload ID: 8234
  Gene Symbol: IMPA2
  Gene Name: inositol(myo)-1(or 4)-monophosphatase 2
  ENST ID: ENST00000590138
  CDS Start-End: 60-410
ggtgggagccggagtcccgccgaggggggctggaggtggaggggcccggcgaggccgcgatgaagccgagcggcgaggaccaggcggcgctggcggccggcccctgggaggagtgcttccaggcggccgtgcagctggcgctgcgggcaggacagatcatcagaaaagcccttactgaggaaaaacgtgtctcaacaaaaacatcagctgcagatcttgtgacagaaacagatcaccttgtggaagatttaattatttctgagttgcgagagaggtttccttcacacaggttcattgcagaagaggccgcggcttctggggccaagtgtgtgctcacccacagcccgacgtggatcatcgaccccatcgacggcacctgcaattttgtgcacagcttgaattcggagtgatttaccactgcacagaggagcggctgtacacgggccggcggggtcggggcgccttctgcaatggccagcggctccgggtctccggggagacagatctctcaaaggccttggttctgacagaaattggccccaaacgtgaccctgcgaccctgaagctgttcctgagtaacatggagcggctgctgcatgccaaggcgcatggggtccgagtgattggaagctccacattggcactctgccacctggcctcaggggccgcggatgcctattaccagtttggcctgcactgctgggatctggcggctgccacagtcatcatcagagaagcaggcggcatcgtgatagacacttcgggtggacccctcgacctcatggcttgcagagtggttgcggccagcacccgggagatggcgatgctcatagctcaggccttacagacgattaactatgggcgggatgatgagaagtgactgcggctgaggcaa

SEQ ID NO: 142944 - DNA, 1616 bp, Homo sapiens
  Payload ID: 8234
  Gene Symbol: IMPA2
  Gene Name: inositol(myo)-1(or 4)-monophosphatase 2
  ENST ID: ENST00000590107
  CDS Start-End: 206-697
gggagcggaaagcaggacgcacggctcccgcggcccgctggctgcccttcccgccagcgcaggtgtgggacgggcggcggactaggcacagagctgcgggagcaggcacagggagtgtggagcctggcggcgggacggcgggatccggtgggagccggagtcccgccgaggggggctggaggtggaggggcccggcgaggccgcgatgaagccgagcggcgaggaccaggcggcgctggcggccggcccctgggaggagtgcttccaggcggccgtgcagctggcgctgcgggcaggacagatcatcagaaaagcccttactgaggaaaaacgtgtctcaacaaaaacatcagctgcagatcttgtgacagaaacagatcaccttgtggaagatttaattatttctgagttgcgagagaggtttccttcacacaggttcattgcagaagaggccgcggcttctggggccaagtgtgtgctcacccacagcccgacgtggatcatcgaccccatcgacggcacctgcaattttgtgcacagattcccgactgtggcggttagcattggatttgctgttcgacaagaggtgcgggtgtggcccaggtccccagggcccctccctgggctccctctggccatccttcctttctggcttcagcctctgtgcgcctggtttgctgtttgccctgtgccttaatcatgactggcaaatccaagcctcttgaattcggagtgatttaccactgcacagaggagcggctgtacacgggccggcggggtcggggcgccttctgcaatggccagcggctccgggtctccggggagacagatctctcaaaggccttggttctgacagaaattggccccaaacgtgaccctgcgaccctgaagctgttcctgagtaacatggagcggctgctgcatgccaaggcgcatggggtccgagtgattggaagctccacattggcactctgccacctggcctcaggggccgcggatgcctattaccagtttggcctgcactgctgggatctggcggctgccacagtcatcatcagagaagcaggcggcatcgtgatagacacttcgggtggacccctcgacctcatggcttgcagagtggttgcggccagcacccgggagatggcgatgctcatagctcaggccttacagacgattaactatgggcgggatgatgagaagtgactgcggctgaggcaaagctgctcccaaggcctccctgggctgctgtgggctcctggggaggtggccctcgtggcccacgctccatgccagtggctcacgctctgctcctggctaccccagagggagttgtcacgctacagtgagtggctggccttttaaatcgacgtctctctcaccaggatttggtgtttagctgtttctctctttaatctcacgtagcctttttcaggttagtacgtgttcttctgtcagggccaaaactcaaatctcctgtgaaatacgtattgataatccaatcttgatttttccccccagaatataaatctcaggtaataaggctttagaactgctgataaagcggatcgttctcaggccctccccccggagtacttcagaatgcaataaatcaa

SEQ ID NO: 142945 - DNA, 500 bp, Homo sapiens
  Payload ID: 8234
  Gene Symbol: IMPA2
  Gene Name: inositol(myo)-1(or 4)-monophosphatase 2
  ENST ID: ENST00000625802
  CDS Start-End: 243-500
gctgggctgggctcggcacggggcggggcggagggtggggagcggaaagcaggacgcacggctcccgcggcccgctggctgcccttcccgccagcgcaggtgtgggacgggcggcggactaggcacagagctgcgggagcaggcacagggagtgtggagcctggcggcgggacggcgggatccggtgggagccggagtcccgccgaggggggctggaggtggaggggcccggcgaggccgcgatgaagccgagcggcgaggaccaggcggcgctggcggccggcccctgggaggagtgcttccaggcggccgtgcagctggcgctgcgggcaggacagatcatcagaaaagcccttactgaggaaaaacgtgtctcaacaaaaacatcagctgcagatcttgtgacagaaacagatcaccttgtggaagatttaattatttctgagttgcgagagaggtttccttcacacaggtctcctttttctctagtacacatgtga

SEQ ID NO: 142946 - DNA, 2420 bp, Homo sapiens
  Payload ID: 8235
  Gene Symbol: ISYNA1
  Gene Name: inositol-3-phosphate synthase 1
  Uniprot ID: Q9NPH2
  ENST ID: ENST00000338128
  CDS Start-End: 219-1895
acttccgccaggcggggacccgatggccacggtggctctgggttgtcgggcctcgaaccgggtctccagacgttgggcccctccctcccagcgcgggagaggcggggaagggggcggggcgggggaggggccgcagcgcttttctccggaggtcgcgcgcccgagagcccgcgctgtccgccgccgctgcctgagtcgactctgcgccgcccgccgcgatggaggccgccgcccagttcttcgtcgagagcccggacgtggtctacggccccgaggccatcgaggcgcaatacgagtaccggacgacgcgcgtcagccgcgagggtggcgttctcaaggtgcaccccacgtccacgcgcttcaccttccggaccgcccggcaggtgccccggctcggggtcatgcttgtcggctggggcgggaacaacggctccacactcaccgccgcggtgctggccaatcgactgcgtttgtcctggcccacgcgcagcggccgcaaggaggccaactactacggctcgctgactcaggcgggcaccgtgagcctgggcctggacgccgagggccaggaggtgttcgtacccttcagcgcggtgctgcccatggtggcgcccaacgacctcgtgttcgatggctgggacatctcgtcgctgaacctggccgaggcgatgcggcgcgcgaaggtgctggactgggggctgcaggagcaactgtggccgcacatggaggccctgcggccccggccttctgtttacatccccgaattcatcgcggccaaccagagcgcgcgcgcggacaacctcatcccaggctcgcgtgcgcagcagctggagcagatccgcagggacatccgagacttccggtctagcgcggggctggacaaagtcatagtgctgtggacggcgaacacggagcgcttctgtgaggtgattccaggcctcaacgacacagccgagaacctgctgcgcaccattgagctcggtctggaggtgtcgccctccacgctcttcgccgtggccagcatcctggagggctgtgccttcctcaatgggtctccgcagaacaccctggtgcccggagctcttgagctcgcgtggcagcaccgggtttttgtgggcggagatgacttcaagtcaggccagaccaaagtcaagtccgtgcttgtggacttcctcattggctccggcctcaagaccatgtccatcgtgagttacaaccacctgggcaacaacgatggggagaacctatcggcgccattgcagttccgctctaaggaggtgtccaagagcaacgtggtggacgacatggtgcagagcaacccagtgctctatacgcccggcgaagagcctgaccactgcgtggtcatcaagtatgtgccgtacgtgggtgacagcaagcgcgcgctggatgagtatacctcggagctgatgctgggcggaaccaacacactggtgctgcacaacacgtgtgaggactcgctgctggccgcacccatcatgctggacctagcgctgctgaccgagctgtgccagcgcgtgagcttctgcactgacatggaccccgagccgcagaccttccaccccgtgctgtccctgctcagcttcctcttcaaggcgccactagtgccgcccggcagcccggtggtcaatgcgcttttccgccagcgcagctgcatcgagaacatcctcagggcctgcgtggggctcccgccacagaaccacatgctcctggaacacaaaatggagcgcccagggcccagcctcaagcgagttggacccgtggctgccacctaccctatgttgaacaagaaaggaccggtacccgctgccaccaatggctgcaccggtgatgccaatgggcatctgcaagaggagcccccaatgcccaccacctgaggccccggtcacacagtttctcggctcttcctccccgctgccccccacgaccctaccttgaaggcccccacaaataaaggcgctgccactcagccctccttccacctggggttcttggggcctgtgacctgactctgcctccctctacttccccgactcttgagcgcccagcttcagtcccatcccctctgcccatggtcatcaccccaactcccagggagagcccagaacctggagcctcgctctgcccccagttctcaaaggtggggctagatgggggcggggacggaacaagaccacagggtggagagtgtggtggcagaaggccaaagagggaatctgagacaagctaccaaaaaccaaaaccagcttccatttatttatgggccccaccccctgacgtcctggggagaggggccccccaaagagcctttctctctgggacaaaatacaaatggcaggaagggtccatacagaaaagaacgtctctgaggtccttgcgtttttaataaaatggtaagagtc

SEQ ID NO: 142947 - DNA, 1703 bp, Homo sapiens
  Payload ID: 8235
  Gene Symbol: ISYNA1
  Gene Name: inositol-3-phosphate synthase 1
  Uniprot ID: Q9NPH2
  ENST ID: ENST00000457269
  CDS Start-End: 85-1599
agcgcttttctccggaggtcgcgcgcccgagagcccgcgctgtccgccgccgctgcctgagtcgactctgcgccgcccgccgcgatggaggccgccgcccagttcttcgtcgagagcccggacgtggtctacggccccgaggccatcgaggcgcaatacgagtaccggacgacgcgcgtcagccgcgagggtggcgttctcaaggaggccaactactacggctcgctgactcaggcgggcaccgtgagcctgggcctggacgccgagggccaggaggtgttcgtacccttcagcgcggtgctgcccatggtggcgcccaacgacctcgtgttcgatggctgggacatctcgtcgctgaacctggccgaggcgatgcggcgcgcgaaggtgctggactgggggctgcaggagcaactgtggccgcacatggaggccctgcggccccggccttctgtttacatccccgaattcatcgcggccaaccagagcgcgcgcgcggacaacctcatcccaggctcgcgtgcgcagcagctggagcagatccgcagggacatccgagacttccggtctagcgcggggctggacaaagtcatagtgctgtggacggcgaacacggagcgcttctgtgaggtgattccaggcctcaacgacacagccgagaacctgctgcgcaccattgagctcggtctggaggtgtcgccctccacgctcttcgccgtggccagcatcctggagggctgtgccttcctcaatgggtctccgcagaacaccctggtgcccggagctcttgagctcgcgtggcagcaccgggtttttgtgggcggagatgacttcaagtcaggccagaccaaagtcaagtccgtgcttgtggacttcctcattggctccggcctcaagaccatgtccatcgtgagttacaaccacctgggcaacaacgatggggagaacctatcggcgccattgcagttccgctctaaggaggtgtccaagagcaacgtggtggacgacatggtgcagagcaacccagtgctctatacgcccggcgaagagcctgaccactgcgtggtcatcaagtatgtgccgtacgtgggtgacagcaagcgcgcgctggatgagtatacctcggagctgatgctgggcggaaccaacacactggtgctgcacaacacgtgtgaggactcgctgctggccgcacccatcatgctggacctagcgctgctgaccgagctgtgccagcgcgtgagcttctgcactgacatggaccccgagccgcagaccttccaccccgtgctgtccctgctcagcttcctcttcaaggcgccactagtgccgcccggcagcccggtggtcaatgcgcttttccgccagcgcagctgcatcgagaacatcctcagggcctgcgtggggctcccgccacagaaccacatgctcctggaacacaaaatggagcgcccagggcccagcctcaagcgagttggacccgtggctgccacctaccctatgttgaacaagaaaggaccggtacccgctgccaccaatggctgcaccggtgatgccaatgggcatctgcaagaggagcccccaatgcccaccacctgaggccccggtcacacagtttctcggctcttcctccccgctgccccccacgaccctaccttgaaggcccccacaaataaaggcgctgccactcagccctccttcca

SEQ ID NO: 142948 - DNA, 592 bp, Homo sapiens
  Payload ID: 8235
  Gene Symbol: ISYNA1
  Gene Name: inositol-3-phosphate synthase 1
  ENST ID: ENST00000578352
  CDS Start-End: 61-592
gcccgagagcccgcgctgtccgccgccgctgcctgagtcgactctgcgccgcccgccgcgatggaggccgccgcccagttcttcgtcgagagcccggacgtggtctacggccccgaggccatcgaggcgcaatacgagtaccggacgacgcgcgtcagccgcgagggtggcgttctcaaggtgcaccccacgtccacgcgcttcaccttccggaccgcccggcaggtgccccggctcggggtcatgcttgtcggctggggcgggaacaacggctccacactcaccgccgcggtgctggccaatcgactgcgtttgtcctggcccacgcgcagcggccgcaagctggagcagatccgcagggacatccgagacttccggtctagcgcggggctggacaaagtcatagtgctgtggacggcgaacacggagcgcttctgtgaggtgattccaggcctcaacgacacagccgagaacctgctgcgcaccattgagctcggtctggaggtgtcgccctccacgctcttcgccgtggccagcatcctggagggctgtgccttcctcaatgggtctccgcagaacaccctggtgcccg

SEQ ID NO: 142949 - DNA, 1466 bp, Homo sapiens
  Payload ID: 8235
  Gene Symbol: ISYNA1
  Gene Name: inositol-3-phosphate synthase 1
  ENST ID: ENST00000577820
  CDS Start-End: 33-173
ctgcctgagtcgactctgcgccgcccgccgcgatggaggccgccgcccagttcttcgtcgagagcccggacgtggtctacggccccgaggccatcgaggcgcaatacgagtaccggacgacgcgcgtcagccgcgagggtggcgttctcaaggctgggacatctcgtcgctgaacctggccgaggcgatgcggcgcgcgaaggtgctggactgggggctgcaggagcaactgtggccgcacatggaggccctgcggccccggccttctgtttacatccccgaattcatcgcggccaaccagagcgcgcgcgcggacaacctcatcccaggctcgcgtgcgcagcagctggagcagatccgcagggacatccgagacttccggtctagcgcggggctggacaaagtcatagtgctgtggacggcgaacacggagcgcttctgtgaggtgattccaggcctcaacgacacagccgagaacctgctgcgcaccattgagctcggtctggaggtgtcgccctccacgctcttcgccgtggccagcatcctggagggctgtgccttcctcaatgggtctccgcagaacaccctggtgcccggagctcttgagctcgcgtggcagcaccgggtttttgtgggcggagatgacttcaagtcaggccagaccaaagtcaagtccgtgcttgtggacttcctcattggctccggcctcaagaccatgtccatcgtgagttacaaccacctgggcaacaacgatggggagaacctatcggcgccattgcagttccgctctaaggaggtgtccaagagcaacgtggtggacgacatggtgcagagcaacccagtgctctatacgcccggcgaagagcctgaccactgcgtggtcatcaagtatgtgccgtacgtgggtgacagcaagcgcgcgctggatgagtatacctcggagctgatgctgggcggaaccaacacactggtgctgcacaacacgtgtgaggactcgctgctggccgcacccatcatgctggacctagcgctgctgaccgagctgtgccagcgcgtgagcttctgcactgacatggaccccgagccgcagaccttccaccccgtgctgtccctgctcagcttcctcttcaaggcgccactagtgccgcccggcagcccggtggtcaatgcgcttttccgccagcgcagctgcatcgagaacatcctcagggcctgcgtggggctcccgccacagaaccacatgctcctggaacacaaaatggagcgcccagggcccagcctcaagcgagttggacccgtggctgccacctaccctatgttgaacaagaaaggaccggtacccgctgccaccaatggctgcaccggtgatgccaatgggcatctgcaagaggagcccccaatgcccaccacctgaggccccggtcacacagtttctcggctcttcctccccgctgccccccacgacc

SEQ ID NO: 142950 - DNA, 627 bp, Homo sapiens
  Payload ID: 8235
  Gene Symbol: ISYNA1
  Gene Name: inositol-3-phosphate synthase 1
  ENST ID: ENST00000581800
  CDS Start-End: 80-627
ttttctccggaggtcgcgcgcccgagagcccgcgctgtccgccgccgctgcctgagtcgactctgcgccgcccgccgcgatggaggccgccgcccagttcttcgtcgagagcccggacgtggtctacggccccgaggccatcgaggcgcaatacgagtaccggacgacgcgcgtcagccgcgagggtggcgttctcaaggtggaccagggggctgaggaaggaggcgtgctggggagagcggggcggctcggggagaagggcacgggacccgggattcactgcgcggcctgtcttcaggtgcaccccacgtccacgcgcttcaccttccggaccgcccggcaggtgccccggctcggggtcatgcttgtcggctggggcgggaacaacggctccacactcaccgccgcggtgctggccaatcgactgcgtttgtcctggcccacgcgcagcggccgcaaggaggccaactactacggctcgctgactcaggcgggcaccgtgagcctgggcctggacgccgagggccaggaggtgttcgtacccttcagcgcggtgctgcccatggtggcgcccaacgacctcgtgttcgatggctgggacatctcgtcgctgaacctggccgaggc

SEQ ID NO: 142951 - DNA, 2039 bp, Homo sapiens
  Payload ID: 8235
  Gene Symbol: ISYNA1
  Gene Name: inositol-3-phosphate synthase 1
  ENST ID: ENST00000582811
  CDS Start-End: 133-273
ctgagtcgactctgcgccggtgagtgcggttcggggcagggacggcctccgtggggacccaggctggcttggccccggccgcttagagtccccgctgaccccctgctcaccccgggcccccagcccgccgcgatggaggccgccgcccagttcttcgtcgagagcccggacgtggtctacggccccgaggccatcgaggcgcaatacgagtaccggacgacgcgcgtcagccgcgagggtggcgttctcaaggctgggacatctcgtcgctgaacctggccgaggcgatgcggcgcgcgaaggtgctggactgggggctgcaggagcaactgtggccgcacatggaggccctgcggccccggccttctgtttacatccccgaattcatcgcggccaaccagagcgcgcgcgcggacaacctcatcccaggctcgcgtgcgcagcagctggagcagatccgcagggacatccgagacttccggtctagcgcggggctggacaaagtcatagtgctgtggacggcgaacacggagcgcttctgtgaggtgattccaggcctcaacgacacagccgagaacctgctgcgcaccattgagctcggtctggaggtgtcgccctccacgctcttcgccgtggccagcatcctggagggctgtgccttcctcaatgggtctccgcagaacaccctggtgcccggagctcttgagctcgcgtggcagcaccgggtttttgtgggcggagatgacttcaagtcaggccagaccaaagtcaagtccgtgcttgtggacttcctcattggctccggcctcaagaccatgtccatcgtgagttacaaccacctgggcaacaacgatggggagaacctatcggcgccattgcagttccgctctaaggaggtgtccaagagcaacgtggtggacgacatggtgcagagcaacccagtgctctatacgcccggcgaagagcctgaccactgcgtggtcatcaagtatgtgccgtacgtgggtgacagcaagcgcgcgctggatgagtatacctcggagctgatgctgggcggaaccaacacactggtgctgcacaacacgtgtgaggactcgctgctggccgcacccatcatgctggacctagcgctgctgaccgagctgtgccagcgcgtgagcttctgcactgacatggaccccgagccgcagaccttccaccccgtgctgtccctgctcagcttcctcttcaaggcgccactagtgccgcccggcagcccggtggtcaatgcgcttttccgccagcgcagctgcatcgagaacatcctcagggcctgcgtggggctcccgccacagaaccacatgctcctggaacacaaaatggagcgcccagggcccagcctcaagcgagttggacccgtggctgccacctaccctatgttgaacaagaaaggaccggtacccgctgccaccaatggctgcaccggtgatgccaatgggcatctgcaagaggagcccccaatgcccaccacctgaggccccggtcacacagtttctcggctcttcctccccgctgccccccacgaccctaccttgaaggcccccacaaataaaggcgctgccactcagccctccttccacctggggttcttggggcctgtgacctgactctgcctccctctacttccccgactcttgagcgcccagcttcagtcccatcccctctgcccatggtcatcaccccaactcccagggagagcccagaacctggagcctcgctctgcccccagttctcaaaggtggggctagatgggggcggggacggaacaagaccacagggtggagagtgtggtggcagaaggccaaagagggaatctgagacaagctaccaaaaaccaaaaccagcttccatttatttatgggccccaccccctgacgtcctggggagaggggccccccaaagagcctttctctctgggacaaaatacaaatggcaggaagggtccatacagaaaagaacgtctctgaggtccttgcgtttttaataaaatggtaagagtc

SEQ ID NO: 142952 - DNA, 1654 bp, Homo sapiens
  Payload ID: 8235
  Gene Symbol: ISYNA1
  Gene Name: inositol-3-phosphate synthase 1
  ENST ID: ENST00000582770
  CDS Start-End: 80-535
ttttctccggaggtcgcgcgcccgagagcccgcgctgtccgccgccgctgcctgagtcgactctgcgccgcccgccgcgatggaggccgccgcccagttcttcgtcgagagcccggacgtggtctacggccccgaggccatcgaggcgcaatacgagtaccggacgacgcgcgtcagccgcgagggtggcgttctcaaggtgcaccccacgtccacgcgcttcaccttccggaccgcccggcaggtgccccggctcggggtcatgcttgtcggctggggcgggaacaacggctccacactcaccgccgcggtgctggccaatcgactgcgtttgtcctggcccacgcgcagcggccgcaaggaggccaactactacggctcgctgactcaggcgggcaccgtgagcctgggcctggacgccgagggccaggaggtgttcgtacccttcagcgcggtgctgcccatggtggcgcccaacgacctcgtgttcgatgctggagcagatccgcagggacatccgagacttccggtctagcgcggggctggacaaagtcatagtgctgtggacggcgaacacggagcgcttctgtgaggtgattccaggcctcaacgacacagccgagaacctgctgcgcaccattgagctcggtctggaggtgtcgccctccacgctcttcgccgtggccagcatcctggagggctgtgccttcctcaatgggtctccgcagaacaccctggtgcccggagctcttgagctcgcgtggcagcaccgggtttttgtgggcggagatgacttcaagtcaggccagaccaaagtcaagtccgtgcttgtggacttcctcattggctccggcctcaagaccatgtccatcgtgagttacaaccacctgggcaacaacgatggggagaacctatcggcgccattgcagttccgctctaaggaggtgtccaagagcaacgtggtggacgacatggtgcagagcaacccagtgctctatacgcccggcgaagagcctgaccactgcgtggtcatcaagtatgtgccgtacgtgggtgacagcaagcgcgcgctggatgagtatacctcggagctgatgctgggcggaaccaacacactggtgctgcacaacacgtgtgaggactcgctgctggccgcacccatcatgctggacctagcgctgctgaccgagctgtgccagcgcgtgagcttctgcactgacatggaccccgagccgcagaccttccaccccgtgctgtccctgctcagcttcctcttcaaggcgccactagtgccgcccggcagcccggtggtcaatgcgcttttccgccagcgcagctgcatcgagaacatcctcagggcctgcgtggggctcccgccacagaaccacatgctcctggaacacaaaatggagcgcccagggcccagcctcaagcgagttggacccgtggctgccacctaccctatgttgaacaagaaaggaccggtacccgctgccaccaatggctgcaccggtgatgccaatgggcatctgcaagaggagcccccaatgcccaccacctgaggccccggtcacacagtttctcggctcttcctccccgctgccccccacgaccctaccttgaaggcccccacaaataaaggcgctgccactca

SEQ ID NO: 142953 - DNA, 629 bp, Homo sapiens
  Payload ID: 8235
  Gene Symbol: ISYNA1
  Gene Name: inositol-3-phosphate synthase 1
  ENST ID: ENST00000583534
  CDS Start-End: 184-629
ttttctccggaggtcgcgcgcccgagagcccgcgctgtccgccgccgctgcctgagtcgactctgcgccggtgagtgcggttcggggcagggacggcctccgtggggacccaggctggcttggccccggccgcttagagtccccgctgaccccctgctcaccccgggcccccagcccgccgcgatggaggccgccgcccagttcttcgtcgagagcccggacgtggtctacggccccgaggccatcgaggcgcaatacgagtaccggacgacgcgcgtcagccgcgagggtggcgttctcaaggtgcaccccacgtccacgcgcttcaccttccggaccgcccggcaggtgccccggctcggggtcatgcttgtcggctggggcgggaacaacggctccacactcaccgccgcggtgctggccaatcgactgcgtttgtcctggcccacgcgcagcggccgcaaggaggccaactactacggctcgctgactcaggcgggcaccgtgagcctgggcctggacgccgagggccaggaggtgttcgtacccttcagcgcggtgctgcccatggtggcgcccaacgacctcgtgttcgatggctgggacatctcgtcgctgaacctggccga

SEQ ID NO: 142954 - DNA, 793 bp, Homo sapiens
  Payload ID: 8235
  Gene Symbol: ISYNA1
  Gene Name: inositol-3-phosphate synthase 1
  ENST ID: ENST00000581672
  CDS Start-End: 1-701
acaaccacctgggcaacaacgatggggagaacctatcggcgccattgcagttccgctctaaggaggtgtccaagagcaacgtggtggacgacatggtgcagagcaacccagtgctctatacgcccggcgaagagcctgaccactgcgtggtcatcaagtatgtgccgtacgtgggtgacagcaagcgcgcgctggatgagtatacctcggagctgatgctgggcggaaccaacacactggtgctgcacaacacgtgtgaggactcgctgctggccgcacccatcatgctggacctagcgctgctgaccgagctgtgccagcgcgtgagcttctgcactgacatggaccccgagccgcagaccttccaccccgtgctgtccctgctcagcttcctcttcaaggcgccactagtgccgcccggcagcccggtggtcaatgcgcttttccgccagcgcagctgcatcgagaacatcctcaggtgcaccccagcctccagggcctgcgtggggctcccgccacagaaccacatgctcctggaacacaaaatggagcgcccagggcccagcctcaagcgagttggacccgtggctgccacctaccctatgttgaacaagaaaggaccggtacccgctgccaccaatggctgcaccggtgatgccaatgggcatctgcaagaggagcccccaatgcccaccacctgaggccccggtcacacagtttctcggctcttcctccccgctgccccccacgaccctaccttgaaggcccccacaaataaaggcgctgccactca

SEQ ID NO: 142955 - DNA, 1691 bp, Homo sapiens
  Payload ID: 8235
  Gene Symbol: ISYNA1
  Gene Name: inositol-3-phosphate synthase 1
  Uniprot ID: Q9NPH2
  ENST ID: ENST00000578963
  CDS Start-End: 307-1599
gggagtcttacaggggcggagcttaaggtgccggaggtctcaggggaggggcctgggggcagcggcttccgtcctggctgtgagcctggaactgaaaaatgcccgaaagtggggcggggcttgagagtctaggtggggcccaggccgggtcgcggccctttcaccactcccacccgtcacctcgccgtgtctgctgacccccaggaggccaactactacggctcgctgactcaggcgggcaccgtgagcctgggcctggacgccgagggccaggaggtgttcgtacccttcagcgcggtgctgcccatggtggcgcccaacgacctcgtgttcgatggctgggacatctcgtcgctgaacctggccgaggcgatgcggcgcgcgaaggtgctggactgggggctgcaggagcaactgtggccgcacatggaggccctgcggccccggccttctgtttacatccccgaattcatcgcggccaaccagagcgcgcgcgcggacaacctcatcccaggctcgcgtgcgcagcagctggagcagatccgcagggacatccgagacttccggtctagcgcggggctggacaaagtcatagtgctgtggacggcgaacacggagcgcttctgtgaggtgattccaggcctcaacgacacagccgagaacctgctgcgcaccattgagctcggtctggaggtgtcgccctccacgctcttcgccgtggccagcatcctggagggctgtgccttcctcaatgggtctccgcagaacaccctggtgcccggagctcttgagctcgcgtggcagcaccgggtttttgtgggcggagatgacttcaagtcaggccagaccaaagtcaagtccgtgcttgtggacttcctcattggctccggcctcaagaccatgtccatcgtgagttacaaccacctgggcaacaacgatggggagaacctatcggcgccattgcagttccgctctaaggaggtgtccaagagcaacgtggtggacgacatggtgcagagcaacccagtgctctatacgcccggcgaagagcctgaccactgcgtggtcatcaagtatgtgccgtacgtgggtgacagcaagcgcgcgctggatgagtatacctcggagctgatgctgggcggaaccaacacactggtgctgcacaacacgtgtgaggactcgctgctggccgcacccatcatgctggacctagcgctgctgaccgagctgtgccagcgcgtgagcttctgcactgacatggaccccgagccgcagaccttccaccccgtgctgtccctgctcagcttcctcttcaaggcgccactagtgccgcccggcagcccggtggtcaatgcgcttttccgccagcgcagctgcatcgagaacatcctcagggcctgcgtggggctcccgccacagaaccacatgctcctggaacacaaaatggagcgcccagggcccagcctcaagcgagttggacccgtggctgccacctaccctatgttgaacaagaaaggaccggtacccgctgccaccaatggctgcaccggtgatgccaatgggcatctgcaagaggagcccccaatgcccaccacctgaggccccggtcacacagtttctcggctcttcctccccgctgccccccacgaccctaccttgaaggcccccacaaataaaggcgctgccactca

SEQ ID NO: 142956 - DNA, 6066 bp, Homo sapiens
  Payload ID: 8236
  Gene Symbol: ITPK1
  Gene Name: inositol-tetrakisphosphate 1-kinase
  Uniprot ID: Q13572
  ENST ID: ENST00000267615
  CDS Start-End: 175-1419
ggccgaggaggaagtggcggcggcggcggcgggactgcgcgccccagctccgatccccgttccgcgtccccgccgccgggaggaggtgcccactcgctcgcggcgcgcgccggccgccagactcggcctgtgggcgatttcctccggacccaggctccccgcccgaggaggaagatgcagacctttctgaaagggaagagagttggctactggctgagcgagaagaaaatcaagaagctgaatttccaggccttcgccgagctgtgcaggaagcgagggatggaggttgtgcagctgaaccttagccggccgatcgaggagcagggccccctggacgtcatcatccacaagctgactgacgtcatccttgaagccgaccagaatgatagccagtccctggagctggtgcacaggttccaggagtacatcgatgcccaccctgagaccatcgtcctggacccgctccctgccatcagaaccctgcttgaccgctccaagtcctatgagctcatccggaagattgaggcctacatggaagacgacaggatctgctcgccacccttcatggagctcacgagcctgtgcggggatgacaccatgcggctgctggagaagaacggcttgactttcccattcatttgcaaaaccagagtggctcatggcaccaactctcacgagatggctatcgtgttcaaccaggagggcctgaacgccatccagccaccctgcgtggtccagaatttcatcaaccacaacgccgtcctgtacaaggtgttcgtggttggcgagtcctacaccgtggtccagaggccctcactcaagaacttctccgcaggcacatcagaccgtgagtccatcttcttcaacagccacaacgtgtcaaagccggagtcgtcatcggtcctgacggagctggacaagatcgagggcgtgttcgagcggccgagcgacgaggtcatccgggagctctcccgggccctgcggcaggcactgggcgtgtcactcttcggcatcgacatcatcatcaacaaccagacagggcagcacgccgtcattgacatcaatgccttcccaggctacgagggcgtgagcgagttcttcacagacctcctgaaccacatcgccactgtcctgcagggccagagcacagccatggcagccacaggggacgtggccctgctgaggcacagcaagcttctggccgagccggcgggcggcctggtgggcgagcggacatgcagcgccagccccggctgctgcggcagcatgatgggccaggacgcgccctggaaggctgaggccgacgcgggcggcaccgccaagctgccgcaccagagactcggctgcaacgccggcgtgtcgcccagcttccagcagcattgtgtggcctccctggccaccaaggcctcctcccagtagccacggagccgggacccagaggggcagcgcagggcgcagagcacacccgctgggccagcagctcccaacggcgatgctactactaagaatccccagtgatctgattcttctgttttttaatttttaacctgattctctgatgtcatgatctaaatgaggggtagtgggggatggaagagagtaccaggtggtccaccgttggggagtggggccgtccgcctgctctctactgtgcagacctcctaactgagtttacacacgcttgtgtttgcaacactaggtctggatgggaggtgaggggtgtgcgtatggctgccatgccagtgtctgtgcacatccctgtctgttggtctccatggccactgtggaccgggacccttgggggaagcctgcccatgtcgggctgtgggaggctgatcggtgcatgtgagagtggcttcccttctgcctgactccccactccctgacctgccccttccttgtttttcctcctactggtctccaccaaggctttgttagcccccaccctgcctggtgtgcagctaacccctccctccccacagccagaggaggccacagacccctcaggggagttccgcgctggggtctgggctgtgctccctcactaaagggaaggaaaggaagctgggcgtcctctgggccccccaacacacgtcccatttagccctgcacagcggtctccttcccctaagccagcactgctgctccctggagcccgggaaggaggctgcctggctggaggcccgagccgatggcgcctgtgctgaggatttgtgctgtgatttgggcaaatcattccaggtctttgggcctccacccccttgtctctagtggacatttgagatcagagagcaccacagggctggctttgtgccctaacccctgggatgcagcctgcctttccataaagtcacctaggtgaggataggcgcgggagcctcggcatgacaccatggagatcggggccctcttcccagtgggttcactccttttcacacctgctgggtccctcctcacccagcaggcctggtccacctctcattgcaagccccaagcactgagccagcaggtgccagggagccacccgccccccatcgcttctgcacacctcagactcaccccatcaccttggcagcaaagcactggctctgccgtctgacccctgatccaggcagccccctctgcagagaaaagggttggggagaagcctctgcagtcctggaagatgtggggtgctgggtgagaggcatcagcccccacaagtatgtttttgtgtcttaagatagcagtttactttgaaaaagtgaaaaaggcttccgggctgtcctctgcccagtgagatggaggacgctagagaaagtgctgagtgtcccgagagaggcccccgagccagtgcatggaggtccttcggcctggctcagctgggctgcaggatgcccactttgaggagggaggcacagggcttgggcgaggggcagaggccatcagaactgcccggcttttttggaaactgaggacccaacaactaaccacgtttacacgacttgagttttgaaccccgattaatgtctgtacgtcacctttcctagttctgaccctgagccctggggaacaggaaagcgtggctggcctcttgcactgctttgtctccaaaataaactactgaaatcaaaccgcatttcacacgtgtttacacatgttgctcaagtttgttatgtcatactcccagtccttaaaagacgtttaataaaacagctttaccttttaaaaataaaatttcaatcccagtctgcctcaggtacgggtgggggtgtgcagcgtgactcctggctgtgttcctgtaccgtttgtggcctccggggtcttgcgcgtccagggcccagataccgagtaactgccatgtggtgtcgtggtggcgtccataggcctccgtggtggggcgggggcggggctgtgggtgtgcagggcagctgcattttccaagagtggagatggaggatggagatttgcttcgtaaaggcctgggagctacatgggaggtagggaggggccagccacacccagggctggggggccggtggactctgcccagtgaagccaggggagtgtcagcaatgaggggcctggacagcgacgcgggacccgcacctgggagcggcagagatggagcccagctcgctaaacgtaccctaagggtgcacgctgaccatctttgatccctggacagtgtccatagagttgtctccccttcggtcacattgtccctggccttggagtttctgcctcagggaaagacccactaaaaccacccgggctctggcggcctcctcttctccagagcatggtggcgctgcctcctgagcagagtcactgagagtgtctgggtccaaggaagggacccacttagcaaaggttgttgtgtggtgctgtgcaggcacggcgcctggagttggccccgccagcatcggggtggcttggggctctggttcctaagcttctgcttctgagttggtcagcacgttggctctgcgccctgcagtgcctgtcttgatggtggtccctggatgtgctgaagggctccaggagcaaggggccagaccacactttggctgagtccttgggtagtttcagagggtcacctgcacagtctgcattgagcaccctggggctgaggccgtgggtcaagttctgcctgacagtgctttgattatatggtgatgtgattctgcaaacataaccccccaactgagtgccagctgctgggtgtccccaccccaagagccaaggggaggccaccctggaactggtgctttgcccttggtgtcatggaggtgtctgggtccacacgtggtgggtgggctgggcctgcagtcacccagcatggccggcgggattggacccagctgcaacctggcaggttccatggggcttcctgtgcctgggcctgcctgtgtctcatgcctgtcaataaaggagaaagcaacctgggaaaaacattcctctctgtacccaggggactgccaagtgtgctttatagaaggctggaagaccgactgaagtaggaagctgtcacatgtttgagccaactgagcaaagcagctgttgcctgccagacagccaccccaagaccaagggagccagcctgtcgtttgtccttctagcctggaagaccagttcttggctcttgggcactcacattggccactggccacaactgctgaatggcttcactaatgtccctggggtctgtatctgccctctcttctattccctagaaactctggccgggcatggcggctcacgcctgtcatcccagcacttagggaggctgaggcaggtggatcacaaggtcaagagatcgacaccatcctggccaacatggtgaaaccccatctctactaaaaatacaaaaattagctggacatggtggtgggcgcctgtagtcccagctacttgggaggctgaggcaggagaattgcttgaactcgggaggcgtaggttgcagtgagccaagatcgcaccactgcactccagcctggcaacagagcaagactcctcaaaaaacaaacaaacaaacaaacaaactctgatcattcacccggtgggatccccggcagctccttctccttcccgagctgtggctcatgggccattggattcagagaccttgagctgggtgctggctgccctaaaggagcacgacccctccagcctggtgaccgggaggcagagaagtgcagctgtccttgacaaaggcccagcctctgctgcctcaggccagcctggccacaccccgatgccacagtcatctgccccgcccaggcataagcctgactcaggtgatacaggcgaggcttctcccatgggtcctccccttgtgagaaagggtctgtgctgtgtaccttctctctgcacagccattgtcagtgtggtttggagtgagtgagcctcccgcactgctcaggggagagctggtgagcatgactccatggcctcctgctggttggggtcttcttctgattctcacccgcaggagcacccagacccccccttttcagaaatgattacattttcccttcaagagtcatctgtgacctggtggtgtggagggactgtcccctcctgcagcctggccgacccccttcctccagggctgtgtggaatcacctctcagaagctcactctgaaaagccactcacagggatttcaccaggatgttgctgttcctgccgacacctgggctttgtgacaaatgctgtttgcttcaagctgttcacaagcaacttcaccagaatcccaagctggttcgtacttaatttgtgtacatacatatgcataatatacatgaccatgtatgagatacagacaccatggcttctgtccattggctcattcgcctggtcgcatgttcactccatgaggttaggacactgcgggtggctttgggatgggtggtttcagggacaaggtgtcgctatgatctctgtatttgctaactagtcttgttttgatttctaacggtctagtggagtacagttaatgttgtgtttatttctgtaactgtaggggtggagtataaacctaacttttggaaacatgaagaaataaacaatagcgccagccgtt

SEQ ID NO: 142957 - DNA, 2803 bp, Homo sapiens
  Payload ID: 8236
  Gene Symbol: ITPK1
  Gene Name: inositol-tetrakisphosphate 1-kinase
  Uniprot ID: Q13572
  ENST ID: ENST00000354313
  CDS Start-End: 290-1234
cgccgccgcgggctcaagcggggcggccgggccagcgcggggcggcggcgggcaggggcggcgagtgcgcgggcgctcgccgccgcccttctcggcgggcagcgcgcgaggaccaggccgaggaggaagtggcggcggcggcggcgggactgcgcgccccagctccgatccccgttccgcgtccccgccgccgggaggaggtgcccactcgctcgcggcgcgcgccggccgccagactcggcctgtgggcgatttcctccggacccaggctccccgcccgaggaggaagatgcagacctttctgaaagggaagagagttggctactggctgagcgagaagaaaatcaagaagctgaatttccaggccttcgccgagctgtgcaggaagcgagggatggaggttgtgcagctgaaccttagccggccgatcgaggagcagggccccctggacgtcatcatccacaagctgactgacgtcatccttgaagccgaccagaatgatagccagtccctggagctggtgcacaggttccaggagtacatcgatgcccaccctgagaccatcgtcctggacccgctccctgccatcagaaccctgcttgaccgctccaagtcctatgagctcatccggaagattgaggcctacatggaagacgacaggatctgctcgccacccttcatggagctcacgagcctgtgcggggatgacaccatgcggctgctggagaagaacggcttgactttcccattcatttgcaaaaccagagtggctcatggcaccaactctcacgagatggctatcgtgttcaaccaggagggcctgaacgccatccagccaccctgcgtggtccagaatttcatcaaccacaacgccgtcctgtacaaggtgttcgtggttggcgagtcctacaccgtggtccagaggccctcactcaagaacttctccgcaggcacatcagaccgtgagtccatcttcttcaacagccacaacgtgtcaaagccggagtcgtcatcggtcctgacggagctggacaagatcgagggcgtgttcgagcggccgagcgacgaggtcatccgggagctctcccgggccctgcggcaggcactgggcgtgtcactcttcggcatcgacatcatcatcaacaaccagacagggcagcacgccgtcattgacatcaatgccttcccaggggactgccaagtgtgctttatagaaggctggaagaccgactgaagtaggaagctgtcacatgtttgagccaactgagcaaagcagctgttgcctgccagacagccaccccaagaccaagggagccagcctgtcgtttgtccttctagcctggaagaccagttcttggctcttgggcactcacattggccactggccacaactgctgaatggcttcactaatgtccctggggtctgtatctgccctctcttctattccctagaaactctggccgggcatggcggctcacgcctgtcatcccagcacttagggaggctgaggcaggtggatcacaaggtcaagagatcgacaccatcctggccaacatggtgaaaccccatctctactaaaaatacaaaaattagctggacatggtggtgggcgcctgtagtcccagctacttgggaggctgaggcaggagaattgcttgaactcgggaggcgtaggttgcagtgagccaagatcgcaccactgcactccagcctggcaacagagcaagactcctcaaaaaacaaacaaacaaacaaacaaactctgatcattcacccggtgggatccccggcagctccttctccttcccgagctgtggctcatgggccattggattcagagaccttgagctgggtgctggctgccctaaaggagcacgacccctccagcctggtgaccgggaggcagagaagtgcagctgtccttgacaaaggcccagcctctgctgcctcaggccagcctggccacaccccgatgccacagtcatctgccccgcccaggcataagcctgactcaggtgatacaggcgaggcttctcccatgggtcctccccttgtgagaaagggtctgtgctgtgtaccttctctctgcacagccattgtcagtgtggtttggagtgagtgagcctcccgcactgctcaggggagagctggtgagcatgactccatggcctcctgctggttggggtcttcttctgattctcacccgcaggagcacccagacccccccttttcagaaatgattacattttcccttcaagagtcatctgtgacctggtggtgtggagggactgtcccctcctgcagcctggccgacccccttcctccagggctgtgtggaatcacctctcagaagctcactctgaaaagccactcacagggatttcaccaggatgttgctgttcctgccgacacctgggctttgtgacaaatgctgtttgcttcaagctgttcacaagcaacttcaccagaatcccaagctggttcgtacttaatttgtgtacatacatatgcataatatacatgaccatgtatgagatacagacaccatggcttctgtccattggctcattcgcctggtcgcatgttcactccatgaggttaggacactgcgggtggctttgggatgggtggtttcagggacaaggtgtcgctatgatctctgtatttgctaactagtcttgttttgatttctaacggtctagtggagtacagttaatgttgtgtttatttctgtaactgtaggggtggagtataaacctaacttttggaaacatgaagaaataaacaatagcgccagccgtt

SEQ ID NO: 142958 - DNA, 770 bp, Homo sapiens
  Payload ID: 8236
  Gene Symbol: ITPK1
  Gene Name: inositol-tetrakisphosphate 1-kinase
  ENST ID: ENST00000557309
  CDS Start-End: 267-770
ctacgcctaggagggcccctgggtgttcacccacccccccggggggccccatcctgggccagggtccgcttcctcgagggaaggggcgaattcctggaaggtctccttccgggcgcagttgcaatggattgccttgggggtgctgaaccctgctgggggtacagagacgtttccgaaactcagcggctcggtcgcccccaaaggccaggcggaacacacgcccacaccgcggctcccttcccgaagctccccgcccgaggaggaagatgcagacctttctgaaagggaagagagttggctactggctgagcgagaagaaaatcaagaagctgaatttccaggccttcgccgagctgtgcaggaagcgagggatggaggttgtgcagctgaaccttagccggccgatcgaggagcagggccccctggacgtcatcatccacaagctgactgacgtcatccttgaagccgaccagaatgatagccagtccctggagctggtgcacaggttccaggagtacatcgatgcccaccctgagaccatcgtcctggacccgctccctgccatcagaaccctgcttgaccgctccaagtcctatgagctcatccggaagattgaggcctacatggaagacgacaggatctgctcgccacccttcatggagctcacgagcctgtgcggggatgacaccatgcggctgctggagaagaacggcttgactttcccattcatttgcaaaaccagagtggctcatggcaccaactctcacgag

SEQ ID NO: 142959 - DNA, 3174 bp, Homo sapiens
  Payload ID: 8236
  Gene Symbol: ITPK1
  Gene Name: inositol-tetrakisphosphate 1-kinase
  Uniprot ID: Q13572
  ENST ID: ENST00000556603
  CDS Start-End: 122-1366
gcgggcaggggcggcgagtgcgcgggcgctcgccgccgcccttctcggcgggcagcgcgcgaggaccaggccgaggaggaagtggcggcggcggcggcgggctccccgcccgaggaggaagatgcagacctttctgaaagggaagagagttggctactggctgagcgagaagaaaatcaagaagctgaatttccaggccttcgccgagctgtgcaggaagcgagggatggaggttgtgcagctgaaccttagccggccgatcgaggagcagggccccctggacgtcatcatccacaagctgactgacgtcatccttgaagccgaccagaatgatagccagtccctggagctggtgcacaggttccaggagtacatcgatgcccaccctgagaccatcgtcctggacccgctccctgccatcagaaccctgcttgaccgctccaagtcctatgagctcatccggaagattgaggcctacatggaagacgacaggatctgctcgccacccttcatggagctcacgagcctgtgcggggatgacaccatgcggctgctggagaagaacggcttgactttcccattcatttgcaaaaccagagtggctcatggcaccaactctcacgagatggctatcgtgttcaaccaggagggcctgaacgccatccagccaccctgcgtggtccagaatttcatcaaccacaacgccgtcctgtacaaggtgttcgtggttggcgagtcctacaccgtggtccagaggccctcactcaagaacttctccgcaggcacatcagaccgtgagtccatcttcttcaacagccacaacgtgtcaaagccggagtcgtcatcggtcctgacggagctggacaagatcgagggcgtgttcgagcggccgagcgacgaggtcatccgggagctctcccgggccctgcggcaggcactgggcgtgtcactcttcggcatcgacatcatcatcaacaaccagacagggcagcacgccgtcattgacatcaatgccttcccaggctacgagggcgtgagcgagttcttcacagacctcctgaaccacatcgccactgtcctgcagggccagagcacagccatggcagccacaggggacgtggccctgctgaggcacagcaagcttctggccgagccggcgggcggcctggtgggcgagcggacatgcagcgccagccccggctgctgcggcagcatgatgggccaggacgcgccctggaaggctgaggccgacgcgggcggcaccgccaagctgccgcaccagagactcggctgcaacgccggcgtgtcgcccagcttccagcagcattgtgtggcctccctggccaccaaggcctcctcccagtagccacggagccgggacccagaggggcagcgcagggcgcagagcacacccgctgggccagcagctcccaacggcgatgctactactaagaatccccagtgatctgattcttctgttttttaatttttaacctgattctctgatgtcatgatctaaatgaggggtagtgggggatggaagagagtaccaggtggtccaccgttggggagtggggccgtccgcctgctctctactgtgcagacctcctaactgagtttacacacgcttgtgtttgcaacactaggtctggatgggaggtgaggggtgtgcgtatggctgccatgccagtgtctgtgcacatccctgtctgttggtctccatggccactgtggaccgggacccttgggggaagcctgcccatgtcgggctgtgggaggctgatcggtgcatgtgagagtggcttcccttctgcctgactccccactccctgacctgccccttccttgtttttcctcctactggtctccaccaaggctttgttagcccccaccctgcctggtgtgcagctaacccctccctccccacagccagaggaggccacagacccctcaggggagttccgcgctggggtctgggctgtgctccctcactaaagggaaggaaaggaagctgggcgtcctctgggccccccaacacacgtcccatttagccctgcacagcggtctccttcccctaagccagcactgctgctccctggagcccgggaaggaggctgcctggctggaggcccgagccgatggcgcctgtgctgaggatttgtgctgtgatttgggcaaatcattccaggtctttgggcctccacccccttgtctctagtggacatttgagatcagagagcaccacagggctggctttgtgccctaacccctgggatgcagcctgcctttccataaagtcacctaggtgaggataggcgcgggagcctcggcatgacaccatggagatcggggccctcttcccagtgggttcactccttttcacacctgctgggtccctcctcacccagcaggcctggtccacctctcattgcaagccccaagcactgagccagcaggtgccagggagccacccgccccccatcgcttctgcacacctcagactcaccccatcaccttggcagcaaagcactggctctgccgtctgacccctgatccaggcagccccctctgcagagaaaagggttggggagaagcctctgcagtcctggaagatgtggggtgctgggtgagaggcatcagcccccacaagtatgtttttgtgtcttaagatagcagtttactttgaaaaagtgaaaaaggcttccgggctgtcctctgcccagtgagatggaggacgctagagaaagtgctgagtgtcccgagagaggcccccgagccagtgcatggaggtccttcggcctggctcagctgggctgcaggatgcccactttgaggagggaggcacagggcttgggcgaggggcagaggccatcagaactgcccggcttttttggaaactgaggacccaacaactaaccacgtttacacgacttgagttttgaaccccgattaatgtctgtacgtcacctttcctagttctgaccctgagccctggggaacaggaaagcgtggctggcctcttgcactgctttgtctccaaaataaactactgaaatcaaaccgcatttcacacgtgtttacacatgttgctcaagtttgttatgtcatactcccagtccttaaaagacgtttaataaaacagctttaccttttaaaaataaaatttcaatccca

SEQ ID NO: 142960 - DNA, 667 bp, Homo sapiens
  Payload ID: 8236
  Gene Symbol: ITPK1
  Gene Name: inositol-tetrakisphosphate 1-kinase
  ENST ID: ENST00000554999
  CDS Start-End: 124-667
gatccccgttccgcgtccccgccgccgggaggaggtgcccactcgctcgcggcgcgcgccggccgccagactcggcctgtgggcgatttcctccggacccaggctccccgcccgaggaggaagatgcagacctttctgaaagggaagagagttggctactggctgagcgagaagaaaatcaagaagctgaatttccaggccttcgccgagctgtgcaggaagcgagggatggaggttgtgcaggagtacatcgatgcccaccctgagaccatcgtcctggacccgctccctgccatcagaaccctgcttgaccgctccaagtcctatgagctcatccggaagattgaggcctacatggaagacgacaggatctgctcgccacccttcatggagctcacgagcctgtgcggggatgacaccatgcggctgctggagaagaacggcttgactttcccattcatttgcaaaaccagagtggctcatggcaccaactctcacgagatggctatcgtgttcaaccaggagggcctgaacgccatccagccaccctgcgtggtccagaatttcatcaaccacaacgccgtcctgtacaaggtgttcgtggttggcgagtcctacaccgtggtccagaggccctcactcaagaacttctccgcaggcacatcag

SEQ ID NO: 142961 - DNA, 3035 bp, Homo sapiens
  Payload ID: 8236
  Gene Symbol: ITPK1
  Gene Name: inositol-tetrakisphosphate 1-kinase
  ENST ID: ENST00000555495
  CDS Start-End: 449-1336
gttccgcgtccccgccgccgggaggaggtgcccactcgctcgcggcgcgcgccggccgccagactcggcctgtgggcgatttcctccggacccaggctccccgcccgaggaggaagatgcagacctttctgaaagggaagagagttggctactggctgagcgagaagaaaatcaagaagctgaatttccaggccttcgccgagctgtgcagctgaaccttagccggccgatcgaggagcagggccccctggacgtcatcatccacaagctgactgacgtcatccttgaagccgaccagaatgatagccagtccctggagctggtgcacaggttccaggagtacatcgatgcccaccctgagaccatcgtcctggacccgctccctgccatcagaaccctgcttgaccgctccaagtcctatgagctcatccggaagattgaggcctacatggaagacgacaggatctgctcgccacccttcatggagctcacgagcctgtgcggggatgacaccatgcggctgctggagaagaacggcttgactttcccattcatttgcaaaaccagagtggctcatggcaccaactctcacgagatggctatcgtgttcaaccaggagggcctgaacgccatccagccaccctgcgtggtccagaatttcatcaaccacaacgccgtcctgtacaaggtgttcgtggttggcgagtcctacaccgtggtccagaggccctcactcaagaacttctccgcaggcacatcagaccgtgagtccatcttcttcaacagccacaacgtgtcaaagccggagtcgtcatcggtcctgacggagctggacaagatcgagggcgtgttcgagcggccgagcgacgaggtcatccgggagctctcccgggccctgcggcaggcactgggcgtgtcactcttcggcatcgacatcatcatcaacaaccagacagggcagcacgccgtcattgacatcaatgccttcccaggctacgagggcgtgagcgagttcttcacagacctcctgaaccacatcgccactgtcctgcagggccagagcacagccatggcagccacaggggacgtggccctgctgaggcacagcaagcttctggccgagccggcgggcggcctggtgggcgagcggacatgcagcgccagccccggctgctgcggcagcatgatgggccaggacgcgccctggaaggctgaggccgacgcgggcggcaccgccaagctgccgcaccagagactcggctgcaacgccggcgtgtcgcccagcttccagcagcattgtgtggcctccctggccaccaaggcctcctcccagtagccacggagccgggacccagaggggcagcgcagggcgcagagcacacccgctgggccagcagctcccaacggcgatgctactactaagaatccccagtgatctgattcttctgttttttaatttttaacctgattctctgatgtcatgatctaaatgaggggtagtgggggatggaagagagtaccaggtggtccaccgttggggagtggggccgtccgcctgctctctactgtgcagacctcctaactgagtttacacacgcttgtgtttgcaacactaggtctggatgggaggtgaggggtgtgcgtatggctgccatgccagtgtctgtgcacatccctgtctgttggtctccatggccactgtggaccgggacccttgggggaagcctgcccatgtcgggctgtgggaggctgatcggtgcatgtgagagtggcttcccttctgcctgactccccactccctgacctgccccttccttgtttttcctcctactggtctccaccaaggctttgttagcccccaccctgcctggtgtgcagctaacccctccctccccacagccagaggaggccacagacccctcaggggagttccgcgctggggtctgggctgtgctccctcactaaagggaaggaaaggaagctgggcgtcctctgggccccccaacacacgtcccatttagccctgcacagcggtctccttcccctaagccagcactgctgctccctggagcccgggaaggaggctgcctggctggaggcccgagccgatggcgcctgtgctgaggatttgtgctgtgatttgggcaaatcattccaggtctttgggcctccacccccttgtctctagtggacatttgagatcagagagcaccacagggctggctttgtgccctaacccctgggatgcagcctgcctttccataaagtcacctaggtgaggataggcgcgggagcctcggcatgacaccatggagatcggggccctcttcccagtgggttcactccttttcacacctgctgggtccctcctcacccagcaggcctggtccacctctcattgcaagccccaagcactgagccagcaggtgccagggagccacccgccccccatcgcttctgcacacctcagactcaccccatcaccttggcagcaaagcactggctctgccgtctgacccctgatccaggcagccccctctgcagagaaaagggttggggagaagcctctgcagtcctggaagatgtggggtgctgggtgagaggcatcagcccccacaagtatgtttttgtgtcttaagatagcagtttactttgaaaaagtgaaaaaggcttccgggctgtcctctgcccagtgagatggaggacgctagagaaagtgctgagtgtcccgagagaggcccccgagccagtgcatggaggtccttcggcctggctcagctgggctgcaggatgcccactttgaggagggaggcacagggcttgggcgaggggcagaggccatcagaactgcccggcttttttggaaactgaggacccaacaactaaccacgtttacacgacttgagttttgaaccccgattaatgtctgtacgtcacctttcctagttctgaccctgagccctggggaacaggaaagcgtggctggcctcttgcactgctttgtctccaaaataaactactgaaatcaaaccgca

SEQ ID NO: 142962 - DNA, 609 bp, Homo sapiens
  Payload ID: 8236
  Gene Symbol: ITPK1
  Gene Name: inositol-tetrakisphosphate 1-kinase
  ENST ID: ENST00000553452
  CDS Start-End: 106-609
gggcagcgcgcgaggaccaggccgaggaggaagtggcggcggcggcggcggactcggcctgtgggcgatttcctccggacccaggctccccgcccgaggaggaagatgcagacctttctgaaagggaagagagttggctactggctgagcgagaagaaaatcaagaagctgaatttccaggccttcgccgagctgtgcaggaagcgagggatggaggttgtgcagctgaaccttagccggccgatcgaggagcagggccccctggacgtcatcatccacaagctgactgacgtcatccttgaagccgaccagaatgatagccagtccctggagctggtgcacaggttccaggagtacatcgatgcccaccctgagaccatcgtcctggacccgctccctgccatcagaaccctgcttgaccgctccaagtcctatgagctcatccggaagattgaggcctacatggaagacgacaggatctgctcgccacccttcatggagctcacgagcctgtgcggggatgacaccatgcggctgctggagaagaacggcttgactttcccattcatttgcaaaaccagagtggctcatggcaccaactctcacgag

SEQ ID NO: 142963 - DNA, 727 bp, Homo sapiens
  Payload ID: 8236
  Gene Symbol: ITPK1
  Gene Name: inositol-tetrakisphosphate 1-kinase
  ENST ID: ENST00000555553
  CDS Start-End: 110-727
gtccccgccgccgggaggaggtgcccactcgctcgcggcgcgcgccggccgccagactcggcctgtgggcgatttcctccggacccaggctccccgcccgaggaggaagatgcagacctttctgaaagggaagagagttggctactggctgagcgagaagaaaatcaagaagctgaatttccaggccttcgccgagctgtgcaggaagcgagggatggaggttgtgcagctgaaccttagccggccgatcgaggagcagggccccctggacgtcatcatccacaagctgactgacgtcatccttgaagccgaccagaatgatagccagtccctggagctggtgcacaggttccaggagtacatcgatgcccaccctgagaccatcgtcctggacccgctccctgccatcagaaccctgcttgaccgctccaagtcctatgagctcatccggaagattgaggcctacatggaaggcctcccttctgccctagacgacaggatctgctcgccacccttcatggagctcacgagcctgtgcggggatgacaccatgcggctgctggagaagaacggcttgactttcccattcatttgcaaaaccagagtggctcatggcaccaactctcacgagatggctatcgtgttcaaccaggagggcctgaacgccatccagccaccctgcgtggtccagaatttcatcaaccacaacgccgtcctgtacaaggtg

SEQ ID NO: 142964 - DNA, 2803 bp, Homo sapiens; identical to SEQ ID NO: 142957
  Payload ID: 8236
  Gene Symbol: ITPK1
  Gene Name: inositol-tetrakisphosphate 1-kinase
  Uniprot ID: Q13572
  ENST ID: ENST00000617836
  CDS Start-End: 290-1234

SEQ ID NO: 142965 - DNA, 3174 bp, Homo sapiens; identical to SEQ ID NO: 142959
  Payload ID: 8236
  Gene Symbol: ITPK1
  Gene Name: inositol-tetrakisphosphate 1-kinase
  Uniprot ID: Q13572
  ENST ID: ENST00000614271
  CDS Start-End: 122-1366

SEQ ID NO: 142966 - DNA, 727 bp, Homo sapiens; identical to SEQ ID NO: 142963
  Payload ID: 8236
  Gene Symbol: ITPK1
  Gene Name: inositol-tetrakisphosphate 1-kinase
  ENST ID: ENST00000630564
  CDS Start-End: 110-727

SEQ ID NO: 142967 - DNA, 770 bp, Homo sapiens; identical to SEQ ID NO: 142958
  Payload ID: 8236
  Gene Symbol: ITPK1
  Gene Name: inositol-tetrakisphosphate 1-kinase
  ENST ID: ENST00000625855
  CDS Start-End: 267-770

SEQ ID NO: 142968 - DNA, 667 bp, Homo sapiens; identical to SEQ ID NO: 142960
  Payload ID: 8236
  Gene Symbol: ITPK1
  Gene Name: inositol-tetrakisphosphate 1-kinase
  ENST ID: ENST00000630443
  CDS Start-End: 124-667

SEQ ID NO: 142969 - DNA, 3035 bp, Homo sapiens; identical to SEQ ID NO: 142961
  Payload ID: 8236
  Gene Symbol: ITPK1
  Gene Name: inositol-tetrakisphosphate 1-kinase
  ENST ID: ENST00000626917
  CDS Start-End: 449-1336

SEQ ID NO: 142970 - DNA, 609 bp, Homo sapiens; identical to SEQ ID NO: 142962
  Payload ID: 8236
  Gene Symbol: ITPK1
  Gene Name: inositol-tetrakisphosphate 1-kinase
  ENST ID: ENST00000629384
  CDS Start-End: 106-609

SEQ ID NO: 142971 - DNA, 6066 bp, Homo sapiens; identical to SEQ ID NO: 142956
  Payload ID: 8236
  Gene Symbol: ITPK1
  Gene Name: inositol-tetrakisphosphate 1-kinase
  Uniprot ID: Q13572
  ENST ID: ENST00000626153
  CDS Start-End: 175-1419

SEQ ID NO: 142972 - DNA, 1824 bp, Homo sapiens
  Payload ID: 8237
  Gene Symbol: ITPKA
  Gene Name: inositol-trisphosphate 3-kinase A
  Uniprot ID: P23677
  ENST ID: ENST00000260386
  CDS Start-End: 54-1439
gtccccggcgcgccgcgggctggtgggctcagcggcggcgccggcactgggaaatgaccctgcccgggggcccaacgggcatggcgcggccggggggcgcgaggccctgcagcccggggctggagcgggccccgcgccggagtgtcggggagctgcgcctgctcttcgaggcgcgctgtgcggcggtcgctgcggccgccgccgcgggggagccccgggcccgcggggccaagcggcgtgggggacaggtccccaacgggcttccgcgggctcccccggccccggtgatccctcagctgaccgtgacagccgaggagcccgacgtgcccccgaccagccctgggccgccggagcgggagagggactgcctcccggcagcgggctcttcgcacctgcagcagccgcgccgcctttccacctcgtcggtctcctccactggctcctcgtcgctgctcgaggactcggaggacgacctgctgagcgacagtgagagccggagccgcggcaacgtgcagctggaagcgggcgaggacgtgggtcagaaaaaccactggcagaagatccggaccatggtcaatctgccggtcataagccctttcaagaagcgctacgcctgggtgcagctggcagggcacactgggagttttaaggcggcgggcaccagcgggctgatcctgaagcgctgctcggagccggagcgctactgcctggcgcggctgatggctgacgcgctgcgcggctgcgtgcctgccttccacggcgtggtggagcgcgacggcgaaagctacctgcagctgcaggacctgctcgatggcttcgacggaccttgtgtgctcgactgcaaaatgggcgtcaggacttacctagaggaggagctgaccaaggcccgtgagcggcccaagctgcggaaggacatgtacaagaaaatgctggcggtggatcctgaagctcccacggaggaggagcacgcgcagcgcgccgtcaccaagccgcgctacatgcagtggcgggaaggcatcagctccagcaccaccctcggcttccgcatcgagggcatcaagaaagcggacggctcctgcagcaccgacttcaagactacgcgaagccgagagcaggtgcttcgcgtctttgaagagtttgtgcaaggagatgaggaagtgctgaggcggtatctgaaccgcctgcagcagatccgggacaccctggaggtatccgagttcttcaggaggcacgaggtgatcggcagctcgctcctctttgtgcacgatcactgccatcgcgccggcgtgtggctcatcgacttcggcaagaccacgcccctccccgatggccagatcctggaccaccggcggccctgggaggagggcaaccgcgaggacggctatttgctggggctggacaatctcattggcatcctggccagcctggctgagagatgaggctggactcctgtccccgcgggccgctcacctgacatgtggacctgcagctttgtccccactgtgcatgccggcttgagactggagccccgcggtgcagggcagttcaccgggtcctgcaggaccaggtgccagccactaagggggggcaccgccgatgccaggggttttgcccacccgggccccagcgttcccagagccaaatgacactaacttatagaaggggagggggcaaagggcttcttcctcaggccagctcttctgaggaggctctgccctctccagaggtgccagaccgcggattttatttagcaagcccagaccttccggtctaacgtctcacaccacgacggactccccttcctaataaaactcaaagacaaga

SEQ ID NO: 142973 - DNA, 852 bp, Homo sapiens
  Payload ID: 8237
  Gene Symbol: ITPKA
  Gene Name: inositol-trisphosphate 3-kinase A
  ENST ID: ENST00000425927
  CDS Start-End: 73-852
ggggccttcaactctgctcaggagctcgggccggagaaaggccccgagacttgaagcccttgcccgggagggatgaacacgcaaaggaacccgaggaacgggcagccgcgccgcctttccacctcgtcggtctcctccactggctcctcgtcgctgctcgaggactcggaggacgacctgctgagcgacagtgagagccggagccgcggcaacgtgcagctggaagcgggcgaggacgtgggtcagaaaaaccactggcagaagatccggaccatggtcaatctgccggtcataagccctttcaagaagcgctacgcctgggtgcagctggcagggcacactgggagttttaaggcggcgggcaccagcgggctgatcctgaagcgctgctcggagccggagcgctactgcctggcgcggctgatggctgacgcgctgcgcggctgcgtgcctgccttccacggcgtggtggagcgcgacggcgaaagctacctgcagctgcaggacctgctcgatggcttcgacggaccttgtgtgctcgactgcaaaatgggcgtcaggacttacctagaggaggagctgaccaaggcccgtgagcggcccaagctgcggaaggacatgtacaagaaaatgctggcggtggatcctgaagctcccacggaggaggagcacgcgcagcgcgccgtcaccaagccgcgctacatgcagtggcgggaaggcatcagctccagcaccaccctcggcttccgcatcgagggcatcaagaaagcggacggctcctgcagcaccgacttcaagactacgcgaagccgagagcaggtgcttcgcgtctttgaagagtttgtgcaagga

SEQ ID NO: 142974 - DNA, 5822 bp, Homo sapiens
  Payload ID: 8238
  Gene Symbol: ITPKB
  Gene Name: inositol-trisphosphate 3-kinase B
  Uniprot ID: P27987
  ENST ID: ENST00000272117
  CDS Start-End: 1-2841
atggctgtgtactgctatgcgctcaatagcctggtgatcatgaatagcgccaacgagatgaagagcggcggcggcccggggcccagtggcagcgagacgcccccgcccccgaggagggcagtgctgagccccggcagcgttttcagccccgggagaggcgcctctttcctcttccccccagccgagtcgctgtcccccgaggagccccggagccccgggggctggcggagcggccggcgcaggctgaatagtagcagcggcagtggcagcggcagcagcggcagtagcgtgagcagcccaagttgggctggtcgcctgcgaggggaccggcagcaggtggtggcagccggtaccctctccccgccagggccggaggaggccaagaggaagctgcggatcttgcagcgcgagttgcagaacgtgcaggtgaaccagaaagtgggcatgtttgaggcgcacatccaggcacagagctccgccattcaagcgccccgcagcccgcgtttgggcagggctcgctcgccctccccgtgccccttccgcagcagcagtcagccccctggaagggtcctggttcagggcgcccggagcgaggaacggaggacaaagtcctggggggagcaatgtccagagacttcaggaaccgactccgggaggaaaggagggcccagcctatgctcctcgcaggtgaagaaaggaatgccacctcttcccggccgggctgcccctacaggatcagaggctcagggtccatccgcttttgtaaggatggagaagggtatccctgccagtccccgctgtggctcacccacagctatggaaattgacaaaaggggctctcctaccccgggaactcggagctgcctagctccctcattggggctgttcggagctagcttaacgatggccacggaagtggcagcgagagttacatccactgggccacaccgtccacaggatcttgccctcactgagccgtctgggagagcccgtgagcttgaggacctgcagcccccagaggccctggtggagaggcaggggcagtttctgggcagtgagacaagcccagccccagaaaggggcgggccccgcgatggagaaccccctgggaagatggggaaaggatatctgccctgtggcatgccgggctctggggagcctgaagtgggcaaaaggccagaggagacgactgtgagcgtgcaaagcgcagagtcctctgattccctgagctggtccaggctgcccagggccctggcctccgtaggccctgaggaggcccgaagtggggcccccgtgggcggggggcgttggcagctctccgacagagtggagggagggtccccaacgctgggcttgcttgggggcagcccctcagcacagccggggaccgggaatgtggaggcgggaattccttctggcagaatgctggagcctttgccctgttgggacgctgcgaaagatctgaaagaacctcagtgccctcctggggacagggtgggtgtgcagcctgggaactccagggtttggcagggcaccatggagaaagccggtttggcttggacgcgtggcacaggggtgcaatcagaggggacttgggaaagccagcggcaggacagtgatgccctcccaagtccggagctgctaccccaagatccggacaagcctttcctgaggaaggcctgcagccccagcaacatacctgctgtcatcattacagacatgggcacccaggaggatggggccttggaggagacgcagggaagccctcggggcaacctgcccctgaggaaactgtcctcttcctcggcctcctccacgggcttctcctcatcctacgaagactcagaggaggacatctccagtgaccctgagcgcaccctggaccccaactcagccttcctgcataccctggaccagcagaaacctagagtgagcaaatcatggaggaagataaaaaacatggtgcactggtctcccttcgtcatgtccttcaagaagaagtacccctggatccagctggcaggacacgcagggagtttcaaggcagctgccaatggcaggatcctgaagaagcactgtgagtcagagcagcgctgcctggaccggctgatggtggatgtgctgaggcccttcgtacctgcctaccatggggatgtggtgaaggacggggagcgctacaaccagatggacgacctgctggccgacttcgactcgccctgtgtgatggactgcaagatgggaatcaggacctacctggaggaggagctcacgaaggcccggaagaagcccagcctgcggaaggacatgtaccagaagatgatcgaggtggaccccgaggcccccaccgaggaggaaaaagcacagcgggctgtgaccaagccacggtacatgcagtggcgggagaccatcagctccacggccaccctggggttcaggatcgagggaatcaagaaagaagacggcaccgtgaaccgggacttcaagaagaccaaaacgagggagcaggtcaccgaggccttcagagagttcactaaaggaaaccataacatcctgatcgcctatcgggaccggctgaaggccattcgaaccactctagaagtttctcccttcttcaagtgccacgaggtcattggcagctccctcctcttcatccacgacaagaaggaacaggccaaagtgtggatgatcgactttgggaaaaccacgcccctgcctgagggccagaccctgcagcatgacgtcccctggcaggaggggaaccgggaggatggctacctctcggggctcaataacctcgtcgacatcctgaccgagatgtcccaggatgccccactcgcctgagctgcccacgccctccctggcccccgcctgggcctcctttcctcctcctgtgcttcctttctcgttcctaacttttccttcacttacacctgactgaccctcctgaactgcactacaagacactttgtagaagaggagatgagagtttctagtcattttcctaacttcagggcttggaggtggtgtttgcactgctttttgtagagagggtcacctactagaagagaaatgcccagtcttagaggtgggtcaggtgtagagctggagggggtccctggctgctgaggggaccctaccagatgagccctgcctctgggagccccctaggaagcaccagcctggacctaccacctgcggaggcctgctgccccctggcggccagtgctgttagagtgctgccaagcacagccttatttctgccggggcctccccaccggagagcccagggggccggccgggttcctggtccctggctgggagcagggctttctggtagttggggcacaaaaccatcggggaaccacatgttgactgtgagcaaagtgtcttccgattagcagcctcagggatgccctggtggcctctccagggctgctcaggcaaggccccccacccatctggtatggaaacctgccggctccaggccagacccaggagccaagagaaggctgaagccagcttggctgtgttctctgatctaggccttcccagaggaggcgagcagaagctgtgccacttggaattgcaacccatgagttcagaaggcacactctgccatgctgagctccaagggtgctaccaggggaagatgggatctatagagtctctgggccctggccccagggaggagcacatttttcttgaccctcacctacctggtgctagttggtcaaccctgcctgcatacatgggctcctgtcatggggcccagagtcccttgcagatatagaaataggggaggagctcaggtctgcgccaggcaggaagaaggcaggcttctggcttccagaggtgccgcggtggcctcctggcatcatttgttattgcctctgaaacaagccttactgcctggagggcttagattcctgcttctccaatgtagtgtgggtatcttgtagggtatgtggtggatgccagggcgtgctccaggcacctcttcctgaagtctctgcatttggagattcgtggagaacctatttaagcccaattttaactgaaagccagtgagtctgatatggaagggaatgtaaaatttgcctgacttcttaagaacaaaacccccagctctgtgccccatgctccttggggcttgccacccactcctttgctgtcagaggtacaggagctgggagagtccaggagctagggacacagagggagactatggaccaaggtgtgtgtgtctggaggaaccactgcccaccccaccaccccggggtctctggggaactgtcaacctgcccacgggacatgtacatttccccttttgtgctggaagtgtgagtgacacttgctgggggtggagggtgggacacatgaggatgtataagtacagattttaaaaaaggaaatcaacttacacttcctggctcttgtttaaaacagtggtgagctcctgtgtgggccgacttgctaaaggtcacacacgcgcccggtggagcacgagagacctcgtggcagcatgtgatctggaaggcaggcaggacgggggcgttggggagccaaagtcaactctgggcctctggagctatagtgacttttgggctagaagggaccctggtggtctgtgcttcagccatttgcagggcaggggcatcattaattcagacgtaaagattctatgaatatggactggccaaaagttatccttactccatctgtgaaagaagtttgctaaagcaaatcatgatatgaacaaaaattacaggggacctgtttaagagaacaaaatgttccaagcactttaggcagacaccagctgtttgcaaacaatgtgctaatatgcaaatgatgtgcttattaaaggaggcccatggggcctcttattggcaatacttggctgtgggttacattaaatatgtgaacatagtatgaagtagcatcattttagggttattctgttacttagggtttttgttttctgttttttttttctctttttttgtatttaccgtgctagttctcttctacacctactctgtctctcaagccattttgccactcgcttccctgccatctggcccttccctttgtctcagtgggatagatggattgtgaaatggaatctcccagaacccctgccctggcagcctggaagaccgtgcctgcccagccctcgtcaccacagggactccttgggtcctggcagtgcatgtgccagcaggcaggacaaactctgtgtacctgtgcccaggtgaatgggcgcagggtcctcttgccctgtcctgcggggggccccacgagttcctggcattcagcactgcttagcattctcggaaggtttcttcaactgcttgcttttcccaggcttgcctttagtgtcatgtaagacatttttaagttatatttattttgttgggttttaaaattgcacagaacactaagaccgaaaggctggactcttgtttctccttgaaagctttgcctttgttttgaacttcctttcccacttggtagaaagagcccagaagcagccctggccctgtaagatggactctttcatccttcagttgtatttagctttgagtttctctgcatctgtccaccccatgtgtatataacccagcccctggctctggggtggtcacctcgtcagtgccttttgttctggaggagaggaccccccccgcctgccgagaggctctcttcctgttctgcacccctctccccatgggaccttggagaaaactgaactgttacaaacccctgcacagtgcctgtcaaacagatgcaaaccttcctgaataaagccttggagacca

SEQ ID NO: 142975 - DNA, 3146 bp, Homo sapiens
  Payload ID: 8238
  Gene Symbol: ITPKB
  Gene Name: inositol-trisphosphate 3-kinase B
  Uniprot ID: P27987
  ENST ID: ENST00000366784
  CDS Start-End: 489-2423
attgaacaaacactgaagtagcccggagcagacactgacaggggcagtatctccacggtcgaaaagggcgtgcagggccggcttggcgtcgccactgccgggatcgccgggcccctgaaccgaagagctttcccccctctttcgcactcctcttttttgtcttccatagcttgtgagaaaataatttctgagcatttttacttttaaagccatctcgtccctacgaggtttgcgcctctgggcatgtagtctacacaggacctgagaatctgagaaactgcagccgcacggttgtttatggagctttgggcgggggctgagcccgcggtcgtgcccccagcccgctgcccaggccatgccgccccatctgcgcgcggagccgcggctgccgggcctccggggctgagccgggagcgccgggaggaggaggcgccggcggcggagcaggagcgggagccgcggcggcgggcagcgcgggacccagtactatggctgtgtactgctatgcgctcaatagcctggtgatcatgaatagcgccaacgagatgaagagcggcggcggcccggggcccagtggcagcgagacgcccccgcccccgaggagggcagtgctgagccccggcagcgttttcagccccgggagaggcgcctctttcctcttccccccagccgagtcgctgtcccccgaggagccccggagccccgggggctggcggagcggccggcgcaggctgaatagtagcagcggcagtggcagcggcagcagcggcagtagcgtgagcagcccaagttgggctggtcgcctgcgaggggaccggcagcaggtggtggcagccggtaccctctccccgccagggccggaggaggccaagaggaagctgcggatcttgcagcgcgagttgcagaacgtgcaggtgaaccagaaagtgggcatgtttgaggcgcacatccaggcacagagctccgccattcaagcgccccgcagcccgcgtttgggcagggctcgctcgccctccccgtgccccttccgcagcagcagtcagccccctggaagggtcctggttcagggcgcccggagcgaggaacggaggacaaagtcctggggggagcaatgtccagagacttcaggaaccgactccgggaggaaaggagggcccagcctatgctcctcgcaggtgaagaaaggaatgccacctcttcccggccgggctgcccctacaggatcagaggctcagggtccatccgcttttgtaaggatggagaagggtatccctgccagtccccgctgtggctcacccacagctatggaaattgacaaaaggggctctcctaccccgggaactcggagctgcctagctccctcattggggctgttcggagctagcttaacgatggccacggaagtggcagcgagagttacatccactgggccacaccgtccacaggatcttgccctcactgagccgtctgggagagcccgtgagcttgaggacctgcagcccccagaggccctggtggagaggcaggggcagtttctgggcagtgagacaagcccagccccagaaaggggcgggccccgcgatggagaaccccctgggaagatggggaaaggatatctgccctgtggcatgccgggctctggggagcctgaagtgggcaaaaggccagaggagacgactgtgagcgtgcaaagcgcagagtcctctgattccctgagctggtccaggctgcccagggccctggcctccgtaggccctgaggaggcccgaagtggggcccccgtgggcggggggcgttggcagctctccgacagagtggagggagggtccccaacgctgggcttgcttgggggcagcccctcagcacagccggggaccgggaatgtggaggcgggaattccttctggcagaatgctggagcctttgccctgttgggacgctgcgaaagatctgaaagaacctcagtgccctcctggggacagggtgggtgtgcagcctgggaactccagggtttggcagggcaccatggagaaagccggtttggcttggacgcgtggcacaggggtgcaatcagaggggacttgggaaagccagcggcaggacagtgatgccctcccaagtccggagctgctaccccaagatccggacaagcctttcctgaggaaggcctgcagccccagcaacatacctgctgtcatcattacagacatgggcacccaggaggatggggccttggaggagacgcagggaagccctcggggcaacctgcccctgaggaaactgtcctcttcctcggcctcctccacgggcttctcctcatcctacgaagactcagaggaggacatctccagtgaccctgagcgcaccctggaccccaactcagccttcctgcataccctggaccagcagaaacctagagtgtgacttcttgggaagtgttcccctcagtggtactgctggggcaacgtccaataccaagaatgatgtatagcatatttcatcttcctacactactctctggaaagactgagccaattacggggtcatctgtaaagtctaagtgctgcagtttccctacgaccattggattttgtttgtagtttgatattgtcttactgtcccttgaagttgtaatttgtaattctttagttttcaagagggactctacatgtttccttgtgatgatggccttgagttactcatgtgtacactgcctatttatccccattgagcccccactgcccgaacatgttgatggcattttatatagtaagctgtcagttacttaatgtacaaatattcttccattccatgtttttctcttaaaattttactttattggccaggcgcagtggctcacatctgtaatcccagcactttaggaggccaaggcgggcggatcacctgaggtcaagagattgagaccagcctggccaacatggtgaaaccccgtctctactaaaaaatacaaaaattagccaggtgtagtggtgggcacctgtaatcccagctacttgggaggctgaggcaggagaattgcttgaacctgagaggcggaggttgcggtgagccgagatagcaccactgcactccagcctgggcgaaagagctaaactccatctcaaaaataaataaataaataaaaaa

SEQ ID NO: 142976 - DNA, 6162 bp, Homo sapiens
  Payload ID: 8238
  Gene Symbol: ITPKB
  Gene Name: inositol-trisphosphate 3-kinase B
  Uniprot ID: P27987
  ENST ID: ENST00000429204
  CDS Start-End: 341-3181
cctcttttttgtcttccatagcttgtgagaaaataatttctgagcatttttacttttaaagccatctcgtccctacgaggtttgcgcctctgggcatgtagtctacacaggacctgagaatctgagaaactgcagccgcacggttgtttatggagctttgggcgggggctgagcccgcggtcgtgcccccagcccgctgcccaggccatgccgccccatctgcgcgcggagccgcggctgccgggcctccggggctgagccgggagcgccgggaggaggaggcgccggcggcggagcaggagcgggagccgcggcggcgggcagcgcgggacccagtactatggctgtgtactgctatgcgctcaatagcctggtgatcatgaatagcgccaacgagatgaagagcggcggcggcccggggcccagtggcagcgagacgcccccgcccccgaggagggcagtgctgagccccggcagcgttttcagccccgggagaggcgcctctttcctcttccccccagccgagtcgctgtcccccgaggagccccggagccccgggggctggcggagcggccggcgcaggctgaatagtagcagcggcagtggcagcggcagcagcggcagtagcgtgagcagcccaagttgggctggtcgcctgcgaggggaccggcagcaggtggtggcagccggtaccctctccccgccagggccggaggaggccaagaggaagctgcggatcttgcagcgcgagttgcagaacgtgcaggtgaaccagaaagtgggcatgtttgaggcgcacatccaggcacagagctccgccattcaagcgccccgcagcccgcgtttgggcagggctcgctcgccctccccgtgccccttccgcagcagcagtcagccccctggaagggtcctggttcagggcgcccggagcgaggaacggaggacaaagtcctggggggagcaatgtccagagacttcaggaaccgactccgggaggaaaggagggcccagcctatgctcctcgcaggtgaagaaaggaatgccacctcttcccggccgggctgcccctacaggatcagaggctcagggtccatccgcttttgtaaggatggagaagggtatccctgccagtccccgctgtggctcacccacagctatggaaattgacaaaaggggctctcctaccccgggaactcggagctgcctagctccctcattggggctgttcggagctagcttaacgatggccacggaagtggcagcgagagttacatccactgggccacaccgtccacaggatcttgccctcactgagccgtctgggagagcccgtgagcttgaggacctgcagcccccagaggccctggtggagaggcaggggcagtttctgggcagtgagacaagcccagccccagaaaggggcgggccccgcgatggagaaccccctgggaagatggggaaaggatatctgccctgtggcatgccgggctctggggagcctgaagtgggcaaaaggccagaggagacgactgtgagcgtgcaaagcgcagagtcctctgattccctgagctggtccaggctgcccagggccctggcctccgtaggccctgaggaggcccgaagtggggcccccgtgggcggggggcgttggcagctctccgacagagtggagggagggtccccaacgctgggcttgcttgggggcagcccctcagcacagccggggaccgggaatgtggaggcgggaattccttctggcagaatgctggagcctttgccctgttgggacgctgcgaaagatctgaaagaacctcagtgccctcctggggacagggtgggtgtgcagcctgggaactccagggtttggcagggcaccatggagaaagccggtttggcttggacgcgtggcacaggggtgcaatcagaggggacttgggaaagccagcggcaggacagtgatgccctcccaagtccggagctgctaccccaagatccggacaagcctttcctgaggaaggcctgcagccccagcaacatacctgctgtcatcattacagacatgggcacccaggaggatggggccttggaggagacgcagggaagccctcggggcaacctgcccctgaggaaactgtcctcttcctcggcctcctccacgggcttctcctcatcctacgaagactcagaggaggacatctccagtgaccctgagcgcaccctggaccccaactcagccttcctgcataccctggaccagcagaaacctagagtgagcaaatcatggaggaagataaaaaacatggtgcactggtctcccttcgtcatgtccttcaagaagaagtacccctggatccagctggcaggacacgcagggagtttcaaggcagctgccaatggcaggatcctgaagaagcactgtgagtcagagcagcgctgcctggaccggctgatggtggatgtgctgaggcccttcgtacctgcctaccatggggatgtggtgaaggacggggagcgctacaaccagatggacgacctgctggccgacttcgactcgccctgtgtgatggactgcaagatgggaatcaggacctacctggaggaggagctcacgaaggcccggaagaagcccagcctgcggaaggacatgtaccagaagatgatcgaggtggaccccgaggcccccaccgaggaggaaaaagcacagcgggctgtgaccaagccacggtacatgcagtggcgggagaccatcagctccacggccaccctggggttcaggatcgagggaatcaagaaagaagacggcaccgtgaaccgggacttcaagaagaccaaaacgagggagcaggtcaccgaggccttcagagagttcactaaaggaaaccataacatcctgatcgcctatcgggaccggctgaaggccattcgaaccactctagaagtttctcccttcttcaagtgccacgaggtcattggcagctccctcctcttcatccacgacaagaaggaacaggccaaagtgtggatgatcgactttgggaaaaccacgcccctgcctgagggccagaccctgcagcatgacgtcccctggcaggaggggaaccgggaggatggctacctctcggggctcaataacctcgtcgacatcctgaccgagatgtcccaggatgccccactcgcctgagctgcccacgccctccctggcccccgcctgggcctcctttcctcctcctgtgcttcctttctcgttcctaacttttccttcacttacacctgactgaccctcctgaactgcactacaagacactttgtagaagaggagatgagagtttctagtcattttcctaacttcagggcttggaggtggtgtttgcactgctttttgtagagagggtcacctactagaagagaaatgcccagtcttagaggtgggtcaggtgtagagctggagggggtccctggctgctgaggggaccctaccagatgagccctgcctctgggagccccctaggaagcaccagcctggacctaccacctgcggaggcctgctgccccctggcggccagtgctgttagagtgctgccaagcacagccttatttctgccggggcctccccaccggagagcccagggggccggccgggttcctggtccctggctgggagcagggctttctggtagttggggcacaaaaccatcggggaaccacatgttgactgtgagcaaagtgtcttccgattagcagcctcagggatgccctggtggcctctccagggctgctcaggcaaggccccccacccatctggtatggaaacctgccggctccaggccagacccaggagccaagagaaggctgaagccagcttggctgtgttctctgatctaggccttcccagaggaggcgagcagaagctgtgccacttggaattgcaacccatgagttcagaaggcacactctgccatgctgagctccaagggtgctaccaggggaagatgggatctatagagtctctgggccctggccccagggaggagcacatttttcttgaccctcacctacctggtgctagttggtcaaccctgcctgcatacatgggctcctgtcatggggcccagagtcccttgcagatatagaaataggggaggagctcaggtctgcgccaggcaggaagaaggcaggcttctggcttccagaggtgccgcggtggcctcctggcatcatttgttattgcctctgaaacaagccttactgcctggagggcttagattcctgcttctccaatgtagtgtgggtatcttgtagggtatgtggtggatgccagggcgtgctccaggcacctcttcctgaagtctctgcatttggagattcgtggagaacctatttaagcccaattttaactgaaagccagtgagtctgatatggaagggaatgtaaaatttgcctgacttcttaagaacaaaacccccagctctgtgccccatgctccttggggcttgccacccactcctttgctgtcagaggtacaggagctgggagagtccaggagctagggacacagagggagactatggaccaaggtgtgtgtgtctggaggaaccactgcccaccccaccaccccggggtctctggggaactgtcaacctgcccacgggacatgtacatttccccttttgtgctggaagtgtgagtgacacttgctgggggtggagggtgggacacatgaggatgtataagtacagattttaaaaaaggaaatcaacttacacttcctggctcttgtttaaaacagtggtgagctcctgtgtgggccgacttgctaaaggtcacacacgcgcccggtggagcacgagagacctcgtggcagcatgtgatctggaaggcaggcaggacgggggcgttggggagccaaagtcaactctgggcctctggagctatagtgacttttgggctagaagggaccctggtggtctgtgcttcagccatttgcagggcaggggcatcattaattcagacgtaaagattctatgaatatggactggccaaaagttatccttactccatctgtgaaagaagtttgctaaagcaaatcatgatatgaacaaaaattacaggggacctgtttaagagaacaaaatgttccaagcactttaggcagacaccagctgtttgcaaacaatgtgctaatatgcaaatgatgtgcttattaaaggaggcccatggggcctcttattggcaatacttggctgtgggttacattaaatatgtgaacatagtatgaagtagcatcattttagggttattctgttacttagggtttttgttttctgttttttttttctctttttttgtatttaccgtgctagttctcttctacacctactctgtctctcaagccattttgccactcgcttccctgccatctggcccttccctttgtctcagtgggatagatggattgtgaaatggaatctcccagaacccctgccctggcagcctggaagaccgtgcctgcccagccctcgtcaccacagggactccttgggtcctggcagtgcatgtgccagcaggcaggacaaactctgtgtacctgtgcccaggtgaatgggcgcagggtcctcttgccctgtcctgcggggggccccacgagttcctggcattcagcactgcttagcattctcggaaggtttcttcaactgcttgcttttcccaggcttgcctttagtgtcatgtaagacatttttaagttatatttattttgttgggttttaaaattgcacagaacactaagaccgaaaggctggactcttgtttctccttgaaagctttgcctttgttttgaacttcctttcccacttggtagaaagagcccagaagcagccctggccctgtaagatggactctttcatccttcagttgtatttagctttgagtttctctgcatctgtccaccccatgtgtatataacccagcccctggctctggggtggtcacctcgtcagtgccttttgttctggaggagaggaccccccccgcctgccgagaggctctcttcctgttctgcacccctctccccatgggaccttggagaaaactgaactgttacaaacccctgcacagtgcctgtcaaacagatgcaaaccttcctgaataaagccttggagacca

SEQ ID NO: 142977 - DNA, 3385 bp, Homo sapiens
  Payload ID: 8239
  Gene Symbol: ITPKC
  Gene Name: inositol-trisphosphate 3-kinase C
  Uniprot ID: Q96DU7
  ENST ID: ENST00000263370
  CDS Start-End: 34-2085
gggtcggccgaagcccgaaccgaaggagcgggcatgaggcgctgcccgtgccgtgggagcctgaacgaggcggaggccggggcgctgcccgcggcggcccgcatgggactggaggcgccgcgaggagggcggcggcggcagccgggacagcagcgacctgggcccggcgcaggggccccggcggggcggccggaggggggcgggccctgggcccggacagaggggtccagcctccacagcgagcctgagagggccggcctcgggcctgcgccggggacagagagtccgcaggcagaattctggacagacggacagactgagcccgcggcagctggccttggagtagagaccgagaggcccaagcaaaagacggagccagacaggtccagcctccggacgcatctagaatggagctggtcagagctggagacgacttgtctttggacggagaccgggacagatggcctttggactgatccgcacaggtccgacctccagtttcagcccgaggaggccagcccctggacacagccaggggttcatgggccctggacagagctggaaacgcatgggtcacagactcagccagagagggtcaagtcctgggctgataacctctggacccaccagaacagttccagcctccagactcacccagaaggagcctgtccctcaaaagagccaagtgctgatggctcctggaaagaattgtatactgatggctccaggacacaacaggatattgaaggtccctggacagagccatatactgatggctcccagaaaaaacaggatactgaagcagccaggaaacagcctggcactggtggtttccaaatacaacaggatactgatggctcctggacacaacctagcactgacggttcccagacagcacctgggacagactgcctcttgggagagcctgaggatggcccattagaggaaccagagcctggagaattgctgactcacctgtactctcacctgaagtgtagccccctgtgccctgtgccccgcctcatcattacccctgagacccctgagcctgaggcccagccagtgggacccccctcccgggttgaggggggcagcggcggcttctcctctgcctcttctttcgacgagtctgaggatgacgtggtggccgggggcggaggtgccagcgatcccgaggacaggtctgggagcaaaccctggaagaagctgaagacagttctgaagtattcaccctttgtggtctccttccgaaaacactacccttgggtccagctttctggacatgctgggaacttccaggcaggagaggatggtcggattctgaaacgtttctgtcagtgtgagcagcgcagcctggagcagctgatgaaagacccgctgcgacctttcgtgcctgcctactatggcatggtgctgcaggatggccagaccttcaaccagatggaagacctcctggctgactttgagggcccctccattatggactgcaagatgggcagcaggacctatctggaagaggagctagtgaaggcacgggaacgtccccgtccccggaaggacatgtatgagaagatggtggctgtggaccctggggcccctacccctgaggagcatgcccagggtgcagtcaccaagccccgctacatgcagtggagggaaaccatgagctccacctctaccctgggcttccggatcgagggcatcaagaaggcagatgggacctgtaacaccaacttcaagaagacgcaggcactggagcaggtgacaaaagtgctggaggacttcgtggatggagaccacgtcatcctgcaaaagtacgtggcatgcctagaagaacttcgtgaagctctggagatctcccccttcttcaagacccacgaggtggtaggcagctccctcctcttcgtgcacgaccacaccggcctggccaaggtctggatgatagacttcggcaagacggtggccttgcccgaccaccagacgctcagccacaggctgccctgggctgagggcaaccgtgaggacggctacctctggggcctggacaacatgatctgcctcctgcaggggctggcacagagctgagctgctcagccaccatcaggttaattggatggcgccagtctggctggaggagccctgagatgccatgggaggcctgaggttggccacgggggagctggcctccagggacgggagagattgtgtcatgtgccacacgagaccaacgtggaaaagtctgaagggccttgggagaccaggtagcacctggccccatcatgatgcaggggttttggggacctggaaggaaggtgatgaggcagtgagtcagaaaaaccagaacggggtccccggatctgccgggaaggcttctgaggggctgccctgagagcattcagttcacatgtcacagggtatggtgtgacagggtgcctgtggacacatgaatcacttctaacctgcctccctgtcagcctccaggctgccagctggctgaggccagggactgggtcaggctcatctgtggcgcctcagagggtcagcatcattggtgaacagatgcaggcgctgctggaccatctggggagagtgacagtccatgtcttcaccagggagccatttgagtgctgagcgacaagaggctcagagggcatgaccccatgggactggatgcggcctgagggctgataccgctgggcggtatcctgccctgctgtggccctgtgggatcctccgtgttcctcggcggactctgctgacctcctgcagacccaaaccacagccacatcccagcttctgtgccagcactgtgacagtacctcgctcctctgtgcaccagatccggcctcaggacttacacctcctgcctgacccccaggcttctctctcctttctcccagcaaactgcagtggcagaaaggaggttcagaggctgggaaagtgggcctccccttgcaactcagagctgctgcactcaggagggccccatccaatcccgggcccctgcagggaaaagcgctgggtgtgtgtcagaggcgcagggtgggtggggctgccagccaggaccctggcctgcagcctgatccaaaccaaagactgtagaaccctggggtgtggctaacggcccctccagcacccatagccaggtcttcctggcccttgaggctgggctggcggacaggcacctacctcttccttaagctgaagctcccacactgtcttccagggctgaggagatgctctccttttctactgaccatcttgatacttatttatacgagaggcagttgctggacggggtagtactgggaagcaggaggcagaatggctctgctgagcctcctacccatgacaacaccccaataaacagaacattcagagccaa

SEQ ID NO: 142978 - DNA, 582 bp, Homo sapiens
  Payload ID: 8239
  Gene Symbol: ITPKC
  Gene Name: inositol-trisphosphate 3-kinase C
  ENST ID: ENST00000597003
  CDS Start-End: 1-153
atggtgctgcaggatggccagaccttcaaccagatggaagacctcctggctgactttgagggcccctccattatggactgcaagatgggcagcagaaggcagatgggacctgtaacaccaacttcaagaagacgcaggcactggagcaggtgacaaaagtgctggaggacttcgtggatggagaccacgtcatcctgcaaaagtacgtggcatgcctagaagaacttcgtgaagctctggagatctcccccttcttcaagacccacgaggtggtaggcagctccctcctcttcgtgcacgaccacaccggcctggccaaggtctggatgatagacttcggcaagacggtggccttgcccgaccaccagacgctcagccacaggctgccctgggctgagggcaaccgtgaggacggctacctctggggcctggacaacatgatctgcctcctgcaggggctggcacagagctgagctgctcagccaccatcaggttaattggatggcgccagtctggctggaggagccctgagatgccatgggaggcctgaggttggccacgggggagctggcctccagggac

SEQ ID NO: 142979 - DNA, 2954 bp, Homo sapiens
  Payload ID: 8240
  Gene Symbol: INSC
  Gene Name: inscuteable homolog (Drosophila)
  Uniprot ID: Q1MX18
  ENST ID: ENST00000379554
  CDS Start-End: 47-1786
ggcctctgtaaggagacttggagtcgctgcagccaaggctggagccatgagacggccccctggcaatggagaggcggccagcgaaggtccaggtggctggggtctatggggagtccaggagtccaggaggctgtgctgtgccggtcacgaccgctgcaagcaggctttgctgcagattgggatcaacatgatggcactgcctggaggtcgccacctggactccgtcaccctgccgggtcagcggctacacctgatgcaggtggactcagtccagcgctggatggaagatctgaagctcatgaccgagtgcgagtgcatgtgtgtcctgcaggccaagcccatcagcctggaagaggatgcacagggtgacctcatcctggcaggtggccctggccctggagaccccctgcagctgctgctcaaacggggttgggtcattagcacagagctgcgcaggatcgggcagaagctggcccaggaccgctgggcacgggtgcacagcatgagcgtgcgtctgacctgccatgcccgctccatggtcagcgagtacagtgctgtcagcaggaactccttgaaggaaatgggcgagattgagaagctgctaatggagaaatgctcggagctctcggcagtcacagagaggtgccttcaggttgagaatgagcatgtcctgaagtcaatgaaggcctgcgtgagtgagaccctgagcatgctgggccagcactttggtcagctgctggagctggccctgacacgggaggttcaggcactggtgagaaaaattgatgcctcagacaatatctacaccacagagtccaccacagggaacctgttcagcctgacccaggagggggctcccttgtgccgcatcatagccaaggagggtggggtcgtagcactcttcaaggtttgccggcaggacagtttccggtgcttgtacccccaggcgctccgcacgctggcctccatctgctgcgtggaagagggtgtccaccagctggagaaggtggatggcgttctgtgcttggccgacatcctgaccgacaacagccactcagaggccacacgggctgaggctgcggctgtggtggcccaggtcacctccccacacctgcccgtcacccagcacctcagtagcttcctggagagcatggaggagatcgtgacagccctcgtcaaactgtgccaagaggcctcatcaggggaagtcttcctactggcctctgcggcccttgccaacatcacgttctttgacacaatggcctgcgagatgctcctgcagttgaatgccatccgtgttctcctggaagcctgcagtgacaagcagagagtggacacgccttacactcgggaccagattgtgaccatcttggcaaacatgtctgtcctagaacagtgtgcctctgacatcattcaggaaaatggggtccagcttatcatgggcatgctgtctgaaaaaccaaggtctgggactcctgctgaagtggcagcctgtgagcgagtccagcagaaagctgcagtgaccctggctcgtctcagccgagacccagatgtggcacgggaggccgtgcggctcagctgcatgtcccgtctcatcgagctctgcagatccccatcagagaggaacagcagtgacgccgtgcttgtggcctgcctggctgctctgcgtagattggctggggtctgccctgaaggcctccaggactctgactttcagcagttggtccagcctcggctggtggactccttcttactctgcagcaacatggaggagagttttgtgtagtgagtgtgggcgaagaaatacatttggctgttctcacaccccctctgactatgcaccagtgaacacatctgagtacataccagctctcctcatcttcttatttatacttaacttatttttgtgtgaaataaatggaggacaaaatcttagagcaacatcatcaaacagtctttggtccttgagaatcttctttgtgttttattttttgatttctgtagcttttcagttgcagatgttgaaattcgtaatgacaaatatgacaaattgtcatgggtgattccacttcatcttattttttctactctcactatacaatcttgcctcattttttaaaactttggaaccagaggatttcaactgcctagcaagttttttttttaagttggatttgctcttcccaaaaatctaaaatgaatttaataattgggtagaatatattggaaagaagtttctttttctttaataaatggaatcatataaaatgtatcccggattttcttattaaattgtattttaaactaggttcttgcttcccaggtttcattccccaaaaacttttccaaccattaaaagtacacacagaattgtcttgttttcataggtgtataaataggttaagttctgagtgacttagtgagaaaccaaagtgactttcaaaaatacacccaaaggcaccagaaaccctgcttcctttggcttctttgcttttgtgtaacctcctgttcacctcctggtgaatagaatcctcagatgaggcttattgaatgattgattcctcctcaaaagtatacttgaaagcagtggtgtgctgaagccagctcatgcccactcacaagggacaactgtgagaatttcttcctaactctgcactcagtgaccttgcgttggtagccatgagctacttcatgagccctcatgttgaaattggccatagtgggagtatttacaccacagaaattcacagatgctataaagcacagctttcgctttttttttttttagagagagctggtttaccaatttcactgcttgaaagtatcacaaaaatctggggatccttttgaaaatataaatgccatcatattgtgatataatttatacaatataatataattgtgtaaaatcatgattataataatgtttcaataaacatttcttaaattcccaa

SEQ ID NO: 142980 - DNA, 2878 bp, Homo sapiens
  Payload ID: 8240
  Gene Symbol: INSC
  Gene Name: inscuteable homolog (Drosophila)
  Uniprot ID: Q1MX18
  ENST ID: ENST00000379556
  CDS Start-End: 112-1710
tctggagctccagctgcgccccgccaccactggccgctcgcactaccagcctgtctcgcacgctaaggtcacgaccgctgcaagcaggctttgctgcagattgggatcaacatgatggcactgcctggaggtcgccacctggactccgtcaccctgccgggtcagcggctacacctgatgcaggtggactcagtccagcgctggatggaagatctgaagctcatgaccgagtgcgagtgcatgtgtgtcctgcaggccaagcccatcagcctggaagaggatgcacagggtgacctcatcctggcaggtggccctggccctggagaccccctgcagctgctgctcaaacggggttgggtcattagcacagagctgcgcaggatcgggcagaagctggcccaggaccgctgggcacgggtgcacagcatgagcgtgcgtctgacctgccatgcccgctccatggtcagcgagtacagtgctgtcagcaggaactccttgaaggaaatgggcgagattgagaagctgctaatggagaaatgctcggagctctcggcagtcacagagaggtgccttcaggttgagaatgagcatgtcctgaagtcaatgaaggcctgcgtgagtgagaccctgagcatgctgggccagcactttggtcagctgctggagctggccctgacacgggaggttcaggcactggtgagaaaaattgatgcctcagacaatatctacaccacagagtccaccacagggaacctgttcagcctgacccaggagggggctcccttgtgccgcatcatagccaaggagggtggggtcgtagcactcttcaaggtttgccggcaggacagtttccggtgcttgtacccccaggcgctccgcacgctggcctccatctgctgcgtggaagagggtgtccaccagctggagaaggtggatggcgttctgtgcttggccgacatcctgaccgacaacagccactcagaggccacacgggctgaggctgcggctgtggtggcccaggtcacctccccacacctgcccgtcacccagcacctcagtagcttcctggagagcatggaggagatcgtgacagccctcgtcaaactgtgccaagaggcctcatcaggggaagtcttcctactggcctctgcggcccttgccaacatcacgttctttgacacaatggcctgcgagatgctcctgcagttgaatgccatccgtgttctcctggaagcctgcagtgacaagcagagagtggacacgccttacactcgggaccagattgtgaccatcttggcaaacatgtctgtcctagaacagtgtgcctctgacatcattcaggaaaatggggtccagcttatcatgggcatgctgtctgaaaaaccaaggtctgggactcctgctgaagtggcagcctgtgagcgagtccagcagaaagctgcagtgaccctggctcgtctcagccgagacccagatgtggcacgggaggccgtgcggctcagctgcatgtcccgtctcatcgagctctgcagatccccatcagagaggaacagcagtgacgccgtgcttgtggcctgcctggctgctctgcgtagattggctggggtctgccctgaaggcctccaggactctgactttcagcagttggtccagcctcggctggtggactccttcttactctgcagcaacatggaggagagttttgtgtagtgagtgtgggcgaagaaatacatttggctgttctcacaccccctctgactatgcaccagtgaacacatctgagtacataccagctctcctcatcttcttatttatacttaacttatttttgtgtgaaataaatggaggacaaaatcttagagcaacatcatcaaacagtctttggtccttgagaatcttctttgtgttttattttttgatttctgtagcttttcagttgcagatgttgaaattcgtaatgacaaatatgacaaattgtcatgggtgattccacttcatcttattttttctactctcactatacaatcttgcctcattttttaaaactttggaaccagaggatttcaactgcctagcaagttttttttttaagttggatttgctcttcccaaaaatctaaaatgaatttaataattgggtagaatatattggaaagaagtttctttttctttaataaatggaatcatataaaatgtatcccggattttcttattaaattgtattttaaactaggttcttgcttcccaggtttcattccccaaaaacttttccaaccattaaaagtacacacagaattgtcttgttttcataggtgtataaataggttaagttctgagtgacttagtgagaaaccaaagtgactttcaaaaatacacccaaaggcaccagaaaccctgcttcctttggcttctttgcttttgtgtaacctcctgttcacctcctggtgaatagaatcctcagatgaggcttattgaatgattgattcctcctcaaaagtatacttgaaagcagtggtgtgctgaagccagctcatgcccactcacaagggacaactgtgagaatttcttcctaactctgcactcagtgaccttgcgttggtagccatgagctacttcatgagccctcatgttgaaattggccatagtgggagtatttacaccacagaaattcacagatgctataaagcacagctttcgctttttttttttttagagagagctggtttaccaatttcactgcttgaaagtatcacaaaaatctggggatccttttgaaaatataaatgccatcatattgtgatataatttatacaatataatataattgtgtaaaatcatgattataataatgtttcaataaacatttcttaaattcccaa

SEQ ID NO: 142981 - DNA, 2943 bp, Homo sapiens
  Payload ID: 8240
  Gene Symbol: INSC
  Gene Name: inscuteable homolog (Drosophila)
  ENST ID: ENST00000424273
  CDS Start-End: 77-1777
gttgtgccatcctgccctctattttcagggtcacgaccgctgcaagcaggctttgctgcagattgggatcaacatgatggcactgcctggaggtcgccacctggactccgtcaccctgccgggtcagcggctacacctgatgcaggtggactcagtccagcgctggatggaagatctgaagctcatgaccgagtgcgagtgcatgtgtgtcctgcaggccaagcccatcagcctggaagaggatgcacagggtgacctcatcctggcaggtggccctggccctggagaccccctgcagctgctgctcaaacggggttgggtcattagcacagagctgcgcaggatcgggcagaagctggcccaggaccgctgggcacgggtgcacagcatgagcgtgcgtctgacctgccatgcccgctccatggtcagcgagtacagtgctgtcagcaggaactccttgaaggaaatgggcgagattgagaagctgctaatggagaaatgctcggagctctcggcagtcacagagaggtgccttcaggttgagaatgagcatgtcctgaagtcaatgaaggcctgcgtgagtgagaccctgagcatgctgggccagcactttggtcagctgctggagctggccctgacacgggaggttcaggtggagtctcactctgtcaccaggctggagtgcagtggtgcaatctcggctcaatgcaacctccgcctcctgggttcaagtgattcccctgcctcagcctcccaggcactggtgagaaaaattgatgcctcagacaatatctacaccacagagtccaccacagggaacctgttcagcctgacccaggagggggctcccttgtgccgcatcatagccaaggagggtggggtcgtagcactcttcaaggtttgccggcaggacagtttccggtgcttgtacccccaggcgctccgcacgctggcctccatctgctgcgtggaagagggtgtccaccagctggagaaggtggatggcgttctgtgcttggccgacatcctgaccgacaacagccactcagaggccacacgggctgaggctgcggctgtggtggcccaggtcacctccccacacctgcccgtcacccagcacctcagtagcttcctggagagcatggaggagatcgtgacagccctcgtcaaactgtgccaagaggcctcatcaggggaagtcttcctactggcctctgcggcccttgccaacatcacgttctttgacacaatggcctgcgagatgctcctgcagttgaatgccatccgtgttctcctggaagcctgcagtgacaagcagagagtggacacgccttacactcgggaccagattgtgaccatcttggcaaacatgtctgtcctagaacagtgtgcctctgacatcattcaggaaaatggggtccagcttatcatgggcatgctgtctgaaaaaccaaggtctgggactcctgctgaagtggcagcctgtgagcgagtccagcagaaagctgcagtgaccctggctcgtctcagccgagacccagatgtggcacgggaggccgtgcggctcagctgcatgtcccgtctcatcgagctctgcagatccccatcagagaggaacagcagtgacgccgtgcttgtggcctgcctggctgctctgcgtagattggctggggtctgccctgaaggcctccaggactctgactttcagcagttggtccagcctcggctggtggactccttcttactctgcagcaacatggaggagagttttgtgtagtgagtgtgggcgaagaaatacatttggctgttctcacaccccctctgactatgcaccagtgaacacatctgagtacataccagctctcctcatcttcttatttatacttaacttatttttgtgtgaaataaatggaggacaaaatcttagagcaacatcatcaaacagtctttggtccttgagaatcttctttgtgttttattttttgatttctgtagcttttcagttgcagatgttgaaattcgtaatgacaaatatgacaaattgtcatgggtgattccacttcatcttattttttctactctcactatacaatcttgcctcattttttaaaactttggaaccagaggatttcaactgcctagcaagttttttttttaagttggatttgctcttcccaaaaatctaaaatgaatttaataattgggtagaatatattggaaagaagtttctttttctttaataaatggaatcatataaaatgtatcccggattttcttattaaattgtattttaaactaggttcttgcttcccaggtttcattccccaaaaacttttccaaccattaaaagtacacacagaattgtcttgttttcataggtgtataaataggttaagttctgagtgacttagtgagaaaccaaagtgactttcaaaaatacacccaaaggcaccagaaaccctgcttcctttggcttctttgcttttgtgtaacctcctgttcacctcctggtgaatagaatcctcagatgaggcttattgaatgattgattcctcctcaaaagtatacttgaaagcagtggtgtgctgaagccagctcatgcccactcacaagggacaactgtgagaatttcttcctaactctgcactcagtgaccttgcgttggtagccatgagctacttcatgagccctcatgttgaaattggccatagtgggagtatttacaccacagaaattcacagatgctataaagcacagctttcgctttttttttttttagagagagctggtttaccaatttcactgcttgaaagtatcacaaaaatctggggatccttttgaaaatataaatgccatcatattgtgatataatttatacaatataatataattgtgtaaaatcatgattataataatgtttcaataaacatttcttaaattccc

SEQ ID NO: 142982 - DNA, 2237 bp, Homo sapiens
  Payload ID: 8240
  Gene Symbol: INSC
  Gene Name: inscuteable homolog (Drosophila)
  Uniprot ID: Q1MX18
  ENST ID: ENST00000528567
  CDS Start-End: 74-1636
gttgtgccatcctgccctctattttcagggtcacgaccgctgcaagcaggctttgctgcagattgggatcaacatgatggcactgcctggaggtcgccacctggactccgtcaccctgccgggtcagcggctacacctgatgcaggtggactcagtccagcgctggatggaagatctgaagctcatgaccgagtgcgagtgcatgtgtgtcctgcaggccaagcccatcagcctggaagaggatgcacagggtgacctcatcctggcaggtggccctggccctggagaccccctgcagctgctgctcaaacggggttgggtcattagcacagagctgcgcaggatcgggcagaagctggcccaggaccgctgggcacgggtgcacagcatgagcgtgcgtctgacctgccatgcccgctccatggtcagcgagtacagtgctgtcagcaggaactccttgaaggaaatgggcgagattgagaagctgctaatggagaaatgctcggagctctcggcagtcacagagaggtgccttcaggttgagaatgagcatgtcctgaagtcaatgaaggcctgcgtgagtgagaccctgagcatgctgggccagcactttggtcagctgctggagctggccctgacacgggaggttcaggcactggtgagaaaaattgatgcctcagacaatatctacaccacagagtccaccacagggaacctgttcagcctgacccaggagggggctcccttgtgccgcatcatagccaaggagggtggggtcgtagcactcttcaaggtttgccggcaggacagtttccggtgcttgtacccccaggcgctccgcacgctggcctccatctgctgcgtggaagagggtgtccaccagctggagaaggtggatggcgttctgtgcttggccgacatcctgaccgacaacagccactcagaggccacacgggctgaggctgcggctgtggtggcccaggtcacctccccacacctgcccgtcacccagcacctcagtagcttcctggagagcatggaggagatcgtgacagccctcgtcaaactgtgccaagaggcctcatcaggggaagtcttcctactggcctctgcggcccttgccaacatcacgttctttgacacaatggcctgcgagatgctcctgcagttgaatgccatccgtgttctcctggaagcctgcagtgacaagcagagagtggacacgccttacactcgggaccagattgtgaccatcttggcaaacatgtctgtcctagaacagtgtgcctctgacatcattcaggaaaatggggtccagcttatcatgggcatgctgtctgaaaaaccaaggtctgggactcctgctgaagtggcagcctgtgagcgagtccagcagaaagctgcagtgaccctggctcgtctcagccgagacccagatgtggcacgggaggccgtgcggctcagctgcatgtcccgtctcatcgagctctgcagatccccatcagagaggaacagcagtgacgccgtgcttgtggcctgcctggctatggggatacagctgcaggtaaaaaagacaaacatctctgccctcctgctgtggtttttattttggcacattcaaggctgctctgcgtagattggctggggtctgccctgaaggcctccaggactctgactttcagcagttggtccagcctcggctggtggactccttcttactctgcagcaacatggaggagagttttgtgtagtgagtgtgggcgaagaaatacatttggctgttctcacaccccctctgactatgcaccagtgaacacatctgagtacataccagctctcctcatcttcttatttatacttaacttatttttgtgtgaaataaatggaggacaaaatcttagagcaacatcatcaaacagtctttggtccttgagaatcttctttgtgttttattttttgatttctgtagcttttcagttgcagatgttgaaattcgtaatgacaaatatgacaaattgtcatgggtgattccacttcatcttattttttctactctcactatacaatcttgcctcattttttaaaactttggaaccagaggatttcaactgcctagcaagttttttttttaagttggatttgctcttcccaaaaatctaaaatgaatttaataattgggtagaatatattggaaagaagtttctttttctttaataaatggaatcatataaaatgta

SEQ ID NO: 142983 - DNA, 1576 bp, Homo sapiens
  Payload ID: 8240
  Gene Symbol: INSC
  Gene Name: inscuteable homolog (Drosophila)
  Uniprot ID: Q1MX18
  ENST ID: ENST00000525218
  CDS Start-End: 68-1540
ccatcctgccctctattttcagggtcacgaccgctgcaagcaggctttgctgcagattgggatcaacatgatggcactgcctggaggtcgccacctggactccgtcaccctgccgggtcagcggctacacctgatgcaggtggactcagtccagcgctggatggaagatctgaagctcatgaccgagtgcgagtgcatgtgtgtcctgcaggccaagcccatcagcctggaagaggatgcacagggtgacctcatcctggcaggtggccctggccctggagaccccctgcagctgctgctcaaacggggttgggtcattagcacagagctgcgcaggatcgggcagaagctggcccaggaccgctgggcacgggtgcacagcatgagcgtgcgtctgacctgccatgcccgctccatggtcagcgagtacagtgctgtcagcaggaactccttgaaggaaatgggcgagattgagaagctgctaatggagaaatgctcggagctctcggcagtcacagagaggtgccttcaggttgagaatgagcatgtcctgaagtcaatgaaggcctgcgtgagtgagaccctgagcatgctgggccagcactttggtcagctgctggagctggccctgacacgggaggttcaggcactggtgagaaaaattgatgcctcagacaatatctacaccacagagtccaccacagggaacctgttcagcctgacccaggagggggctcccttgtgccgcatcatagccaaggtggatggcgttctgtgcttggccgacatcctgaccgacaacagccactcagaggccacacgggctgaggctgcggctgtggtggcccaggtcacctccccacacctgcccgtcacccagcacctcagtagcttcctggagagcatggaggagatcgtgacagccctcgtcaaactgtgccaagaggcctcatcaggggaagtcttcctactggcctctgcggcccttgccaacatcacgttctttgacacaatggcctgcgagatgctcctgcagttgaatgccatccgtgttctcctggaagcctgcagtgacaagcagagagtggacacgccttacactcgggaccagattgtgaccatcttggcaaacatgtctgtcctagaacagtgtgcctctgacatcattcaggaaaatggggtccagcttatcatgggcatgctgtctgaaaaaccaaggtctgggactcctgctgaagtggcagcctgtgagcgagtccagcagaaagctgcagtgaccctggctcgtctcagccgagacccagatgtggcacgggaggccgtgcggctcagctgcatgtcccgtctcatcgagctctgcagatccccatcagagaggaacagcagtgacgccgtgcttgtggcctgcctggctgctctgcgtagattggctggggtctgccctgaaggcctccaggactctgactttcagcagttggtccagcctcggctggtggactccttcttactctgcagcaacatggaggagagttttgtgtagtgagtgtgggcgaagaaatacatttggctgttctca

SEQ ID NO: 142984 - DNA, 1702 bp, Homo sapiens
  Payload ID: 8240
  Gene Symbol: INSC
  Gene Name: inscuteable homolog (Drosophila)
  Uniprot ID: Q1MX18
  ENST ID: ENST00000530161
  CDS Start-End: 68-1666
ccatcctgccctctattttcagggtcacgaccgctgcaagcaggctttgctgcagattgggatcaacatgatggcactgcctggaggtcgccacctggactccgtcaccctgccgggtcagcggctacacctgatgcaggtggactcagtccagcgctggatggaagatctgaagctcatgaccgagtgcgagtgcatgtgtgtcctgcaggccaagcccatcagcctggaagaggatgcacagggtgacctcatcctggcaggtggccctggccctggagaccccctgcagctgctgctcaaacggggttgggtcattagcacagagctgcgcaggatcgggcagaagctggcccaggaccgctgggcacgggtgcacagcatgagcgtgcgtctgacctgccatgcccgctccatggtcagcgagtacagtgctgtcagcaggaactccttgaaggaaatgggcgagattgagaagctgctaatggagaaatgctcggagctctcggcagtcacagagaggtgccttcaggttgagaatgagcatgtcctgaagtcaatgaaggcctgcgtgagtgagaccctgagcatgctgggccagcactttggtcagctgctggagctggccctgacacgggaggttcaggcactggtgagaaaaattgatgcctcagacaatatctacaccacagagtccaccacagggaacctgttcagcctgacccaggagggggctcccttgtgccgcatcatagccaaggagggtggggtcgtagcactcttcaaggtttgccggcaggacagtttccggtgcttgtacccccaggcgctccgcacgctggcctccatctgctgcgtggaagagggtgtccaccagctggagaaggtggatggcgttctgtgcttggccgacatcctgaccgacaacagccactcagaggccacacgggctgaggctgcggctgtggtggcccaggtcacctccccacacctgcccgtcacccagcacctcagtagcttcctggagagcatggaggagatcgtgacagccctcgtcaaactgtgccaagaggcctcatcaggggaagtcttcctactggcctctgcggcccttgccaacatcacgttctttgacacaatggcctgcgagatgctcctgcagttgaatgccatccgtgttctcctggaagcctgcagtgacaagcagagagtggacacgccttacactcgggaccagattgtgaccatcttggcaaacatgtctgtcctagaacagtgtgcctctgacatcattcaggaaaatggggtccagcttatcatgggcatgctgtctgaaaaaccaaggtctgggactcctgctgaagtggcagcctgtgagcgagtccagcagaaagctgcagtgaccctggctcgtctcagccgagacccagatgtggcacgggaggccgtgcggctcagctgcatgtcccgtctcatcgagctctgcagatccccatcagagaggaacagcagtgacgccgtgcttgtggcctgcctggctgctctgcgtagattggctggggtctgccctgaaggcctccaggactctgactttcagcagttggtccagcctcggctggtggactccttcttactctgcagcaacatggaggagagttttgtgtagtgagtgtgggcgaagaaatacatttggctgttctca

SEQ ID NO: 142985 - DNA, 1706 bp, Homo sapiens
  Payload ID: 8241
  Gene Symbol: INS-IGF2
  Gene Name: INS-IGF2 readthrough
  Uniprot ID: F8WCM5
  ENST ID: ENST00000356578
  CDS Start-End: 60-662
agccctccaggacaggctgcatcagaagaggccatcaagcagatcactgtccttctgccatggccctgtggatgcgcctcctgcccctgctggcgctgctggccctctggggacctgacccagccgcagcctttgtgaaccaacacctgtgcggctcacacctggtggaagctctctacctagtgtgcggggaacgaggcttcttctacacacccaagacccgccgggaggcagaggacctgcaggcctcagctttgtccctctcctcctccacgtcaacctggccagagggtctggacgccacagccagggcaccccctgctttggtggtgactgctaatattggccaggccggcggatcatcgtccaggcagtttcggcagagagccttgggcaccagtgactccccggtcctctttatccactgtccaggagctgcggggactgcgcagggactagagtacaggggccgaagagtcaccaccgagcttgtgtgggaggaggtggattccagcccccagccccagggctctgaatcgctgccagctcagccccctgcccagcctgccccacagcctgagccccagcaggccagagagcccagtcctgaggtgagctgctgtggcctgtggcccaggcgaccccagcgctcccagaactgaggctggcagccagccccagcctcagccccaactgcgaggcagagagacaccaatgggaatcccaatggggaagtcgatgctggtgcttctcaccttcttggccttcgcctcgtgctgcattgctgcttaccgccccagtgagaccctgtgcggcggggagctggtggacaccctccagttcgtctgtggggaccgcggcttctacttcagcaggcccgcaagccgtgtgagccgtcgcagccgtggcatcgttgaggagtgctgtttccgcagctgtgacctggccctcctggagacgtactgtgctacccccgccaagtccgagagggacgtgtcgacccctccgaccgtgcttccggacaacttccccagataccccgtgggcaagttcttccaatatgacacctggaagcagtccacccagcgcctgcgcaggggcctgcctgccctcctgcgtgcccgccggggtcacgtgctcgccaaggagctcgaggcgttcagggaggccaaacgtcaccgtcccctgattgctctacccacccaagaccccgcccacgggggcgcccccccagagatggccagcaatcggaagtgagcaaaactgccgcaagtctgcagcccggcgccaccatcctgcagcctcctcctgaccacggacgtttccatcaggttccatcccgaaaatctctcggttccacgtccccctggggcttctcctgacccagtccccgtgccccgcctccccgaaacaggctactctcctcggccccctccatcgggctgaggaagcacagcagcatcttcaaacatgtacaaaatcgattggctttaaacacccttcacataccctccccccaaattatccccaattatccccacacataaaaaatcaaaacattaaactaacccccttcccccccccccacaacaaccctcttaaaactaattggctttttagaaacaccccacaaaagctcagaaattggctttaaaaaaaacaaccaccaaaaaaaatcaattggctaaaaaaaaaaagtattaaaa

SEQ ID NO: 142986 - DNA, 828 bp, Homo sapiens
  Payload ID: 8241
  Gene Symbol: INS-IGF2
  Gene Name: INS-IGF2 readthrough
  Uniprot ID: F8WCM5
  ENST ID: ENST00000397270
  CDS Start-End: 60-662
agccctccaggacaggctgcatcagaagaggccatcaagcagatcactgtccttctgccatggccctgtggatgcgcctcctgcccctgctggcgctgctggccctctggggacctgacccagccgcagcctttgtgaaccaacacctgtgcggctcacacctggtggaagctctctacctagtgtgcggggaacgaggcttcttctacacacccaagacccgccgggaggcagaggacctgcaggcctcagctttgtccctctcctcctccacgtcaacctggccagagggtctggacgccacagccagggcaccccctgctttggtggtgactgctaatattggccaggccggcggatcatcgtccaggcagtttcggcagagagccttgggcaccagtgactccccggtcctctttatccactgtccaggagctgcggggactgcgcagggactagagtacaggggccgaagagtcaccaccgagcttgtgtgggaggaggtggattccagcccccagccccagggctctgaatcgctgccagctcagccccctgcccagcctgccccacagcctgagccccagcaggccagagagcccagtcctgaggtgagctgctgtggcctgtggcccaggcgaccccagcgctcccagaactgaggctggcagccagccccagcctcagccccaactgcgaggcagagagggcctgcagggagggatccagcaggtgactcttcaggctgatttgcccatcccagatagaagccgggagtgttctttcaaaggtgtctttaccttagacactcaataaaatggtaacaca

SEQ ID NO: 142987 - DNA, 503 bp, Homo sapiens
  Payload ID: 8242
  Gene Symbol: INS
  Gene Name: insulin
  Uniprot ID: P01308
  ENST ID: ENST00000250971
  CDS Start-End: 98-430
ccagcagccctcagccctccaggacaggctgcatcagaagaggccatcaagcaggtctgttccaagggcctttgcgtcagatcactgtccttctgccatggccctgtggatgcgcctcctgcccctgctggcgctgctggccctctggggacctgacccagccgcagcctttgtgaaccaacacctgtgcggctcacacctggtggaagctctctacctagtgtgcggggaacgaggcttcttctacacacccaagacccgccgggaggcagaggacctgcaggtggggcaggtggagctgggcgggggccctggtgcaggcagcctgcagcccttggccctggaggggtccctgcagaagcgtggcattgtggaacaatgctgtaccagcatctgctccctctaccagctggagaactactgcaactagacgcagcccgcaggcagccccacacccgccgcctcctgcaccgagagagatggaataaagcccttgaaccagc

SEQ ID NO: 142988 - DNA, 597 bp, Homo sapiens
  Payload ID: 8242
  Gene Symbol: INS
  Gene Name: insulin
  Uniprot ID: P01308
  ENST ID: ENST00000381330
  CDS Start-End: 192-524
aaattgcagcctcagcccccagccatctgccgacccccccaccccaggccctaatgggccaggcggcaggggttgagaggtaggggagatgggctctgagactataaagccagcgggggcccagcagccctcagccctccaggacaggctgcatcagaagaggccatcaagcagatcactgtccttctgccatggccctgtggatgcgcctcctgcccctgctggcgctgctggccctctggggacctgacccagccgcagcctttgtgaaccaacacctgtgcggctcacacctggtggaagctctctacctagtgtgcggggaacgaggcttcttctacacacccaagacccgccgggaggcagaggacctgcaggtggggcaggtggagctgggcgggggccctggtgcaggcagcctgcagcccttggccctggaggggtccctgcagaagcgtggcattgtggaacaatgctgtaccagcatctgctccctctaccagctggagaactactgcaactagacgcagcccgcaggcagccccacacccgccgcctcctgcaccgagagagatggaataaagcccttgaaccagc

SEQ ID NO: 142989 - DNA, 639 bp, Homo sapiens
  Payload ID: 8242
  Gene Symbol: INS
  Gene Name: insulin
  Uniprot ID: P01308
  ENST ID: ENST00000397262
  CDS Start-End: 234-566
tccaggacaggctgcatcagaagaggccatcaagcaggtctgttccaagggcctttgcgtcaggtgggctcaggattccagggtggctggaccccaggccccagctctgcagcagggaggacgtggctgggctcgtgaagcatgtgggggtgagcccaggggccccaaggcagggcacctggccttcagcctgcctcagccctgcctgtctcccagatcactgtccttctgccatggccctgtggatgcgcctcctgcccctgctggcgctgctggccctctggggacctgacccagccgcagcctttgtgaaccaacacctgtgcggctcacacctggtggaagctctctacctagtgtgcggggaacgaggcttcttctacacacccaagacccgccgggaggcagaggacctgcaggtggggcaggtggagctgggcgggggccctggtgcaggcagcctgcagcccttggccctggaggggtccctgcagaagcgtggcattgtggaacaatgctgtaccagcatctgctccctctaccagctggagaactactgcaactagacgcagcccgcaggcagccccacacccgccgcctcctgcaccgagagagatggaataaagcccttgaaccagc

SEQ ID NO: 142990 - DNA, 464 bp, Homo sapiens
  Payload ID: 8242
  Gene Symbol: INS
  Gene Name: insulin
  ENST ID: ENST00000421783
  CDS Start-End: 188-464
aagggcctttgcgtcaggtgggctcaggattccagggtggctggaccccaggccccagctctgcagcagggaggacgtggctgggctcgtgaagcatgtgggggtgagcccaggggccccaaggcagggcacctggccttcagcctgcctcagccctgcctgtctcccagatcactgtccttctgccatggccctgtggatgcgcctcctgcccctgctggcgctgctggccctctggggacctgacccagccgcagcctttgtgaaccaacacctgtgcggctcacacctggtggaagctctctacctagtgtgcggggaacgaggcttcttctacacacccaagacccgccgggaggcagaggacctgcaggctggagaactactgcaactagacgcagcccgcaggcagccccacacccgccgcctcctgcaccgagagagatggaataaagcccttgaac

SEQ ID NO: 142991 - DNA, 297 bp, Homo sapiens
  Payload ID: 8242
  Gene Symbol: INS
  Gene Name: insulin
  ENST ID: ENST00000512523
  CDS Start-End: 1-297
atggccctgtggatgcgcctcctgcccctgctggcgctgctggccctctggggacctgacccagccgcagcctttgtgaaccaacacctgtgcggctcacacctggtggaagctctctacctagtgtgcggggaacgaggcttcttctacacacccaagacccgccgggaggcagaggacctgcagggcagcctgcagcccttggccctggaggggtccctgcagaagcgtggcattgtggaacaatgctgtaccagcatctgctccctctaccagctggagaactactgcaactag

SEQ ID NO: 142992 - DNA, 2623 bp, Homo sapiens
  Payload ID: 8243
  Gene Symbol: INSIG1
  Gene Name: insulin induced gene 1
  ENST ID: ENST00000344756
  CDS Start-End: 212-748
cacgcccctgggcggtgcgcgcgggcggtgggtaggccgggcaggctcacgtgatgcgggccccgcggcccgccatataaacccgcgcgcccgccaggcgctgcggccgtcccgggccgtgactcctcctttcccccgccccgcctccgttcggagagccggcgggcgggcgcctctcggccaggaagcgcctcttggacgcgtgtgaccgatgcccagattgcacgaccacttctggagctgctcctgtgcgcacagcgcgaggcgccgaggccccccgcgagccagcgccaaattggattttgccaataatgtccagctgtccttgactttagcagccctatctttgggcctttggtggacatttgatcgttccagaagtggccttgggctggggatcaccatagcttttctagctacgctgatcacgcagtttctcgtgtataatggtgtctatcagtatacatccccagatttcctctatattcgttcttggctcccttgtatatttttctcaggaggcgtcacggtggggaacataggacgacagttagctatgctgatacccttctgtgaggagttgaatttgaagaccacttggctgtttcacaaaaccagaagtaattacagggtgttcctgaaaagccccatagtgattgagtcttcaaaaccaccgattctgagagcaaggaagattttggaagaaaatctgactgtggattatgacaaagattatcttttttcttaagtaatctatttagatcgggctgactgtacaaatgactcctggaaaaaactcttcacctagtctagaatagggaggtggagaatgatgacttaccctgaagtcttcccttgactgcccgcactggcgcctgtctgtgccctggagcattctgcccaggctacgtgggttcaggcaggtggcagcttcccaagtattcgatttcattcatgtgattaaaacaagttgccatatttcaaagccttgaactaagactcaattaccaacccgcagttttgtgtcagtgcccaaaggaggtaggttgatggtgcttaacaaacatgaagtatggtgtaataggaataatatttatccaaaagatttttaaaaatagggctgtgtttaaaaaaaaaaacaaaacaagaaaagcagcagtgattatagagaggtcacactctaagtggggtcgcggcgtggccacgcttcacggtcacgctcgtccgtcctgcagtggcgtgtttacatggtcacacgtgtgtgtatcaccagtgggtcaactgcttgtcattcctcccgtggcagtttgtgtagacaatcttactgagcaaaaggcaatgaaaagtcttggttcccacactgcgatatattggaattttcacctcagtttatgaagtttatttcgaaatccatagtcatctaagaatgaatacctgtctgccatgtatttcaatcttagtgagccaaaattgtttgtttgttactacagaatagagatgactgttttttgccacagccctatggaatttgcaatctgtgattgccttgtaaaaaggagagtgcatatggcactgcattaaacgtgtggtgtttctagtcaatgatattggtgagcacaatgtattcatttaatggcatagaccataccagacctaatttgcaagtattgggtcttaaacttcaagtgcaatgtatatgaaaaccaatctgagccttgtatctcttaaatatttattttttttaacgtgtgagatgttcgagagaaggttctccattcatttcagtgctgcctggaggaaactcggcaatgatttctttcagttgtgaagttcctttcgtgttacaccctccactgaaccctcaaccttcgaaatactccagttttgtgggtttggtcatttttacttataaatttacctttttgtattttgcaatttacatgtgtttggtttgttttaaattctgtgaaagtggcttgattaaaagactccttttaaatggaagccaccagtcagcagaatggaagcttagaggaacttgcctgtgagcgctggtctttgtgtttggttttgtgatgtaacgatctttgctggggttttttgctttgttttgagggaaatgtcttggagtaaattttaagttcctggagttaatttgttttacaggaattttgttttttaaaaaaataggatcattctgaactttggaatgacccccttatatattttctgaaaatgaaaacagttacatgaaaaaaatttccaatgaagatgtcagcattttatgaaaaaccagaagttattagatgaaagcagcgagtgaatctttaaaacagacttgatcacgcacacacaataagtctttctctccgaaaccggaagtaaatctatatctgttagaaataatgtagccaaaagaatgtaaatttgaggatttttttgccaatagtttatagaaaatatatgaaccaaagtgatttgagtttgtaaaaatgtaaaatagtatgaacaaaatttgcactctaccagatttgaacatctagtgaggttcacattcatactaagttttcaacattgtgttctttttgcattcattttttacttttattaaaggttcaaaacc

SEQ ID NO: 142993 - DNA, 1127 bp, Homo sapiens
  Payload ID: 8243
  Gene Symbol: INSIG1
  Gene Name: insulin induced gene 1
  Uniprot ID: O15503
  ENST ID: ENST00000342407
  CDS Start-End: 99-593
gggccgtgactcctcctttcccccgccccgcctccgttcggagagccggcgggcgggcgcctctcggccaggaagcgcctcttggacgcgtgtgaccgatgcccagattgcacgaccacttctggagctgctcctgtgcgcacagcgcgaggcgccgaggccccccgcgagccagcgccgcggggctggcggccaaggttggggagatgatcaacgtttccgtgtccgggccctccctgctggcggcccacggtgccccggacgctgaccccgcgcccaggggccgcagtgctgcgatgagcggccccgagcccggcagcccctaccccaacacctggcatcatcgcctgttgcagaggagcctcgtgctcttctcggttggggtggtcctagccctggtgctcaacctgctgcagatccagaggaatgtcactctcttccccgaggaggtgatcgccaccatcttttcctccgcctggtgggtccctccctgctgcgggacagcagctggtatacatccccagatttcctctatattcgttcttggctcccttgtatatttttctcaggaggcgtcacggtggggaacataggacgacagttagctatgggtgttcctgaaaagccccatagtgattgagtcttcaaaaccaccgattctgagagcaaggaagattttggaagaaaatctgactgtggattatgacaaagattatcttttttcttaagtaatctatttagatcgggctgactgtacaaatgactcctggaaaaaactcttcacctagtctagaatagggaggtggagaatgatgacttaccctgaagtcttcccttgactgcccgcactggcgcctgtctgtgccctggagcattctgcccaggctacgtgggttcaggcaggtggcagcttcccaagtattcgatttcattcatgtgattaaaacaagttgccatatttcaaagccttgaactaagactcaattaccaacccgcagttttgtgtcagtgcccaaaggaggtaggttgatggtgcttaacaaacatgaagtatggtgtaataggaataatatttatccaaaagatttttaaaaatagggctgtgtttaaaaaaaaaaacaaaacaa

SEQ ID NO: 142994 - DNA, 3010 bp, Homo sapiens
  Payload ID: 8243
  Gene Symbol: INSIG1
  Gene Name: insulin induced gene 1
  Uniprot ID: O15503
  ENST ID: ENST00000340368
  CDS Start-End: 212-1045
cacgcccctgggcggtgcgcgcgggcggtgggtaggccgggcaggctcacgtgatgcgggccccgcggcccgccatataaacccgcgcgcccgccaggcgctgcggccgtcccgggccgtgactcctcctttcccccgccccgcctccgttcggagagccggcgggcgggcgcctctcggccaggaagcgcctcttggacgcgtgtgaccgatgcccagattgcacgaccacttctggagctgctcctgtgcgcacagcgcgaggcgccgaggccccccgcgagccagcgccgcggggctggcggccaaggttggggagatgatcaacgtttccgtgtccgggccctccctgctggcggcccacggtgccccggacgctgaccccgcgcccaggggccgcagtgctgcgatgagcggccccgagcccggcagcccctaccccaacacctggcatcatcgcctgttgcagaggagcctcgtgctcttctcggttggggtggtcctagccctggtgctcaacctgctgcagatccagaggaatgtcactctcttccccgaggaggtgatcgccaccatcttttcctccgcctggtgggtccctccctgctgcgggacagcagctgctgttgttggcctactgtacccctgtatcgacagtcacctcggagaaccccacaaatttaagagagaatgggccagtgtcatgcgctgcatagcagtttttgttggcattaaccacgccagtgctaaattggattttgccaataatgtccagctgtccttgactttagcagccctatctttgggcctttggtggacatttgatcgttccagaagtggccttgggctggggatcaccatagcttttctagctacgctgatcacgcagtttctcgtgtataatggtgtctatcagtatacatccccagatttcctctatattcgttcttggctcccttgtatatttttctcaggaggcgtcacggtggggaacataggacgacagttagctatgggtgttcctgaaaagccccatagtgattgagtcttcaaaaccaccgattctgagagcaaggaagattttggaagaaaatctgactgtggattatgacaaagattatcttttttcttaagtaatctatttagatcgggctgactgtacaaatgactcctggaaaaaactcttcacctagtctagaatagggaggtggagaatgatgacttaccctgaagtcttcccttgactgcccgcactggcgcctgtctgtgccctggagcattctgcccaggctacgtgggttcaggcaggtggcagcttcccaagtattcgatttcattcatgtgattaaaacaagttgccatatttcaaagccttgaactaagactcaattaccaacccgcagttttgtgtcagtgcccaaaggaggtaggttgatggtgcttaacaaacatgaagtatggtgtaataggaataatatttatccaaaagatttttaaaaatagggctgtgtttaaaaaaaaaaacaaaacaagaaaagcagcagtgattatagagaggtcacactctaagtggggtcgcggcgtggccacgcttcacggtcacgctcgtccgtcctgcagtggcgtgtttacatggtcacacgtgtgtgtatcaccagtgggtcaactgcttgtcattcctcccgtggcagtttgtgtagacaatcttactgagcaaaaggcaatgaaaagtcttggttcccacactgcgatatattggaattttcacctcagtttatgaagtttatttcgaaatccatagtcatctaagaatgaatacctgtctgccatgtatttcaatcttagtgagccaaaattgtttgtttgttactacagaatagagatgactgttttttgccacagccctatggaatttgcaatctgtgattgccttgtaaaaaggagagtgcatatggcactgcattaaacgtgtggtgtttctagtcaatgatattggtgagcacaatgtattcatttaatggcatagaccataccagacctaatttgcaagtattgggtcttaaacttcaagtgcaatgtatatgaaaaccaatctgagccttgtatctcttaaatatttattttttttaacgtgtgagatgttcgagagaaggttctccattcatttcagtgctgcctggaggaaactcggcaatgatttctttcagttgtgaagttcctttcgtgttacaccctccactgaaccctcaaccttcgaaatactccagttttgtgggtttggtcatttttacttataaatttacctttttgtattttgcaatttacatgtgtttggtttgttttaaattctgtgaaagtggcttgattaaaagactccttttaaatggaagccaccagtcagcagaatggaagcttagaggaacttgcctgtgagcgctggtctttgtgtttggttttgtgatgtaacgatctttgctggggttttttgctttgttttgagggaaatgtcttggagtaaattttaagttcctggagttaatttgttttacaggaattttgttttttaaaaaaataggatcattctgaactttggaatgacccccttatatattttctgaaaatgaaaacagttacatgaaaaaaatttccaatgaagatgtcagcattttatgaaaaaccagaagttattagatgaaagcagcgagtgaatctttaaaacagacttgatcacgcacacacaataagtctttctctccgaaaccggaagtaaatctatatctgttagaaataatgtagccaaaagaatgtaaatttgaggatttttttgccaatagtttatagaaaatatatgaaccaaagtgatttgagtttgtaaaaatgtaaaatagtatgaacaaaatttgcactctaccagatttgaacatctagtgaggttcacattcatactaagttttcaacattgtgttctttttgcattcattttttacttttattaaaggttcaaaaccaa

SEQ ID NO: 142995 - DNA, 596 bp, Homo sapiens
  Payload ID: 8243
  Gene Symbol: INSIG1
  Gene Name: insulin induced gene 1
  ENST ID: ENST00000425172
  CDS Start-End: 227-596
atgcgggccccgcggcccgccatataaacccgcgcgcccgccaggcgctgcggccgtcccgggccgtgactcctcctttcccccgccccgcctccgttcggagagccggcgggcgggcgcctctcggccaggtacgcggccggctgggataggggtcgcgggcgggctttggtcgcgcagcagccggtcctccccggaggaagcgcctcttggacgcgtgtgaccgatgcccagattgcacgaccacttctggagctgctcctgtgcgcacagcgcgaggcgccgaggccccccgcgagccagcgccgcggggctggcggccaaggttggggagatgatcaacgtttccgtgtccgggccctccctgctggcggcccacggtgccccggacgctgaccccgcgcccaggggccgcagtgctgcgatgagcggccccgagcccggcagcccctaccccaacacctggcatcatcgcctgttgcagaggagcctcgtgctcttctcggttggggtggtcctagccctggtgctcaacctgctgcagatccagaggaatgtcactctcttccccgaggaggtgatcgccaccatctttt

SEQ ID NO: 142996 - DNA, 1320 bp, Homo sapiens
  Payload ID: 8243
  Gene Symbol: INSIG1
  Gene Name: insulin induced gene 1
  ENST ID: ENST00000476756
  CDS Start-End: 1-718
ctcggttggggtggtcctagccctggtgctcaacctgctgcagatccagaggaatgtcactctcttccccgaggaggtgatcgccaccatcttttcctccgcctggtgggtccctccctgctgcgggacagcagctgctgttgttggcctactgtacccctgtatcgacagtcacctcggagaaccccacaaatttaagagagaatgggccagtgtcatgcgctgcatagcagtttttgttggcattaaccacgccagtgctaaattggattttgccaataatgtccagctgtccttgactttagcagccctatctttgggcctttggtggacatttgatcgttccagaagtggccttgggctggggatcaccatagcttttctagctacgctgatcacgcagtttctcgtgtataatggtgtctatcagtatacatccccagatttcctctatattcgttcttggctcccttgtatatttttctcaggaggcgtcacggtggggaacataggacgacagttagctatgctgatacccttctgtgaggagttgaatttgaagaccacttggctgtttcacaaaaccagaagtaattacagggtgttcctgaaaagccccatagtgattgagtcttcaaaaccaccgattctgagagcaaggaagattttggaagaaaatctgactgtggattatgacaaagattatcttttttcttaagtaatctatttagatcgggctgactgtacaaatgactcctggaaaaaactcttcacctagtctagaatagggaggtggagaatgatgacttaccctgaagtcttcccttgactgcccgcactggcgcctgtctgtgccctggagcattctgcccaggctacgtgggttcaggcaggtggcagcttcccaagtattcgatttcattcatgtgattaaaacaagttgccatatttcaaagccttgaactaagactcaattaccaacccgcagttttgtgtcagtgcccaaaggaggtaggttgatggtgcttaacaaacatgaagtatggtgtaataggaataatatttatccaaaagatttttaaaaatagggctgtgtttaaaaaaaaaaacaaaacaagaaaagcagcagtgattatagagaggtcacactctaagtggggtcgcggcgtggccacgcttcacggtcacgctcgtccgtcctgcagtggcgtgtttacatggtcacacgtgtgtgtatcaccagtgggtcaactgcttgtcattcctcccgtggcagtttgtgtagacaatcttactgagcaaaaggcaatgaaaagtctt

SEQ ID NO: 142997 - DNA, 2590 bp, Homo sapiens
  Payload ID: 8244
  Gene Symbol: INSIG2
  Gene Name: insulin induced gene 2
  Uniprot ID: Q9Y5U4
  ENST ID: ENST00000245787
  CDS Start-End: 207-884
gtgggagtggaggaggaagaggcggtagggggtacgggggctggtcccagaagatggcggaggcgggggatttctggtaggtcctactttaggacaagatgtggtaccgttgaagcgtcagtctttgattcacagacagttgagcttttcagctgggaagcctttccatttttttttttttaacggctttctgaacctatgaaaccatggcagaaggagagacagagtcacctgggcccaaaaagtgtggcccatatatttcatctgtcactagccagagtgtgaacttgatgattcgaggagtagtgctattttttattggagtatttcttgcattagtgttaaatttacttcagattcagagaaatgtgacgctctttccacctgatgtgattgcaagcatcttttcttctgcatggtgggtacccccatgctgtggcacggcttcagctgtgattgggttattatacccctgcattgacagacatctaggagaaccacataaatttaaaagagagtggtccagtgtaatgcggtgtgtagcagtctttgttggtataaatcatgccagtgctaaagtggatttcgataacaacatacagttgtctctcacactggctgcactatccattggactgtggtggacttttgatagatctagaagtggttttggccttggagtaggaattgccttcttggcaactgtggtcactcaactgctagtatataatggtgtttaccaatatacatctccagatttcctctatgttcgttcttggttaccatgtatattttttgctggaggcataacaatgggaaacattggtcgacaactggcaatgtacgaatgtaaagttatcgcagaaaaatctcatcaggaatgaagaaggcaaaaaatatcttttgtacagaaaagcaagatgaaaaggatgtgaaatggtagatataccaacaaaacttcagactgtaaaattgccaggatgcagttttccccttgattggcgtgtgtgtatatatggataaatatatatatacacacacacatattactgcaatctgtgattgcttcatctgtaaatcagttgtaaacctttacatatttgacttaaataactgtaagatatatatgtactacattaaaaagtgttgattaatagatgaaatttttaaattaattttttaaaacatgccatacattgtatcacaatgttaatgtgccaagatattgttcctgtcatgcagagtataagaatgctttgaacaatttgtagacttagtgaaataaaataagaggaaagccaaaaacaaacaaacaaaaagcatatggggagctggtattttctctttagcttactgttgtgcctttttatttttctaatcacagcagtatgagttatgagtgccctaatttgtggttagtttctaatttaatgttgtttcatagagtttggagtgttttgatacagggtgaaaatgaacttctggtttcaaacctgcgttactggagacagcccaaagagtaattttctgttttgacaggttttactggaagtatatgtgatgagcagaagaggttatcagcattaaattgttttggttctaaatttggaacagtatatataattaaaagtaaggaacattagaggatttaattagaataaatacatgttttggaaatacagtgacctcttgcagtgtcacaaaagtgcaaagtgatattagctgtcatctgcaatacagaatctcattgcttttgcacatggagcatataggaaactccaaacagatcacaatgaggtttctaaatctgttgggttctgtcttctattgggttctgtgaagcaaaccactgtagctttagctgggttcagtcatatgactcgttggtggaatgcctaggtttttcatcttacatgcagtcttgggggtggatgaatacataatttctcatgtattcgtgtatccattagtgaatagttcaagtctgtttaagagtgtattgagatggcattctctgcatgttaaagatcttaatggcaaccagcacctcttaagtatggtttaaacatattcttagctaattttttccattagtttttgaaattggtggcagttgtctgatccacaagggcaagatcttctgagtactctggggtgtgagtatgtgtgcacacgtgtgtgttggagtgagtgagagaatgtgtctgtgcatgtggccatgctttcctagaatgtcaagtagatatttttacactttgagttttaaagcaattactatcagactgagatcttgtatgccaaactttaatctgcttttatgttttcaggctgaaggtgtgaaaatcctaagaggatttcatattgaatatgtgtacacaatcttaactatcgtggtggaaaacatactactataatttattattatatcttccagataatgttattcatttagaacaaataaggtatattttttagaatcaactttgtaagcactataaaatctttaataagttataaggtctatgatgtgtttactttaaaaattgctgttaaaagcaacacgtattaaatatgtaattatcatctgggt

SEQ ID NO: 142998 - DNA, 574 bp, Homo sapiens
  Payload ID: 8244
  Gene Symbol: INSIG2
  Gene Name: insulin induced gene 2
  ENST ID: ENST00000411929
  CDS Start-End: 205-324
gcagtggagctcgggcggagttgtgggagtggaggaggaagaggcggtagggggtacgggggctggtcccagaagatggcggaggcggggctgtgattgggttattatacccctgcattgacagacatctaggagaaccacataaatttaaaagagagtggtccagtgtaatgcggtgtgtagcagtctttgttggtataaatcatgccagtgctaaagtggatttcgataacaacatacagttgtctctcacactggctgcactatccattggactgtggtggacttttgatagatctagaagtggttttggccttggagtaggaattgccttcttggcaactgtggtcactcaactgctagtatataatggtgtttaccaatatacatctccagatttcctctatgttcgttcttggttaccatgtatattttttgctggaggcataacaatgggaaacattggtcgacaactggcaatgtacgaatgtaaagttatcgcagaaaaatctcatcaggaatgaagaaggcaaaaaatatcttttgtacagaaaagcaagatgaaaaggatgtg

SEQ ID NO: 142999 - DNA, 1347 bp, Homo sapiens
  Payload ID: 8244
  Gene Symbol: INSIG2
  Gene Name: insulin induced gene 2
  ENST ID: ENST00000614681
  CDS Start-End: 140-856
ggatttctggtaggtcctactttaggacaagatgtggtaccgttgaagcgtcagtctttgattcacagacagttgagcttttcagctgggaagcctttccatttttttttttttaacggctttctgaacctatgaaaccatggcagaaggagagacagagtcacctgggcccaaaaagtgtggcccatatatttcatctgtcactagccagagtgtgaacttgatgattcgaggagtagtgctattttttattggagtatttcttgcattagtgttaaatttacttcagattcagagaaatgtgacgctctttccacctgatgtgattgcaagcatcttttcttctgcatggtgggtacccccatgctgtggcacggcttcagctgtgattgggttattatacccctgcattgacagacatctaggagaaccacataaatttaaaagagagtggtccagtgtaatgcggtgtgtagcagtctttgttggtataaatcatgccagtgctaaagtggatttcgataacaacatacagttgtctctcacactggctgcactatccattggactgtggtggacttttgatagatctagaagtggttttggccttggagtaggaattgccttcttggcaactgtggtcactcaactgctagtatataatggtgtttaccaatatacatctccagatttcctctatgttcgttcttggttaccatgtatattttttgctggaggcataacaatgggaaacattggtcgacaactggcaatgtacgaatgtaaagttatcgcagaaaatctcatcaggaatgaagaaggcaaaaaatatcttttgtacagaaaagcaagatgaaaaggatgtgaaatggtagatataccaacaaaacttcagactgtaaaattgccaggatgcagttttccccttgattggcgtgtgtgtatatatggataaatatatatatacacacacacatattactgcaatctgtgattgcttcatctgtaaatcagttgtaaacctttacatatttgacttaaataactgtaagatatatatgtactacattaaaaagtgttgattaatagatgaaatttttaaattaattttttaaaacatgccatacattgtatcacaatgttaatgtgccaagatattgttcctgtcatgcagagtataagaatgctttgaacaatttgtagacttagtgaaataaaataagaggaaagccaaaaacaaacaaacaaaaagcatatggggagctggtattttctctttagcttactgttgtgcctttttatttttctaatcacagcagtatgagttatgagtgccctaatttgtgg

SEQ ID NO: 143000 - DNA, 4721 bp, Homo sapiens
  Payload ID: 8245
  Gene Symbol: INSR
  Gene Name: insulin receptor
  Uniprot ID: P06213
  ENST ID: ENST00000302850
  CDS Start-End: 144-4292
ggggggctgcggcccgcgggtcgcgggcgtggaagagaaggacgcgcggcccccagcgcctcttgggtggccgcctcggagcatgacccccgcgggccagcgccgcgcgctctgatccgaggagaccccgcgctcccgcagccatggccaccgggggccggcggggggcggcggccgcgccgctgctggtggcggtggccgcgctgctactgggcgccgcgggccacctgtaccccggagaggtgtgtcccggcatggatatccggaacaacctcactaggttgcatgagctggagaattgctctgtcatcgaaggacacttgcagatactcttgatgttcaaaacgaggcccgaagatttccgagacctcagtttccccaaactcatcatgatcactgattacttgctgctcttccgggtctatgggctcgagagcctgaaggacctgttccccaacctcacggtcatccggggatcacgactgttctttaactacgcgctggtcatcttcgagatggttcacctcaaggaactcggcctctacaacctgatgaacatcacccggggttctgtccgcatcgagaagaacaatgagctctgttacttggccactatcgactggtcccgtatcctggattccgtggaggataattacatcgtgttgaacaaagatgacaacgaggagtgtggagacatctgtccgggtaccgcgaagggcaagaccaactgccccgccaccgtcatcaacgggcagtttgtcgaacgatgttggactcatagtcactgccagaaagtttgcccgaccatctgtaagtcacacggctgcaccgccgaaggcctctgttgccacagcgagtgcctgggcaactgttctcagcccgacgaccccaccaagtgcgtggcctgccgcaacttctacctggacggcaggtgtgtggagacctgcccgcccccgtactaccacttccaggactggcgctgtgtgaacttcagcttctgccaggacctgcaccacaaatgcaagaactcgcggaggcagggctgccaccagtacgtcattcacaacaacaagtgcatccctgagtgtccctccgggtacacgatgaattccagcaacttgctgtgcaccccatgcctgggtccctgtcccaaggtgtgccacctcctagaaggcgagaagaccatcgactcggtgacgtctgcccaggagctccgaggatgcaccgtcatcaacgggagtctgatcatcaacattcgaggaggcaacaatctggcagctgagctagaagccaacctcggcctcattgaagaaatttcagggtatctaaaaatccgccgatcctacgctctggtgtcactttccttcttccggaagttacgtctgattcgaggagagaccttggaaattgggaactactccttctatgccttggacaaccagaacctaaggcagctctgggactggagcaaacacaacctcaccatcactcaggggaaactcttcttccactataaccccaaactctgcttgtcagaaatccacaagatggaagaagtttcaggaaccaaggggcgccaggagagaaacgacattgccctgaagaccaatggggaccaggcatcctgtgaaaatgagttacttaaattttcttacattcggacatcttttgacaagatcttgctgagatgggagccgtactggccccccgacttccgagacctcttggggttcatgctgttctacaaagaggccccttatcagaatgtgacggagttcgacgggcaggatgcgtgtggttccaacagttggacggtggtagacattgacccacccctgaggtccaacgaccccaaatcacagaaccacccagggtggctgatgcggggtctcaagccctggacccagtatgccatctttgtgaagaccctggtcaccttttcggatgaacgccggacctatggggccaagagtgacatcatttatgtccagacagatgccaccaacccctctgtgcccctggatccaatctcagtgtctaactcatcatcccagattattctgaagtggaaaccaccctccgaccccaatggcaacatcacccactacctggttttctgggagaggcaggcggaagacagtgagctgttcgagctggattattgcctcaaagggctgaagctgccctcgaggacctggtctccaccattcgagtctgaagattctcagaagcacaaccagagtgagtatgaggattcggccggcgaatgctgctcctgtccaaagacagactctcagatcctgaaggagctggaggagtcctcgtttaggaagacgtttgaggattacctgcacaacgtggttttcgtccccagaaaaacctcttcaggcactggtgccgaggaccctaggccatctcggaaacgcaggtcccttggcgatgttgggaatgtgacggtggccgtgcccacggtggcagctttccccaacacttcctcgaccagcgtgcccacgagtccggaggagcacaggccttttgagaaggtggtgaacaaggagtcgctggtcatctccggcttgcgacacttcacgggctatcgcatcgagctgcaggcttgcaaccaggacacccctgaggaacggtgcagtgtggcagcctacgtcagtgcgaggaccatgcctgaagccaaggctgatgacattgttggccctgtgacgcatgaaatctttgagaacaacgtcgtccacttgatgtggcaggagccgaaggagcccaatggtctgatcgtgctgtatgaagtgagttatcggcgatatggtgatgaggagctgcatctctgcgtctcccgcaagcacttcgctctggaacggggctgcaggctgcgtgggctgtcaccggggaactacagcgtgcgaatccgggccacctcccttgcgggcaacggctcttggacggaacccacctatttctacgtgacagactatttagacgtcccgtcaaatattgcaaaaattatcatcggccccctcatctttgtctttctcttcagtgttgtgattggaagtatttatctattcctgagaaagaggcagccagatgggccgctgggaccgctttacgcttcttcaaaccctgagtatctcagtgccagtgatgtgtttccatgctctgtgtacgtgccggacgagtgggaggtgtctcgagagaagatcaccctccttcgagagctggggcagggctccttcggcatggtgtatgagggcaatgccagggacatcatcaagggtgaggcagagacccgcgtggcggtgaagacggtcaacgagtcagccagtctccgagagcggattgagttcctcaatgaggcctcggtcatgaagggcttcacctgccatcacgtggtgcgcctcctgggagtggtgtccaagggccagcccacgctggtggtgatggagctgatggctcacggagacctgaagagctacctccgttctctgcggccagaggctgagaataatcctggccgccctccccctacccttcaagagatgattcagatggcggcagagattgctgacgggatggcctacctgaacgccaagaagtttgtgcatcgggacctggcagcgagaaactgcatggtcgcccatgattttactgtcaaaattggagactttggaatgaccagagacatctatgaaacggattactaccggaaagggggcaagggtctgctccctgtacggtggatggcaccggagtccctgaaggatggggtcttcaccacttcttctgacatgtggtcctttggcgtggtcctttgggaaatcaccagcttggcagaacagccttaccaaggcctgtctaatgaacaggtgttgaaatttgtcatggatggagggtatctggatcaacccgacaactgtccagagagagtcactgacctcatgcgcatgtgctggcaattcaaccccaagatgaggccaaccttcctggagattgtcaacctgctcaaggacgacctgcaccccagctttccagaggtgtcgttcttccacagcgaggagaacaaggctcccgagagtgaggagctggagatggagtttgaggacatggagaatgtgcccctggaccgttcctcgcactgtcagagggaggaggcggggggccgggatggagggtcctcgctgggtttcaagcggagctacgaggaacacatcccttacacacacatgaacggaggcaagaaaaacgggcggattctgaccttgcctcggtccaatccttcctaacagtgcctaccgtggcgggggcgggcaggggttcccattttcgctttcctctggtttgaaagcctctggaaaactcaggattctcacgactctaccatgtccaatggagttcagagatcgttcctatacatttctgttcatcttaaggtggactcgtttggttaccaatttaactagtcctgcagaggatttaactgtgaacctggagggcaaggggtttccacagttgctgctcctttggggcaacgacggtttcaaaccaggattttgtgttttttcgttccccccacccgcccccagcagatggaaagaaagcacctgtttttacaaattctttttttttttttttttttttgctggtgtctgagcttcagtataaaagacaaaacttcctgtttgtggaacaaaagttcgaaagaaaaaacaaaa

SEQ ID NO: 143001 - DNA, 8954 bp, Homo sapiens
  Payload ID: 8245
  Gene Symbol: INSR
  Gene Name: insulin receptor
  Uniprot ID: P06213
  ENST ID: ENST00000341500
  CDS Start-End: 41-4153
cgcgcgctctgatccgaggagaccccgcgctcccgcagccatggccaccgggggccggcggggggcggcggccgcgccgctgctggtggcggtggccgcgctgctactgggcgccgcgggccacctgtaccccggagaggtgtgtcccggcatggatatccggaacaacctcactaggttgcatgagctggagaattgctctgtcatcgaaggacacttgcagatactcttgatgttcaaaacgaggcccgaagatttccgagacctcagtttccccaaactcatcatgatcactgattacttgctgctcttccgggtctatgggctcgagagcctgaaggacctgttccccaacctcacggtcatccggggatcacgactgttctttaactacgcgctggtcatcttcgagatggttcacctcaaggaactcggcctctacaacctgatgaacatcacccggggttctgtccgcatcgagaagaacaatgagctctgttacttggccactatcgactggtcccgtatcctggattccgtggaggataattacatcgtgttgaacaaagatgacaacgaggagtgtggagacatctgtccgggtaccgcgaagggcaagaccaactgccccgccaccgtcatcaacgggcagtttgtcgaacgatgttggactcatagtcactgccagaaagtttgcccgaccatctgtaagtcacacggctgcaccgccgaaggcctctgttgccacagcgagtgcctgggcaactgttctcagcccgacgaccccaccaagtgcgtggcctgccgcaacttctacctggacggcaggtgtgtggagacctgcccgcccccgtactaccacttccaggactggcgctgtgtgaacttcagcttctgccaggacctgcaccacaaatgcaagaactcgcggaggcagggctgccaccagtacgtcattcacaacaacaagtgcatccctgagtgtccctccgggtacacgatgaattccagcaacttgctgtgcaccccatgcctgggtccctgtcccaaggtgtgccacctcctagaaggcgagaagaccatcgactcggtgacgtctgcccaggagctccgaggatgcaccgtcatcaacgggagtctgatcatcaacattcgaggaggcaacaatctggcagctgagctagaagccaacctcggcctcattgaagaaatttcagggtatctaaaaatccgccgatcctacgctctggtgtcactttccttcttccggaagttacgtctgattcgaggagagaccttggaaattgggaactactccttctatgccttggacaaccagaacctaaggcagctctgggactggagcaaacacaacctcaccatcactcaggggaaactcttcttccactataaccccaaactctgcttgtcagaaatccacaagatggaagaagtttcaggaaccaaggggcgccaggagagaaacgacattgccctgaagaccaatggggaccaggcatcctgtgaaaatgagttacttaaattttcttacattcggacatcttttgacaagatcttgctgagatgggagccgtactggccccccgacttccgagacctcttggggttcatgctgttctacaaagaggccccttatcagaatgtgacggagttcgacgggcaggatgcgtgtggttccaacagttggacggtggtagacattgacccacccctgaggtccaacgaccccaaatcacagaaccacccagggtggctgatgcggggtctcaagccctggacccagtatgccatctttgtgaagaccctggtcaccttttcggatgaacgccggacctatggggccaagagtgacatcatttatgtccagacagatgccaccaacccctctgtgcccctggatccaatctcagtgtctaactcatcatcccagattattctgaagtggaaaccaccctccgaccccaatggcaacatcacccactacctggttttctgggagaggcaggcggaagacagtgagctgttcgagctggattattgcctcaaagggctgaagctgccctcgaggacctggtctccaccattcgagtctgaagattctcagaagcacaaccagagtgagtatgaggattcggccggcgaatgctgctcctgtccaaagacagactctcagatcctgaaggagctggaggagtcctcgtttaggaagacgtttgaggattacctgcacaacgtggttttcgtccccaggccatctcggaaacgcaggtcccttggcgatgttgggaatgtgacggtggccgtgcccacggtggcagctttccccaacacttcctcgaccagcgtgcccacgagtccggaggagcacaggccttttgagaaggtggtgaacaaggagtcgctggtcatctccggcttgcgacacttcacgggctatcgcatcgagctgcaggcttgcaaccaggacacccctgaggaacggtgcagtgtggcagcctacgtcagtgcgaggaccatgcctgaagccaaggctgatgacattgttggccctgtgacgcatgaaatctttgagaacaacgtcgtccacttgatgtggcaggagccgaaggagcccaatggtctgatcgtgctgtatgaagtgagttatcggcgatatggtgatgaggagctgcatctctgcgtctcccgcaagcacttcgctctggaacggggctgcaggctgcgtgggctgtcaccggggaactacagcgtgcgaatccgggccacctcccttgcgggcaacggctcttggacggaacccacctatttctacgtgacagactatttagacgtcccgtcaaatattgcaaaaattatcatcggccccctcatctttgtctttctcttcagtgttgtgattggaagtatttatctattcctgagaaagaggcagccagatgggccgctgggaccgctttacgcttcttcaaaccctgagtatctcagtgccagtgatgtgtttccatgctctgtgtacgtgccggacgagtgggaggtgtctcgagagaagatcaccctccttcgagagctggggcagggctccttcggcatggtgtatgagggcaatgccagggacatcatcaagggtgaggcagagacccgcgtggcggtgaagacggtcaacgagtcagccagtctccgagagcggattgagttcctcaatgaggcctcggtcatgaagggcttcacctgccatcacgtggtgcgcctcctgggagtggtgtccaagggccagcccacgctggtggtgatggagctgatggctcacggagacctgaagagctacctccgttctctgcggccagaggctgagaataatcctggccgccctccccctacccttcaagagatgattcagatggcggcagagattgctgacgggatggcctacctgaacgccaagaagtttgtgcatcgggacctggcagcgagaaactgcatggtcgcccatgattttactgtcaaaattggagactttggaatgaccagagacatctatgaaacggattactaccggaaagggggcaagggtctgctccctgtacggtggatggcaccggagtccctgaaggatggggtcttcaccacttcttctgacatgtggtcctttggcgtggtcctttgggaaatcaccagcttggcagaacagccttaccaaggcctgtctaatgaacaggtgttgaaatttgtcatggatggagggtatctggatcaacccgacaactgtccagagagagtcactgacctcatgcgcatgtgctggcaattcaaccccaagatgaggccaaccttcctggagattgtcaacctgctcaaggacgacctgcaccccagctttccagaggtgtcgttcttccacagcgaggagaacaaggctcccgagagtgaggagctggagatggagtttgaggacatggagaatgtgcccctggaccgttcctcgcactgtcagagggaggaggcggggggccgggatggagggtcctcgctgggtttcaagcggagctacgaggaacacatcccttacacacacatgaacggaggcaagaaaaacgggcggattctgaccttgcctcggtccaatccttcctaacagtgcctaccgtggcgggggcgggcaggggttcccattttcgctttcctctggtttgaaagcctctggaaaactcaggattctcacgactctaccatgtccaatggagttcagagatcgttcctatacatttctgttcatcttaaggtggactcgtttggttaccaatttaactagtcctgcagaggatttaactgtgaacctggagggcaaggggtttccacagttgctgctcctttggggcaacgacggtttcaaaccaggattttgtgttttttcgttccccccacccgcccccagcagatggaaagaaagcacctgtttttacaaattctttttttttttttttttttttgctggtgtctgagcttcagtataaaagacaaaacttcctgtttgtggaacaaaagttcgaaagaaaaaacaaaacaaaaacacccagccctgttccaggagaatttcaagttttacaggttgagcttcaagatggtttttttggttttttttttttctctcatccaggctgaaggattttttttttctttacaaaatgagttcctcaaattgaccaatagctgctgctttcatattttggataagggtctgtggtcccggcgtgtgctcacgtgtgtatgcacgtgtgtgtgtccattagacacggctgatgtgtgtgcaaagtatccatgcggagttgatgctttgggaattggctcatgaaggttcttctcaagggtgcgagctcatccccctctctccttccttcttattgactgggagactgtgctctcgacagattcttcttgtgtcagaagtctagcctcaggtttctaccctcccttcacattggtggccaagggaggagcatttcatttggagtgattatgaatcttttcaagaccaaaccaagctaggacattaaaaaaaaaaaaagaaaaagaaagaaaaaacaaaatggaaaaaggaaaaaaaaaaagaactgagatgacagagttttgagaatatatttgtaccatatttaatttttaaagtctctggtattagcctcataagttattgactattccccggggttggcggggagtggggacatgagttggtctgcctgttgtggggccgggaaggggagggagtcaggcacaagtggcctctttgtttggtcttaaaggcatccatttctgggaatgaagccatgttcgctgctaacacttttggatgttgtgaggccacgtggagtgtgtgagagactaggttttatggatggtctggttcaggtaccaggtctgctggaaggttcctgttcggataagctggtagctacctagctctgagcctgccttcaagaacacctgtgttcatcctctgattctctgtgtgtacctcttgtggcgtttcctctcccgggtgtgaacatcctaaccgttattgtgcaaacccaagaacgtcagatcccaaagcacaacaacctggatggactttgggaacatctaagcaatgtaagagagaggtgcactgagagtacgtcttggtcccctccaccctgagagcatctgacggtcctcagtactgaactcccggaagctgctctgagcccggtgacctcatctgggccaggtgtggtgcctgagctgaatgctcaggtgcttacagtgttgcaatccctaagagagtagagtctggaggagaaaccgtgaaaaagaccttacacaccaccaagaacttccgaatgggcgtgaatccaccgtttcttctctttgcaaaaagaaccaccacagctgctcaaagaacacagtgaactcatcactttggttcatcaaaaaatcatcgcccatgcgttattcctgagtgcattttcttacaactttttgactgcttccttttcttcttctcttaagagttgtgggcttaagaatgggatagagtcataatggcaacctccaagccctctcaattcttgattaagaacacaggtagacatgaatcccaattgtctattgctatcttatttatatgattcgggaaaatacagcatgtaaaaatattgctgaggagcctcagtgattgggtacaagaagcaagagtacagaaattatttttgccaaatttattttgtaaatatgagggtctgtacctaaatttaaaaaaaaaacacgtagaactaggtattttgttctcttcttagtaaatttgtagtggttgtatactacactagctgcaattttcacatttttctaattcagaaaggtttttcttatattaggggaaaaagtatttattttaatatataaaatcactctgaaaatcactctcataaaaaatggagcgcatgtaaatttttatcaaagaaaaataaacaggtgaatgggggatagtgattttcttttttcagcacagtctacctcagtgtattgttaagatgtgattcaatcatggacatctttgagatttcagaattctacctggaaccggtctgaatcagggaacgtgtgtatcagctgattcgaatgccagggaccagtaagaattttgagggagggagttgggatggagaaggtatggcctttatgcgagcatagatccttttcttcctggctggtaatattcttctctgaatttaatcttcctttaaaaaaaaatcctccatctattgtcactatgttccccaaacataaactaagttccaggctgtcatgatgtatctgatatatggggtaacccagcaaggtgtaccttcctttggtgagagatggctgccggggcaaagacgggctttgattcagagcaagcattcccacctgttccatggaatccccctgaagtgagcacaaaggtgccctgggctccctgatggtttatgcccactcctttcaggctggtgatgcaccttacacacaaacacctaatgcaatgtctttttaaattctccaagtgggatgggagcatgtgagggaaattccaatccaaaacccattaatgtgctgaacgctttttttttttttttttttttttttgcaacaacaccttggacctctgtgttggggtttgactgacctcaagctgatattattggaccttgtgcagctttgataacccatgtgagagtctaggcaggaccagtggggcccaaatcttgctgctcttgtacttttaggcactgcccttgcagactcacctttctccacctgccctggagaaaggtagggtgtgctgggcctgccccttgcaaatgggattcaccagtttcatttatttgactctactgccacagtgaaaagagcaaacagctattgggttgcaaacctcctttgacattaggaaatgttgactttgtaacaataaaactttggtcctagaaagacacggttgtcctgggagtttgtagtgttaagttgcaacaacaacaacaaaaagcaacaaaaccagcttaggataacactttttgttgcttgttcttaaagatgtctcactatgattaaaacccttttcattaatgtagtgaaagccacacaggagttccttcttccaggaggagaataccaagcacatcactttctctctgcatcagtgatgtcaaatacgcatcagaaaatgttcaggttttaggagctgtcctaggtgctgtttcatcattggaagcagtgagaaagagaagcactgctgcttgtctggatataggctgaggatgattgagagaagctgtgggaactgacacaagggtctgcataggtcatcctgtgaccctggggactatgttaccaactgacagacagatctttcactgtatcctagcagggcaggtagtccaccaagaaatgtgcttattggattgggaggtgtttatttgtagtctgctgtaacacgtgtgaaagagcaggagcgtcatcagcatatgacttgcgctggtcatccggtaaatggatgtgctgtagtcccagtgctaatcatttctctccttcacagtgggtggaagtttagggttaaatgtcctttgaatgtcacctggtgagtccttgacaccttaggctcttcagaaacaatggttttgttgaggatggggaacagggaatgccgattttatatacatggtacacagagaggggtgtcacttcagaaaatcttccagcatgttcttcagaatattaatttatatgcgaggtgaggttgggaatgaaaagaacaggtcagcacttttttttttcctagaacatacaaaagaacatggtggactttcagggagtgcaatggaaggtgaatatttccttaagggtccccgagaaatgggagtgaggggaggggacacaatggctttttgagcttacttttaccttctgatactagtcaaggtccagaaccagccaccagccaaatttctatctgggtgcgggccactgaaaatccttgttaaaaaccagatcacaaatctggggctcttggtcccattggagaaggaaggaagagcctcaaaataagtgtgcacccatgcacatattcaggaacagcttgtttagtctttacactttgcctgaaagttgcttctcctcgtccctttgtgtgcctgggtggcctcggccctgtgcgttggcaacgcaggatcaaatgtgctgcagcttttgcagaaaacaactcagaaacacaaaaccccccaacagctcaattattattttttcaatgttttcctacaagagccaagtagcaccatgtacagaagacgcctttttttttggaatattgaaatcgttctgcatgtaaaatatgggataatgacctgtttatattaaaattctgattaaattatctgagaata

SEQ ID NO: 143002 - DNA, 653 bp, Homo sapiens
  Payload ID: 8245
  Gene Symbol: INSR
  Gene Name: insulin receptor
  ENST ID: ENST00000600492
  CDS Start-End: 1-459
tacaaagaggccccttatcagaatgtgacggagttcgacgggcaggatgcgtgtggttccaacagttggacggtggtagacattgacccacccctgaggtccaacgaccccaaatcacagaaccacccagggtggctgatgcggggtctcaagccctggacccagtatgccatctttgtgaagaccctggtcaccttttcggatgaacgccggacctatggggccaagagtgacatcatttatgtccagacagatgccaccaacccctctgtgcccctggatccaatctcagtgtctaactcatcatcccagattattctgaagtggaaaccaccctccgaccccaatggcaacatcacccactacctggttttctgggagaggcaggcggaagacagtgagctgttcgagctggattattgcctcaaagggcgagtccagtcatcagctccgctgtaagctgttggccctgcattcaagtaaccagaaccacccgtgagagctgccaccagtaatgtcactcgaagcttccttttttttttttttaattccgaaagtctaaatctgtaattaccaagggaccatttaaacatggttttatttgtaattgtcacaaagttaatatcattaaaaggaaactcactaaggacaaa

SEQ ID NO: 143003 - DNA, 9705 bp, Homo sapiens
  Payload ID: 8246
  Gene Symbol: IRS1
  Gene Name: insulin receptor substrate 1
  Uniprot ID: P35568
  ENST ID: ENST00000305123
  CDS Start-End: 1022-4750
cggcggcgcggtcggagggggccggcgcgcagagccagacgccgccgcttgttttggttggggctctcggcaactctccgaggaggaggaggaggagggaggaggggagaagtaactgcagcggcagcgcctcccgaggaacaggcgtcttccccgaacccttcccaaacctcccccatcccctctcgcccttgtcccctcccctcctccccagccgcctggagcgaggggcagggatgagtctgtccctccggccggtccccagctgcagtggctgcccggtatcgtttcgcatggaaaagccactttctccacccgccgagatgggcccggatgggggctgcagaggacgcgcccgcgggcggcggcagcagcagcagcagcagcagcagcaacagcaacagccgcagcgccgcggtctctgcgactgagctggtatttgggcggctggtggcggctgggacggttggggggtgggaggaggcgaaggaggagggagaaccccgtgcaacgttgggacttggcaacccgcctccccctgcccaaggatatttaatttgcctcgggaatcgctgcttccagaggggaactcaggagggaaggcgcgcgcgcgcgcgcgctcctggaggggcaccgcagggacccccgactgtcgcctccctgtgccggactccagccggggcgacgagagatgcatcttcgctccttcctggtggcggcggcggctgagaggagacttggctctcggaggatcggggctgccctcaccccggacgcactgcctccccgccgggcgtgaagcgcccgaaaactccggtcgggctctctcctgggctcagcagctgcgtcctccttcagctgcccctccccggcgcggggggcggcgtggatttcagagtcggggtttctgctgcctccagccctgtttgcatgtgccgggccgcggcgaggagcctccgccccccacccggttgtttttcggagcctccctctgctcagcgttggtggtggcggtggcagcatggcgagccctccggagagcgatggcttctcggacgtgcgcaaggtgggctacctgcgcaaacccaagagcatgcacaaacgcttcttcgtactgcgcgcggccagcgaggctgggggcccggcgcgcctcgagtactacgagaacgagaagaagtggcggcacaagtcgagcgcccccaaacgctcgatcccccttgagagctgcttcaacatcaacaagcgggctgactccaagaacaagcacctggtggctctctacacccgggacgagcactttgccatcgcggcggacagcgaggccgagcaagacagctggtaccaggctctcctacagctgcacaaccgtgctaagggccaccacgacggagctgcggccctcggggcgggaggtggtgggggcagctgcagcggcagctccggccttggtgaggctggggaggacttgagctacggtgacgtgcccccaggacccgcattcaaagaggtctggcaagtgatcctgaagcccaagggcctgggtcagacaaagaacctgattggtatctaccgcctttgcctgaccagcaagaccatcagcttcgtgaagctgaactcggaggcagcggccgtggtgctgcagctgatgaacatcaggcgctgtggccactcggaaaacttcttcttcatcgaggtgggccgttctgccgtgacggggcccggggagttctggatgcaggtggatgactctgtggtggcccagaacatgcacgagaccatcctggaggccatgcgggccatgagtgatgagttccgccctcgcagcaagagccagtcctcgtccaactgctctaaccccatcagcgtccccctgcgccggcaccatctcaacaatcccccgcccagccaggtggggctgacccgccgatcacgcactgagagcatcaccgccacctccccggccagcatggtgggcgggaagccaggctccttccgtgtccgcgcctccagtgacggcgaaggcaccatgtcccgcccagcctcggtggacggcagccctgtgagtcccagcaccaacagaacccacgcccaccggcatcggggcagcgcccggctgcaccccccgctcaaccacagccgctccatccccatgccggcttcccgctgctcgccttcggccaccagcccggtcagtctgtcgtccagtagcaccagtggccatggctccacctcggattgtctcttcccacggcgatctagtgcttcggtgtctggttcccccagcgatggcggtttcatctcctcggatgagtatggctccagtccctgcgatttccggagttccttccgcagtgtcactccggattccctgggccacaccccaccagcccgcggtgaggaggagctaagcaactatatctgcatgggtggcaaggggccctccaccctgaccgcccccaacggtcactacattttgtctcggggtggcaatggccaccgctgcaccccaggaacaggcttgggcacgagtccagccttggctggggatgaagcagccagtgctgcagatctggataatcggttccgaaagagaactcactcggcaggcacatcccctaccattacccaccagaagaccccgtcccagtcctcagtggcttccattgaggagtacacagagatgatgcctgcctacccaccaggaggtggcagtggaggccgactgccgggacacaggcactccgccttcgtgcccacccgctcctacccagaggagggtctggaaatgcaccccttggagcgtcggggggggcaccaccgcccagacagctccaccctccacacggatgatggctacatgcccatgtccccaggggtggccccagtgcccagtggccgaaagggcagtggagactatatgcccatgagccccaagagcgtatctgccccacagcagatcatcaatcccatcagacgccatccccagagagtggaccccaatggctacatgatgatgtcccccagcggtggctgctctcctgacattggaggtggccccagcagcagcagcagcagcagcaacgccgtcccttccgggaccagctatggaaagctgtggacaaacggggtagggggccaccactctcatgtcttgcctcaccccaaacccccagtggagagcagcggtggtaagctcttaccttgcacaggtgactacatgaacatgtcaccagtgggggactccaacaccagcagcccctccgactgctactacggccctgaggacccccagcacaagccagtcctctcctactactcattgccaagatcctttaagcacacccagcgccccggggagccggaggagggtgcccggcatcagcacctccgcctttccactagctctggtcgccttctctatgctgcaacagcagatgattcttcctcttccaccagcagcgacagcctgggtgggggatactgcggggctaggctggagcccagccttccacatccccaccatcaggttctgcagccccatctgcctcgaaaggtggacacagctgctcagaccaatagccgcctggcccggcccacgaggctgtccctgggggatcccaaggccagcaccttacctcgggcccgagagcagcagcagcagcagcagcccttgctgcaccctccagagcccaagagcccgggggaatatgtcaatattgaatttgggagtgatcagtctggctacttgtctggcccggtggctttccacagctcaccttctgtcaggtgtccatcccagctccagccagctcccagagaggaagagactggcactgaggagtacatgaagatggacctggggccgggccggagggcagcctggcaggagagcactggggtcgagatgggcagactgggccctgcacctcccggggctgctagcatttgcaggcctacccgggcagtgcccagcagccggggtgactacatgaccatgcagatgagttgtccccgtcagagctacgtggacacctcgccagctgcccctgtaagctatgctgacatgcgaacaggcattgctgcagaggaggtgagcctgcccagggccaccatggctgctgcctcctcatcctcagcagcctctgcttccccgactgggcctcaaggggcagcagagctggctgcccactcgtccctgctggggggcccacaaggacctgggggcatgagcgccttcacccgggtgaacctcagtcctaaccgcaaccagagtgccaaagtgatccgtgcagacccacaagggtgccggcggaggcatagctccgagactttctcctcaacacccagtgccacccgggtgggcaacacagtgccctttggagcgggggcagcagtagggggcggtggcggtagcagcagcagcagcgaggatgtgaaacgccacagctctgcttcctttgagaatgtgtggctgaggcctggggagcttgggggagcccccaaggagccagccaaactgtgtggggctgctgggggtttggagaatggtcttaactacatagacctggatttggtcaaggacttcaaacagtgccctcaggagtgcacccctgaaccgcagcctcccccacccccaccccctcatcaacccctgggcagcggtgagagcagctccacccgccgctcaagtgaggatttaagcgcctatgccagcatcagtttccagaagcagccagaggaccgtcagtagctcaactggacatcacagcagaatgaagacctaaatgacctcagcaaatcctcttctaactcatgggtacccagactctaaatatttcatgattcacaactaggacctcatatcttcctcatcagtagatggtacgatgcatccatttcagtttgtttactttatccaatcctcaggatttcattgactgaactgcacgttctatattgtgccaagcgaaaaaaaaaaatgcactgtgacaccagaataatgagtctgcataaacttcatcttcaaccttaaggacttagctggccacagtgagctgatgtgcccaccaccgtgtcatgagagaatgggtttactctcaatgcattttcaagatacatttcatctgctgctgaaactgtgtacgacaaagcatcattgtaaattatttcatacaaaactgttcacgttgggtggagagagtattaaatatttaacataggttttgatttatatgtgtaattttttaaatgaaaatgtaacttttcttacagcacatcttttttttggatgtgggatggaggtatacaatgttctgttgtaaagagtggagcaaatgcttaaaacaaggcttaaaagagtagaatagggtatgatccttgttttaagattgtaattcagaaaacataatataagaatcatagtgccatagatggttctcaattgtatagttatatttgctgatactatctcttgtcatataaacctgatgttgagctgagttccttataagaattaatcttaattttgtattttttcctgtaagacaataggccatgttaattaaactgaagaaggatatatttggctgggtgttttcaaatgtcagcttaaaattggtaattgaatggaagcaaaattataagaagaggaaattaaagtcttccattgcatgtattgtaaacagaaggagatgggtgattccttcaattcaaaagctctctttggaatgaacaatgtgggcgtttgtaaattctggaaatgtctttctattcataataaactagatactgttgatcttttcttctgtcccctccccccaccacttctgtaagtttcctgctctattcccaccatttttttctgtgcacacattatgatatatttcatttcctgcattgtcttgagaaagatggtaaggcaagtgagctgttgctaaccagaaattaaaattccagtaagtgtttttcattatgaccagggctatgtgtcaccttccctaagactcttaccttatctcatattttttgagaacttccagtgttacattatttaactgaatgtaattggcccatttgccttggtgggtgctggcctattagtgattagttaacaaaacacagcgtacagagagcacagaaaagcttaatgacctgctactgaaacacctagccagcagtgaaaatgttaattcttttcttgtttggaaagtatacacgtcttggaattttttccacgtgaaaaacaaatggcaatgaatgcatttaaagatattgccgacagatttttaaatctttttaccaggaaacttcctaaaggttaaatgaattaatgcaaatatcaggctccctctgagtctgtgggagcctctatctctctatcaggaattcgcatccctactattgggaggagcaacattttatttctctgaacgcctaagctccctgggtgggagtggggactacaaggtaggggccagggttggagggcattgtagtggctgctgcctcctgatgaactgtttggggaccccagctctactcaaaagggagcggagataaatggaacccctcacactgctgaggcccgtgttactgttcattcagccaggtggcatgtacctcacagactgttgtgcagtgtccgttattgcagattttaatcatttgcatgctcatcaatttctaagataaatagggtctagagtcataagaatccattgttttcaaggaacttgcagaattacatcatttcctattagtagagagcactacccattttgaaaatctgatatgaaagttgttttttactcttgtaaaaaaagactttcttagtcaaactaacttttcatattttcaagcattctgattcatactcttgctagtggaagaagagagcaagctgccctgctcttttcctttgaggactgaaatagttaaagagaaatcaatgaacaaagtcactcccaaccattttcctgtaaagctggttattatttctcaaggaacctacactttgaatatgtgttaccgagatacctctacatgtggaattatcaacatgttttgaatgagagcagaaatgaacagactggaaaaatctatctcttggtttctatttctctgactttttgagtcgaaaagcataaaggtagaaattcttatttaagctgcttctagtggtgcctgagctggttttgatggtggcatcaaactaccgatttaaaactggaagttgctggtactcaaaccaaaagttcatactctggcgacacgaagggtttcctttgagcaacgtcagctgctgagtccttgtgttcagttcccattgaggagagttggcttttatccatttcaaagcatttgtaggccagccaagggctttcattattgaggcttctagtggcctctggttaacctagaagttagtgggtttttcttgatgacaccaacctctcacagcgtttttccttagagacttaagcagagttttaaaatcctcttttgcgaaaagaacaaatatgttttatgactttgatgatatcttcattctgggcaaaagaatggccctagaaccagctagaagtgaagagaatccattaatgatcaaccacctgagtcaataatgagaaatcagtactgatgttacatttgtggctatttcttgctgactttcaaaggtcaaggactcttgactaatccagtgactgcaaaaatggatctactaaaagtcatctagccagaagtagagatttttaacctttctttccctggcttttgtcttctagctatcatttaaatttgagacatttgaagtattaagaaacaatttttctgtatggtaagaaacagtattttacaatactgaagccctgttttattcaatcttgcatcttgaatacaatataccacaaagtcggaaactttatatttatttactgcaggtggttaaaaaaaggggggaaagggtttcaccatccactgacaacgagagccatgacaaatagtatccatgtgcagtcttccaactgctggtgacaatgaccccatatttggtctcatgctgcttttgcagagcactctgtaggttagtccatcacacaaggaggccctgaatccagacactgtgaattaagaccttggcggggagagatgtgacccttttggtaggaatgggaagaagaatgggtggaagccaatatgaaatttcttctttgcaatgacttgacaggggagttaatgttcctaggatgccatgaatgatgaatgttagttggaggtaatgctgtatatgtgtgtgtgtgtgtgtgtgtgtgtttgtgtgtgtgtatatatatgtgtgtgtgtatatatatgtgacatgtgtgtgtctttgtgtgtgtgtatatatatgtgacgtgtgtgtgggatgtgtgtgtgtatatatagatgaatatatacaaatatatagatatatacacacatatatagatatatatacacatatatagatatatatacacacatatatagatacacatatgtgtgtgtgtgtatatatatatatatatatatatagatgtataggcttgtgagaaacttgagaggaagaagcatgctcttctaggaatgtgaggaaatatgaccttgccaagactaaaagacctctagactgtgagctcagttatggagaacaaaaacagcttcatagtgagtagaacaccgaggataaacactggggccatgggtcctttctgaggcagcgccacagaagatctttgtggtccttccgtagttctgtaagtctgtctcctaagtatgggtagagaatatgtagcctgttgtgtgtctcccactacttgtaaacagagcatcacattaggggcagggaggaggtggaatgatattggaggtgcttaaccctactcgaggaattaattatgaataaagagcttataattagctaacatgactagaaaacacatgacttaggtggagagttagctttcttttctagtttgtgtatgacttgccatttgtgacgtatacaccaaaagatctggtgttttagacttctgccattcacttggcatttaaatctctctttgcttatgctgttaacgagtatgccataggataggacaaattcagtaaacaggaaaacttgtccatatttgcatagacatttgtagggttttttttttctttttctttttagaacttcaccattggcttaagaatgtagttcccaaaacaattttttcttgcaaagtactttccttacacctcttggctacagggtgggccaaattaaacatatatgtattttcatttaatgtatgtgcagtttggtttatcatcttaagatggtggtgctgccccggtgctacttcatctgtgtacacaaagaccaatgcatggtctgtattgctaccaaaacatttactgtatatatgtttataacatgtattatgtatatatgtaatgggtgccaggccaggtatatattttttatttagaagtgtttcacttttccaagttttctttatagtgttatgcttattttcaattttttttttcctgattctgtctggtacttagaattgtagtgtcttcatcatcaattaaagaaaactgtctaaatgaattcatggatgtaaatattagtggtccttaatgtctttgattgctggacatgaaacaaactgccaattaaattttgcggagaca

SEQ ID NO: 143004 - DNA, 8138 bp, Homo sapiens
  Payload ID: 8247
  Gene Symbol: IRS2
  Gene Name: insulin receptor substrate 2
  Uniprot ID: Q9Y4H2
  ENST ID: ENST00000375856
  CDS Start-End: 516-4532
gcggggaccgcgacgagcccgggtcgccgttggcagcagcagcagcaacaccagcagcagcagcagccccggcggcggcgcggaccccgagcgcccgggcgcaccccggcttcccggagcgcgacgcggcggcagcagccccggtgcggccgcgcgcgccttaggctcggccccgcggctcggggaccccgactcccggcccagcgagcgcgtcccccggcgccgcccgagagcccgaggaggcagcggccgcaggcagccggggaggggggcggccaccgcccgcgccgggcatcctcaggagccccagagcgcggagggcgcggcgccgccgagcggtgctggcccccgcgggcctccccggaccttccccaccgcctgggcccgagggacgcgtgatcgggcgggcggccgggcgcaagggtgggagggagccgcccccgcccgcgccccctccgcccctcgccccaacccctgggcgccgggcccgggccgcgcggcctgaagcgcccgcgatggcgagcccgccgcggcacgggccgcccgggccggcgagcggagacggccccaacctcaacaacaacaacaacaacaacaaccacagcgtgcgcaagtgcggctacctgcgcaagcagaagcatggccacaagcgcttcttcgtgctgcgcggacccggcgcgggcggcgacgaggcgacggcgggcggggggtcggcgccgcaaccgccgcggctcgagtactacgagagcgagaaaaagtggcggagcaaggcaggcgcgccgaaacgggtgatcgctctcgactgctgcctgaacatcaacaagcgcgccgacgccaagcacaagtacctgatcgccctctacaccaaggacgagtacttcgccgtggccgccgagaacgagcaggagcaggagggctggtaccgcgcgctcaccgacctggtcagcgagggccgcgcggccgccggagacgcgccccccgccgccgcgcccgccgcgtcctgcagcgcctccctgcccggcgccctgggcggctctgccggcgccgccggggccgaggacagctacgggctggtggctcccgccacggccgcctaccgtgaggtgtggcaggtgaacctgaagcccaagggtctgggccagagcaagaacctgacgggggtgtaccgtctgtgcctgtctgcgcgcaccatcggcttcgtgaagctcaactgcgagcagccgtcggtgacgctgcagctcatgaacatccgccgctgcggccactcggacagcttcttcttcatcgaggtgggccgctcggccgtcacaggccccggcgagctgtggatgcaggcggacgactcggtggtggcgcagaacatccacgagaccatcctggaggccatgaaggcgctcaaggagctcttcgagttccggccgcgcagtaagagccaatcgtcggggtcgtcggccacgcaccccatcagcgtccccggcgcgcgccgccaccaccacctggtcaacctgccccccagccagacgggcctggtgcgccgctcgcgcaccgacagcctggccgccaccccgccggcggccaagtgcagctcgtgccgggtgcgcaccgccagcgagggcgacggcggcgcggcggcgggagcggcggccgcgggcgccaggccggtgtcggtggctgggagccccctgagccccgggccggtgcgcgcgcccctgagccgctcgcacaccctgagcggcggctgcggcggccgcgggagcaaggtggcgctgctgccggcagggggcgcgctgcaacacagccgctccatgtccatgcccgtggcgcactcgccgcccgccgccaccagccccggctccctgtcgtccagcagcggccacggctcgggctcctacccgccgccgcccggcccgcacccgcctctgccgcatccgctgcaccacggccccggccagcggccctccagcggcagcgcctccgcctcgggctcccccagcgaccccggcttcatgtccctggacgagtacggctccagcccaggcgacctgcgcgccttctgcagccaccgaagcaacacgcccgagtccatcgcggagacgcccccggcccgagacggcggcggcggcggtgagttctacgggtacatgaccatggacaggcccctgagccactgtggccgctcctaccgccgggtctcgggggacgcggcccaggacctggaccgagggctgcgcaagaggacctactccctgaccacgccagcccggcagcggccggtgccccagccctcctctgcctcgctggatgaatacaccctgatgcgggccaccttctcgggcagcgcgggccgcctctgcccgtcctgccccgcgtcctctcccaaggtggcctaccacccctacccagaggactacggagacatcgagatcggctcccacaggagctccagcagcaacctgggggcagacgacggctacatgcccatgacgcccggcgcggccctcgcgggcagtgggagcggcagctgcaggagcgacgactacatgcccatgagccccgccagcgtgtccgcccccaagcagatcttgcagcccagggccgccgccgccgccgccgccgccgtgccttctgcggggcctgcggggccagcacccacctctgcggcgggcaggacattcccggcgagcgggggcggctacaaggccagctcgcccgccgagagctcccccgaggacagtgggtacatgcgcatgtggtgcggttccaagctgtccatggagcatgcagatggcaagctgctgcccaacggggactacctcaacgtgtcccccagcgacgcggtcaccacgggcaccccgcccgacttcttctccgcagccctgcaccccggcggggagccgctcaggggcgttcccggctgctgctacagctccttgccccgctcctacaaggccccctacacctgtggcggggacagcgaccagtacgtgctcatgagctcccccgtggggcgcatcctggaggaggagcgtctggagcctcaggccacgccagggcccagccaggcggccagcgccttcggggccggccccacgcagccccctcaccctgtagtgccttcgcccgtgcggcctagcggcggccgcccggagggcttcttgggccagcgcggccgggcggtgaggcccacgcgcctgtccctggaggggctgcccagcctgcccagcatgcacgagtacccactgccaccggagcccaagagccccggcgagtacatcaacatcgactttggcgagcccggggcccgcctgtcgccgcccgcgcctcccctgctggcgtcggcggcctcgtcctcctcgctcttgtccgccagcagcccggcctcgtcgctgggctcaggcaccccgggcaccagcagcgacagccggcagcggtctccgctctccgactacatgaacctcgacttcagctcccccaagtctcctaagccgggcgccccgagcggccaccccgtgggctccttggacggcctcctgtcccccgaggcctcctccccgtatccgccgttgcccccgcgtccgtccgcgtccccgtcgtcgtctctgcagccgccgccaccgccgccggccccgggggagctgtaccgcctgccccccgcctcggccgttgccaccgcccagggcccgggcgccgcctcatcgttgtcctcggacaccggggacaatggtgactacaccgagatggcttttggtgtggccgccaccccgccgcaacctatcgcggcccccccgaagccagaagctgcccgcgtggccagcccgacgtcgggcgtgaagaggctgagcctcatggagcaggtgtcgggagtcgaggccttcctgcaggccagccagcccccggacccccaccgcggcgccaaggtcatccgcgcagacccgcaggggggccgccgccgccacagttccgagaccttctcctccaccacgacggtcacccccgtgtccccgtccttcgcccacaaccccaagcgccacaactcggcctccgtggaaaatgtctctctcaggaaaagcagcgagggcggcgtgggtgtcggccctggagggggcgacgagccgcccacctccccacgacagttgcagccggcgccccctttggcaccgcagggccggccgtggaccccgggtcagcccgggggcttggtcggttgtcctgggagcggtggatcgcccatgcgcagagagacctctgccggcttccagaatggtctcaactacatcgccatcgacgtgagggaggagcccgggctgccaccccagccgcagccgccgccgccgccgcttcctcagccgggagacaagagctcctggggccggacccgaagcctcgggggtctcatcagcgctgtgggcgtcggcagcaccggcggcgggtgcggggggccgggtcccggtgccctgccccctgccaacacctacgccagcattgacttcttgtcccaccacttgaaggaggccaccatcgtgaaagagtgaagatctgtctggctttatcaccaggatgtcacatgtcagagagtatcattaaaagaagacgctcagcactgtttcagcccgaagctgcttgcagttttcttttggatctgagcaatgactgtgtttggaaacatctgtggactctgttagatgaggcaccaacaaggcaaggtcacctgcctctttcccttgttcccggatggggcattcatcattgtgctgtttgcgttttgttttgttttgttttaacaaaattagctgaagaagttattctcaagaaaattggatgttttcattggccttcttaaattgtggccagtgtcttttaatttcttcttcttttccttttggcaaagcagatataaccctcagcatgctaggagagtgcacccgtacctatggaagtggtaaaatctggtatttactggcttacactcaaaacgaccacagtcctacctcagttcaaggtaaagccggatttccgtggcgggggtcccacaggacctcctgtagtagcccctgcgctgtgtgtctggagcgcggtcctcggccttattgaaatggtccaagtagacagctgcttgttggattccagtgcaggtacctgcgatgtttacgtccacaccgagcccagtgtgggactgacatttctcaatggaagtgaaatttgggattggactttgaagacggattactaaataataattattatatgtaactgaagcaacctacttttgaaaatcaactgtattgggtagtgggaggtgggagggaagggctttgggaaggggatgaatatctctttttacctttaacagacttgtttaatcttctcgatgtagatgtttatgtaggtacttcacattgcaaacgccttttattctatttacaagctcagatgtctctgctctcctgaatcttgggcatgcctttctgtaaccaaaaatccctgtaggcgtgctagcaattccagggtggtccgggtttggcagatttgatttttaaaaaacgtattatctttaataaaatgttattatgtcaaccagtgaggctgccctgaacaaaaaaaacaaaaagaaaaaaaaaaaaggaaagaaagaaactgataaaaagaggcattccagcccctatgttattgatggaaaaagaaaaagaagaaaagcaatctcgcagtacatgttacttgtcgaaaaaattccggacaagactacccttgttttatgttttcagtattctgaaaataccagtgtgtggcagttctcgcagatgttacctaaaactgctgaacttgaccggcagaatgttctgccgttttctgctccctcgacacttgattggagggctgtcgacctctcctcccgtgggggcttccccagtgcctatcttctctgatagtcatggagaggttacactaattcattggagatgtaagttgttggttttgttttgttttgtttttagaaaaatatatataaatatataatagatatctatcgctatagaataatgcattaataaaatgaggcttttttagaggaagaccaaaaaattcaatgtcttaaaaatatatttaatggcaatgcaaaagtcttcctgcttccgtgctgaactttagaacagaggattgtattgcaagacaaagttgaatgtaaagtgatctccctgaacatttttaaggttttacttttctgaaattatacatcacagcagtgcataggccatataatgttagctggaaggtcaatttcagtgtatgatatactttattaagatgtataaaaatcctgaagtttttatttagttttgggaataggcatcaatgggtggtatttgctttgtaactccccccaggtacgatagggactgaatatggaccctgctgaaagcagtgtattgacgcatatttaactcgccctctatccgtagagtagtcatgacactatacagatggttcgtgttcatactgcagcttaaaacaagcaaaatacacagatgataatatgctaaattttcctctatcctgtacatttcacaaaaaggcatatgcaatatttacatttttaatttagtttacagaatggaaccaaaatgtataaatgttatgtttgctaaaacttcacaatgtatattgggtctttgtacattttgcctgacttaccttaaatttaaaatattttttgctatataaactttaacagttattaaacagtgttttctttttgggtacgtattgtttctggatatcaagatgttaaatatatttcttgctattgtgatatgacaagagacttaacttatcttgctctgtcttccactgtacacgctgtatataggggtcaatgtgatgctgctggagacgagaataaactggactagaatagtgcattgtatttagtctgtattgatcatggatgccctccttaatagccatatgcaataaaataaagtacattatttatgaaatgaatacagtcctgaagattttttctgtacgaattctctgtttaacataaagccaatctacttttagagtttgggagtaagtgaggaaatactaggctcctaaaaatacttggataccccttttaattttaaaacttttattctggaagccaaaaaatacctgccagataacaacatttatgaaaagtaaatgtgttatataacaaaacagaacattcgatgtactctacaaaacagagtccttatgacgtgctggatgccattctaaatacataacaaatattaacttcttgatagctcatgacaatcttaggaggtaagaattgtcatcctcattctacagaggaggagcccgaggtacaaaaatgctaagagacttgtgtgagagcacacagtccatgagtggtaaaaccaggaccgctccccagctctgcagtccagaatctgcttatgcacctctgcttagtgctcccttcctgatgtgcacacagaagatacaccaacgtgtacatcaagaatgctccctccatgacatgcacacagaagatgtaccaatgcatacattaagaatgcttcctccggccgggcgtggtggctcacacctgtaatcccagcactttgggaggctgaggcaggcagatcacctgaggtcaggagttcgagacaagcctgaccaacatggagaaaccccgtctctactaaaaatacaaaattagccaggcgtggtggcgcatgcctgtaatcccagctactcgggaggctgaggcaggagaatggcttgaacccgggaggcagaggttgccgtgagccaagataatgccattgcactccagcctgggcaacaagagcgaaactccgtctcaaaaaaaaaaaaaaaaaagaagaagaatgctgcctccatgacacaaacacagaagaagacataccgatgcatacatcaagaatacaaagaagaaaatcatcagatccaggaaaatgcaattcaggaagcagaaaatagaaaattgatgctgtgaatttttatccaggagagttttacctccttgcttgaaacatttgtccgtgcatccactttgccctaaaatgatagtcatgtaataatgtgtgtgttatcttttgaacaaataaaatcagtgcaatttg

SEQ ID NO: 143005 - DNA, 3928 bp, Homo sapiens
  Payload ID: 8248
  Gene Symbol: IRS4
  Gene Name: insulin receptor substrate 4
  Uniprot ID: O14654
  ENST ID: ENST00000372129
  CDS Start-End: 66-3839
ccccaaccctccctttcctgaattccccctcctcctcgctcaccttaaaaccatcgtgcatcaccatggcgagttgctccttcactcgcgaccaagcgacaagaagactaagaggtgcagcagcggcggcagcggcagctctagcagcagtggtgaccaccccgcttctttcctcgggaaccccgaccgcactcattgggaccgggtcgtcttgtccgggagccatgtggctctccacggccactggctcccggtcagactccgagtccgaagaggaggacctgcccgtcggggaggaagtctgcaaacgcggctacctgcggaaacagaagcatgggcacaggcgctacttcgtgctcaaactcgagactgctgacgccccagctcggctggaatactacgaaaatgccaggaagttccggcacagtgtccgcgccgcggcggctgcagcagcggcggccgcctctggcgccgcgatccccccgctcattccaccgcggcgcgtgatcaccctataccagtgcttttccgtgagccagcgagcagatgcaaggtaccgacacctcattgctcttttcacccaagacgaatacttcgcgatggtggccgagaacgagtcggagcaggaaagctggtacttgctgctcagccgcctcatcctcgagagcaagcgccgccgctgcggcacgctcggcgcgcagccggacggagagccggccgcgctggcggcggcagcggcggcggagccacccttctataaagatgtgtggcaggtaatagtcaaacccagggggctggggcacagaaaagagctgagcggcgtgttccggctgtgtctaaccgacgaggaggtcgtgtttgtgaggctgaacaccgaagtggccagcgtggtcgtccagctcctgagcatccgtcgctgtggacactcggagcagtatttcttcttggaagtaggcaggtccactgtcatcggtccgggagagctctggatgcaggtcgatgactgtgtggttgcccaaaacatgcatgagctgtttttggagaagatgagagccttgtgtgcagacgaatacagagcccgctgccgcagctacagcatcagcatcggcgcccacctgttaaccctgctgtccgctaggaggcacctgggcttggtgccgctcgagccgggaggctggctcagaaggtcccgctttgagcagttttgccacctcagggccatcggcgacggggaagacgagatgcttttcaccaggcgcttcgtaacacccagcgagcctgtggcccactccaggcgaggaagactgcacctgcccagagggcgcaggtcaaggagagcggtttcagtgccggccagcttttttcgccgcttagcacccagcccagcacgtccccggcaccctgcagaagccccgaacaatggagctcgcctgtcttctgaagtgtctggttctggctctggcaactttggggaggaaggcaatccccagggcaaagaagatcaggaaggaagcggaggtgactacatgcctatgaacaattggggctcaggaaatggccggggctcaggaggtggccagggctcaaatggccaaggctccagtagccatagctcgggaggaaaccagtgttcaggcgagggacagggatcccgaggtggtcagggctcaaatggccagggctcaggaggaaaccagtgctctagagatggccagggcaccgcaggtgggcacggttcaggtggtggccagagacctggaggtgggcatggctcaggtggtggccagggacctggagatggccatggctcaggtggtggcaagaactctggggggggcaaaggctcaggaagtgggaaaggatccgatggtgatggtgaacgtggaaaatctctgaagaaaagatcctattttggcaaattaactcaaagcaagcaacagcaaatgccaccacctccaccacctcctcctccacccccaccagctggaggaactggtggaaaagggaagtctgggggaagattcagactttatttttgtgttgacagaggagccacgaaagaatgcaaagaagccaaagaagtgaaagatgcagagatcccagaaggtgcagctcgaggtccccacagagccagagcttttgatgaagatgaggatgacccatacgtgccaatgaggccaggggtggccacccctcttgtaagctccagtgattatatgccaatggctcctcaaaatgtctctgcttcaaaaaagcgccactctcgatccccttttgaagattcaagagggtacatgatgatgtttcccagagtgagcccaccacctgctccgagtcctccaaaagcacctgatactaataaagaggatgactcaaaggacaatgacagtgagagtgactacatgtttatggctcctggagccggtgcaattccaaaaaaccccagaaatcctcagggtggctcttcctccaaaagttggagctcctacttctctctaccaaacccttttcggagctcacctttgggacagaatgacaacagtgagtatgtgccaatgttacctggaaagttcctggggaggggcctagacaaagaagtctcctataactgggaccccaaagatgcagcttcaaagccttcaggtgagggatcattctcaaagcctggagatgggggatcaccttcaaagccttcagatcatgagcccccaaagaataaagctaagagacctaaccgactttcttttattacaaaaggatataaaatcaagccaaaaccacaaaagcccacacatgagcagagagaagctgacagctctagtgactacgtcaacatggacttcactaaaagagagagcaatacaccagctccctctactcaaggactaccagattcgtggggcataattgctgaacccagacagtcagccttttctaattatgtgaatgttgagtttggagtgccatttccaaatccagcaaacgacctctcagatcttttaagagctataccacgtgccaaccccttatctctggacagtgctaggtggccacttcctccccttcccctcagtgctacaggtagcaatgctattgaggaagagggtgactacattgaagtaattttcaactcagcaatgacaccagccatggctcttgctgacagtgccattcgctatgatgctgaaacaggtcgaatctatgtggtcgacccattttctgagtgctgtatggatatttctctctcccccagccgatgttctgaaccaccacctgtagctaggctgctgcaggaagaagagcaggagagaagacgcccacaaagccgttctcaaagtttctttgcagcagccagagccgctgtctctgcttttccaacagacagcctcgagagagacctttccccatcctcagccccggctgtcgcttcggctgcagagccgactttagccctcagccaagttgtagctgcggcctccgcgctcgccgcagccccgggcatcggcgcagcagccgcagctgctggatttgactccgcctctgcccgctggtttcaacctgttgctaatgctgctgatgccgaagcagtaaggggagcccaagacgttgccggtggctcgaaccctggagcccacaacccatctgcaaaccttgccagaggtgataaccaggctggcggggctgccgctgcagctgccgctccggaaccaccacctcgcagtcgccgggtgccaagacccccggagagagaagattctgacaacgacgacgacactcacgtgagaatggattttgccagacgtgataatcagttcgactctcccaaaagaggtcggtaattttagaattaatttccctaaagtgaatggtcattgtctaatgattcgatgcgctacagtctacagtgttagggatactatttcattaa

SEQ ID NO: 143006 - DNA, 5101 bp, Homo sapiens
  Payload ID: 8249
  Gene Symbol: INSRR
  Gene Name: insulin receptor-related receptor
  Uniprot ID: P14616
  ENST ID: ENST00000368195
  CDS Start-End: 398-4291
cccccgctgccctccttgggagcggtccccagcctgctgctccgccctcagggttggctggcctctcggcctgccttttgctcagaaccctgtgtcattttctccctctggaggcccgagactctccctgtcactgtctgcatctctgtccccatctctcaatctcatgctgagtctctctgtctccaactgcctgtcactgtctttgtgtctctgtgactctcatttctttttttctgtctcctgctgtctctgtgtgggattccttgtctctctgcccctgccctccctctcctatctgaaccctggtctctgtgtcccttagggcttatcacaccgttctccccagagtcaccgggaggagagccgggactggacacaagccagggctgggacaatggcagtgcctagtctgtggccctggggagcatgcctgcctgtgatcttcctctccttgggatttggcctggatacagtagaggtgtgccccagcctggatattcgctcagaggtggcagagcttcgtcagctggagaactgcagcgtggtggagggccacctgcagatcctgctcatgttcacagccaccggggaggacttccgcggcctcagcttccctcgcctcacccaggtcaccgactacctgctgctcttccgtgtctacggactggagagcctgcgcgacctcttccccaacctagcagtcatccgcgggacgcgcctcttcctgggctatgcactggtcatctttgagatgccacatctgcgtgacgtggcactgcctgcacttggggccgtgctgcgtggggctgtgcgtgtggagaagaaccaggagctctgccacctctccaccattgactggggactgctgcagccagcacctggcgccaaccacatcgtgggcaacaagctgggcgaggagtgtgctgacgtgtgccctggtgtgctgggtgctgctggtgagccctgtgccaagaccaccttcagcgggcacactgactacagatgctggacctccagccactgccagagagtgtgcccctgcccccatgggatggcttgcacagcgaggggcgagtgctgccacaccgaatgcctggggggctgcagccagccagaagaccctcgtgcctgtgtagcttgccgccacctctacttccagggtgcctgcctgtgggcctgcccgccaggcacctaccagtatgagtcctggcgctgtgtcacagctgagcgctgtgccagcctgcactctgtgcccggccgtgcctccaccttcggcatacaccagggcagttgcctggcccagtgcccttctggcttcacccgtaatagcagcagcatattctgccacaagtgcgaggggctgtgccctaaagagtgcaaggtaggcaccaagaccatcgactccatccaggcggcacaggatcttgtgggctgcacgcatgtggagggaagcctcatcctcaaccttcgccagggctacaacctggagccacagctgcagcacagcctggggctggtagaaaccattactggcttcctcaaaatcaagcactcctttgccctcgtgtccctgggctttttcaagaacctcaaactaatccggggagacgccatggtggatgggaactacactctctacgtgctggacaaccagaacctacaacagctagggtcctgggtggccgcggggctcaccattcccgtgggcaagatctacttcgccttcaacccgcgcctctgcttggaacacatctaccgactggaggaggtgacaggcacgcgaggtcggcagaacaaggctgagatcaacccccgcaccaacggagaccgcgccgcctgccagactcgcaccctgcgcttcgtgtccaacgtgacggaggcagaccgcatcctgctacgctgggagcgctatgagccactggaggcccgcgacctgctcagcttcatcgtgtactacaaggagtccccattccagaacgccacagagcacgtgggtccagatgcttgtggaacccagagctggaacctgctggatgtggagctgcccctaagccgcacccaggagccaggggtgaccctagcctccctcaagccttggacacagtacgcagtgtttgtgcgggccatcacgctaaccactgaggaggacagccctcatcaaggagcccagagtcccatcgtctacctccgaacgctgcctgcagctcccacggtgccccaagacgtcatctccacgtccaactcctcctcccacctcctggtgcgctggaagccaccgacccagcgcaatgggaacctcacctactacctggtgctgtggcagcggctggcagaggacggcgacctctacctcaatgactactgccaccgcggcttgcggctgcccaccagcaacaacgatccgcgcttcgacggcgaagacggggatcctgaggccgagatggagtccgactgctgcccttgccagcacccacctcctggtcaggttctgcccccgctggaggcgcaagaggcctcgttccagaagaagtttgaaaactttctacacaacgcgatcaccatccccatatccccttggaaggtgacgtccatcaacaagagcccccaaagggactcagggcggcaccgccgggcagctgggcccctccggctggggggcaacagctcggatttcgagatccaggaggacaaggtgccccgtgagcgagcggtgctgagcggcctgcgccacttcacggaataccggatcgacatccatgcctgcaaccacgcggcgcacaccgtgggctgcagcgccgccaccttcgtctttgcgcgcaccatgccccacagagaggctgatggtattccaggaaaggtggcctgggaggcctccagcaagaacagtgtccttctgcgctggctcgagccaccagaccccaacggactcatcctcaagtacgaaatcaagtaccgccgcttgggagaggaggccacagtgctgtgtgtgtcccgtcttcgatatgcgaagtttgggggagtccacctggccctgctgccccctggaaactactctgccagggttagggcaacctcactggctggcaatggctcttggacagacagtgttgccttctacatccttggcccagaggaggaggatgctggggggctgcatgtcctcctcactgccacccctgtggggctcacgctgctcatcgttcttgctgcccttggtttcttctacggcaagaagagaaacagaaccctgtatgcttctgtgaatccagagtacttcagcgcctctgatatgtatgtccctgatgaatgggaggtgcctcgggagcagatctcgataatccgggaactgggccagggctcttttgggatggtatatgaggggctggcacgaggacttgaggctggagaggagtccacacccgtggccctgaagacggtgaatgagctggccagcccacgggaatgcattgagttcctcaaggaagcttctgtcatgaaagccttcaagtgtcaccatgtggtgcgtctcctgggtgtggtatctcagggccagccaactctggtcatcatggagttaatgacccgtggggacctcaagagccatcttcgatctttgcggcctgaggcagagaacaaccctgggctcccacagccagcattgggggaaatgatccaaatggctggtgagattgcagacggcatggcctaccttgctgccaacaagtttgtgcaccgagatctagcagcccgcaactgcatggtgtcccaggacttcaccgtcaagatcggggacttcgggatgactcgggacgtgtatgagacagactattaccgcaagggtgggaaggggctgctgcccgtgcgctggatggcccccgagtccctcaaagatgggatcttcaccacccactcggatgtctggtcctttggcgtggtactctgggagattgtgaccctggcagaacaaccctaccagggcctgtccaatgagcaggtgctgaagttcgtcatggatggcggggtcctggaggagctggagggctgtccccttcagctgcaggagctgatgagccgctgctggcagccgaacccacgcctgcgcccatctttcacacacattctggacagcatacaggaggagctgcggccctccttccgcctcctctccttctactacagcccggaatgccggggggcccggggctccctgcctaccaccgatgcagagcctgactcctcacccactccaagagactgcagccctcaaaatgggggtccagggcactgaggggcacctcattccctggctggcctcccatggggagacaggaagggacccgacctctgtggctgagacgcctgaatgttcacccccaccccaactcagggcaagggatggccgagggtggggcagagaacaggagcagggaaggctgtgggggtgggcagaggggtctcaccataggagtttctcagactctgagtccctcgggggagagcaagcagggtcaaagccagaggagtagagatcaggtcagggagagatgtcctgccctcagaggtagggaccccactcagactaggaagagggggcccgcccaccctagaggccctgcccctcagtttggggtctcctctggacaggtagggccagcgacatgtttgaaatcagatgagcaatcagaagcaggcctggggcgctctccatgcatgtatgggaggggggtggggctccacatgactgccttgcttgccactggtttcacctcctcccctcagctccactgaccaggtggcatggggagaacccaggggcctggggagtggttcccagcctgcccgccctcacctcctcctctccttttgccctgcccagggctccccaagcttggtgctccttcctccttttctccaggggcatcccttggagtacagtcaccctttcttcagtccctcccctcaatgattagccctggatgcttaaggctttcagagcctcatcttcctccctcccctcaccctcacccagccccgcccccacccctgcctctcatgggaagactggagaaggcacaataaatgctgaggcctgtttgta

SEQ ID NO: 143007 - DNA, 5877 bp, Homo sapiens
  Payload ID: 8250
  Gene Symbol: IDE
  Gene Name: insulin-degrading enzyme
  Uniprot ID: P14735
  ENST ID: ENST00000265986
  CDS Start-End: 58-3117
ccggctcgaagcgcaagcaggaagcgtttgcggtgatcccggcgactgcgctggctaatgcggtaccggctagcgtggcttctgcaccccgcactgcccagcaccttccgctcagtcctcggcgcccgcctgccgcctccggagcgcctgtgtggtttccaaaaaaagacttacagcaaaatgaataatccagccatcaagagaataggaaatcacattaccaagtctcctgaagacaagcgagaatatcgagggctagagctggccaatggtatcaaagtacttcttatcagtgatcccaccacggataagtcatcagcagcacttgatgtgcacataggttcattgtcggatcctccaaatattgctggcttaagtcatttttgtgaacatatgctttttttgggaacaaagaaataccctaaagaaaatgaatacagccagtttctcagtgagcatgcaggaagttcaaatgcctttactagtggagagcataccaattactattttgatgtttctcatgaacacctagaaggtgccctagacaggtttgcacagttttttctgtgccccttgttcgatgaaagttgcaaagacagagaggtgaatgcagttgattcagaacatgagaagaatgtgatgaatgatgcctggagactctttcaattggaaaaagctacagggaatcctaaacaccccttcagtaaatttgggacaggtaacaaatatactctggagactagaccaaaccaagaaggcattgatgtaagacaagagctactgaaattccattctgcttactattcatccaacttaatggctgtttgtgttttaggtcgagaatctttagatgacttgactaatctggtggtaaagttattttctgaagtagagaacaaaaatgttccattgccagaatttcctgaacaccctttccaagaagaacatcttaaacaactttacaaaatagtacccattaaagatattaggaatctctatgtgacatttcccatacctgaccttcagaaatactacaaatcaaatcctggtcattatcttggtcatctcattgggcatgaaggtcctggaagtctgttatcagaacttaagtcaaagggctgggttaatactcttgttggtgggcagaaggaaggagcccgaggttttatgttttttatcattaatgtggacttgaccgaggaaggattattacatgttgaagatataattttgcacatgtttcaatacattcagaagttacgtgcagaaggacctcaagaatgggttttccaagagtgcaaggacttgaatgctgttgcttttaggtttaaagacaaagagaggccacggggctatacatctaagattgcaggaatattgcattattatcccctagaagaggtgctcacagcggaatatttactggaagaatttagacctgacttaatagagatggttctcgataaactcagaccagaaaatgtccgggttgccatagtttctaaatcttttgaaggaaaaactgatcgcacagaagagtggtatggaacccagtacaaacaagaagctataccggatgaagtcatcaagaaatggcaaaatgctgacctgaatgggaaatttaaacttcctacaaagaatgaatttattcctacgaattttgagattttaccgttagaaaaagaggcgacaccataccctgctcttattaaggatacagctatgagcaaactttggttcaaacaagatgataagttttttttgccgaaggcttgtctcaactttgaatttttcagcccatttgcttatgtggaccccttgcactgtaacatggcctatttgtaccttgagctcctcaaagactcactcaacgagtatgcatatgcagcagagctagcaggcttgagctatgatctccaaaataccatctatgggatgtatctttcagtgaaaggttacaatgacaagcagccaattttactaaagaagattattgagaaaatggctacctttgagattgatgaaaaaagatttgaaattatcaaagaagcatatatgcgatctcttaacaatttccgggctgaacagcctcaccagcatgccatgtactacctccgcttgctgatgactgaagtggcctggactaaagatgagttaaaagaagctctggatgatgtaacccttcctcgccttaaggccttcatacctcagctcctgtcacggctgcacattgaagcccttctccatggaaacataacaaagcaggctgcattaggaattatgcagatggttgaagacaccctcattgaacatgctcataccaaacctctccttccaagtcagctggttcggtatagagaagttcagctccctgacagaggatggtttgtttatcagcagagaaatgaagttcacaataactgtggcatcgagatatactaccaaacagacatgcaaagcacctcagagaatatgtttctggagctcttctgtcagattatctcggaaccttgcttcaacaccctgcgcaccaaggagcagttgggctatatcgtcttcagcgggccacgtcgagctaatggcatacagggcttgagattcatcatccagtcagaaaagccacctcactacctagaaagcagagtggaagctttcttaattaccatggaaaagtccatagaggacatgacagaagaggccttccaaaaacacattcaggcattagcaattcgtcgactagacaaaccaaagaagctatctgctgagtgtgctaaatactggggagaaatcatctcccagcaatataattttgacagagataacactgaggttgcatatttaaagacacttaccaaggaagatatcatcaaattctacaaggaaatgttggcagtagatgctccaaggagacataaggtatccgtccatgttcttgccagggaaatggattcttgtcctgttgttggagagttcccatgtcaaaatgacataaatttgtcacaagcaccagccttgccacaacctgaagtgattcagaacatgaccgaattcaagcgtggtctgccactgtttccccttgtgaaaccacatattaacttcatggctgcaaaactctgaagattccccatgcatgggaaagtgcaagtggatgcattcctgagtcttccagagcctaagaaaatcatcttggccactttaatagtttctgattcactattagagaaacaaacaaaaaattgtcaaatgtcattatgtagaaatattataaatccaaagtaaattacaaaatcttatagatgtagaatattttttaaatacatgcctcttaaatattttaaaatttttcttttgattactgagagaaatttccccaatataacaatgcttaaaatgaatgatattcctatagaatcttccttccctattctgtaaaatagtcacttgtccgaagaaagttaaaagttagctcttttctaaaagcctcctagcttgacatagaaggcttcacaacatttagaaaggtaataactttttaaaaattgatcctcaaatttgctttctacttgatggtttcatgtaaatcagtggaaaacattacatttggcagatgataaagcaatgtcatcttttattagtgaaatgctggttatataaggcatggttttaatctttttataaaatttgaacatgttttttatgccaactcgtaaaatgctagaaaaccctacttatttacaatgctagaaatacagacttaccttacatcaattttgtcctaaaccgaatttctcaggattactgtggtttctttcattctgattgaattatattgacctacttcttcatagttggtttgcagtgttccatgagttttacttttcctcatcaacatattgctttaacacaacatatttatttaacacgtacaaatagggtcaacttcagatcctactgagtgtgtgacatgcttttccaacatcagctttttgtaaccacctgtataactttttattacagtgaaattgcagtcagtatgtgaaccaaaatatcttgcccctttatgaatttaaaaggcagccaatacaaagccacctttttggaaatataaaaagtaaagccttgcattcttatatagcaggtcttcataaaactctaaaatcccttgttgctaccagtctaatcttgccttaaatgttaagttattttttgaatatataaatataaacatataaacacagatgatgactggagtagacttttaaaaaaatatttttttcatgagatactattttaggtgaaattgttactgtagatttaacagctgttttgaaatatttactgttattaaaacttgcttcaagagaaattgtgaatatatttccatatacaagcactagtaacagtaagtggccctgtcatccactaactcaggcaaagtaaagaatggcatttttgaaggacattttacctccccatatgatttgattggctaggactttcttctgtaaagtcataccttttcacatcttaagtttttacatttgccattttccaaatctcaattttgggcaagaacgatatagtcacaactatggggctgctttcaaaagcggggctccatttctactgtcagatcaatgtggtgctgtaaccatctttttatccctaccttcaagaacctccttatatgaagcctgtctttatccatcagaaggtgtgtgaaatcatcacttccttctggttttatgtatttgtagactatgcagcttttcattaaactgcaagtatatacaagacagatctgaaattaggcctgagtgttccgatccaccactgtactagtaaataaaaatccacctaccttttatgtggaaaattatgtgctattgagtaacttttagctcttttttaaaaaatgggtgaaatttaagtgtcttttttatgagaatgacacatgaagagatctgagagcaatctcatgtagtcttccatgaacctgcaattgtttggtatgcgtcagcattttccaatttccaggttggatctagagctgctgttgatcactcaggcatactaatggattcatttagatgggtccaagctgcagtccatgagcaataacagactaccccagatactgcagtttacgcagtgcttagtaaatgagatttgtggaactaagttattagttacctgaggcttcttaagaaagtcttcttttttgaccagttgatgtgaaagagggagcatgtgacacagccagtatggtggagtgctagggttatcctgtttacaataaatcgcctgaatttcacctctggagtctgcatttgtattatttttccagttttagtgaaatagtacagtggccagtcctcagcctacctctcaacatcccagtttgaccagatttcttgctttcattgttcataatgcagaaagcagtgaattatattaacattttaaaagtgtttctgggtaacaatgatttttgtcaaatagaagactcaatttcacaaccttaagaatagatcacttttgtaaaacaagaatctcagtatttgatgttggactccttgctgtgagtattgtcactgactccaaacccagaaagatttgttcctgcccttacagggatgaaaataaaaaggatagaaaaaatatttctctcctctacaatgagtccttacatcttcttgccacatctccagctgcagtttaggcagatatcttgttcaatctctgtcttcttgatccctgtcaaaataatttttctactcatatagtggccagttggctcaggcaggcatttcaagaggaatctgcttgttcctcacttttccagcataggacagtggtccagcccgcacagtcagc

SEQ ID NO: 143008 - DNA, 4480 bp, Homo sapiens
  Payload ID: 8250
  Gene Symbol: IDE
  Gene Name: insulin-degrading enzyme
  Uniprot ID: P14735
  ENST ID: ENST00000371581
  CDS Start-End: 326-1720
agttgtaactgtagtaggtcagtgatacatggtgcaaaacagcctgggataatattgccagctgccagaccagactagggtggctcaaggggttgccatagtttctaaatcttttgaaggaaaaactgatcgcacagaagagtggtatggaacccagtacaaacaagaagctataccggatgaagtcatcaagaaatggcaaaatgctgacctgaatgggaaatttaaacttcctacaaagaatgaatttattcctacgaattttgagattttaccgttagaaaaagaggcgacaccataccctgctcttattaaggatacagctatgagcaaactttggttcaaacaagatgataagttttttttgccgaaggcttgtctcaactttgaatttttcagcccatttgcttatgtggaccccttgcactgtaacatggcctatttgtaccttgagctcctcaaagactcactcaacgagtatgcatatgcagcagagctagcaggcttgagctatgatctccaaaataccatctatgggatgtatctttcagtgaaaggttacaatgacaagcagccaattttactaaagaagattattgagaaaatggctacctttgagattgatgaaaaaagatttgaaattatcaaagaagcatatatgcgatctcttaacaatttccgggctgaacagcctcaccagcatgccatgtactacctccgcttgctgatgactgaagtggcctggactaaagatgagttaaaagaagctctggatgatgtaacccttcctcgccttaaggccttcatacctcagctcctgtcacggctgcacattgaagcccttctccatggaaacataacaaagcaggctgcattaggaattatgcagatggttgaagacaccctcattgaacatgctcataccaaacctctccttccaagtcagctggttcggtatagagaagttcagctccctgacagaggatggtttgtttatcagcagagaaatgaagttcacaataactgtggcatcgagatatactaccaaacagacatgcaaagcacctcagagaatatgtttctggagctcttctgtcagattatctcggaaccttgcttcaacaccctgcgcaccaaggagcagttgggctatatcgtcttcagcgggccacgtcgagctaatggcatacagggcttgagattcatcatccagtcagaaaagccacctcactacctagaaagcagagtggaagctttcttaattaccatggaaaagtccatagaggacatgacagaagaggccttccaaaaacacattcaggcattagcaattcgtcgactagacaaaccaaagaagctatctgctgagtgtgctaaatactggggagaaatcatctcccagcaatataattttgacagagataacactgaggttgcatatttaaagacacttaccaaggaagatatcatcaaattctacaaggaaatgttggcagtagatgctccaaggagacataaggtatccgtccatgttcttgccagggaaatggattcttgtcctgttgttggagagttcccatgtcaaaatgacataaatttgtcacaagcaccagccttgccacaacctgaagtgattcagaacatgaccgaattcaagcgtggtctgccactgtttccccttgtgaaaccacatattaacttcatggctgcaaaactctgaagattccccatgcatgggaaagtgcaagtggatgcattcctgagtcttccagagcctaagaaaatcatcttggccactttaatagtttctgattcactattagagaaacaaacaaaaaattgtcaaatgtcattatgtagaaatattataaatccaaagtaaattacaaaatcttatagatgtagaatattttttaaatacatgcctcttaaatattttaaaatttttcttttgattactgagagaaatttccccaatataacaatgcttaaaatgaatgatattcctatagaatcttccttccctattctgtaaaatagtcacttgtccgaagaaagttaaaagttagctcttttctaaaagcctcctagcttgacatagaaggcttcacaacatttagaaaggtaataactttttaaaaattgatcctcaaatttgctttctacttgatggtttcatgtaaatcagtggaaaacattacatttggcagatgataaagcaatgtcatcttttattagtgaaatgctggttatataaggcatggttttaatctttttataaaatttgaacatgttttttatgccaactcgtaaaatgctagaaaaccctacttatttacaatgctagaaatacagacttaccttacatcaattttgtcctaaaccgaatttctcaggattactgtggtttctttcattctgattgaattatattgacctacttcttcatagttggtttgcagtgttccatgagttttacttttcctcatcaacatattgctttaacacaacatatttatttaacacgtacaaatagggtcaacttcagatcctactgagtgtgtgacatgcttttccaacatcagctttttgtaaccacctgtataactttttattacagtgaaattgcagtcagtatgtgaaccaaaatatcttgcccctttatgaatttaaaaggcagccaatacaaagccacctttttggaaatataaaaagtaaagccttgcattcttatatagcaggtcttcataaaactctaaaatcccttgttgctaccagtctaatcttgccttaaatgttaagttattttttgaatatataaatataaacatataaacacagatgatgactggagtagacttttaaaaaaatatttttttcatgagatactattttaggtgaaattgttactgtagatttaacagctgttttgaaatatttactgttattaaaacttgcttcaagagaaattgtgaatatatttccatatacaagcactagtaacagtaagtggccctgtcatccactaactcaggcaaagtaaagaatggcatttttgaaggacattttacctccccatatgatttgattggctaggactttcttctgtaaagtcataccttttcacatcttaagtttttacatttgccattttccaaatctcaattttgggcaagaacgatatagtcacaactatggggctgctttcaaaagcggggctccatttctactgtcagatcaatgtggtgctgtaaccatctttttatccctaccttcaagaacctccttatatgaagcctgtctttatccatcagaaggtgtgtgaaatcatcacttccttctggttttatgtatttgtagactatgcagcttttcattaaactgcaagtatatacaagacagatctgaaattaggcctgagtgttccgatccaccactgtactagtaaataaaaatccacctaccttttatgtggaaaattatgtgctattgagtaacttttagctcttttttaaaaaatgggtgaaatttaagtgtcttttttatgagaatgacacatgaagagatctgagagcaatctcatgtagtcttccatgaacctgcaattgtttggtatgcgtcagcattttccaatttccaggttggatctagagctgctgttgatcactcaggcatactaatggattcatttagatgggtccaagctgcagtccatgagcaataacagactaccccagatactgcagtttacgcagtgcttagtaaatgagatttgtggaactaagttattagttacctgaggcttcttaagaaagtcttcttttttgaccagttgatgtgaaagagggagcatgtgacacagccagtatggtggagtgctagggttatcctgtttacaataaatcgcctgaatttcacctctggagtctgcatttgtattatttttccagttttagtgaaatagtacagtggccagtcctcagcctacctctcaacatcccagtttgaccagatttcttgctttcattgttcataatgcagaaagcagtgaattatattaacattttaaaagtgtttctgggtaacaatgatttttgtcaaatagaagactcaatttcacaaccttaagaatagatcacttttgtaaaacaagaatctcagtatttgatgttggactccttgctgtgagtattgtcactgactccaaacccagaaagatttgttcctgcccttacagggatgaaaataaaaaggatagaaaaaatatttctctcctctacaatgagtccttacatcttcttgccacatctccagctgcagtttaggcagatatcttgttcaatctctgtcttcttgatccctgtcaaaataatttttctactcatatagtggccagttggctcaggcaggcatttcaagaggaatctgcttgttcctcacttttccagcataggacagtggtccagcccgcacagtcagc

SEQ ID NO: 143009 - DNA, 772 bp, Homo sapiens
  Payload ID: 8250
  Gene Symbol: IDE
  Gene Name: insulin-degrading enzyme
  ENST ID: ENST00000436178
  CDS Start-End: 1-772
gaattcatcatcagaggaggaagagttcccagtcattgtcttcacttctccagaagtttccaaaaaaagacttacagcaaaatgaataatccagccatcaagagaataggaaatcacattaccaagtctcctgaagacaagcgagaatatcgagggctagagctggccaatggtatcaaagtacttcttatcagtgatcccaccacggataagtcatcagcagcacttgatgtgcacataggttcattgtcggatcctccaaatattgctggcttaagtcatttttgtgaacatatgctttttttgggaacaaagaaataccctaaagaaaatgaatacagccagtttctcagtgagcatgcaggaagttcaaatgcctttactagtggagagcataccaattactattttgatgtttctcatgaacacctagaaggtgccctagacaggtttgcacagttttttctgtgccccttgttcgatgaaagttgcaaagacagagaggtgaatgcagttgattcagaacatgagaagaatgtgatgaatgatgcctggagactctttcaattggaaaaagctacagggaatcctaaacaccccttcagtaaatttgggacaggtaacaaatatactctggagactagaccaaaccaagaaggcattgatgtaagacaagagctactgaaattccattctgcttactattcatccaacttaatggctgtttgtgttttaggtcgagaatctttagatgacttgactaatctggtgg

SEQ ID NO: 143010 - DNA, 3198 bp, Homo sapiens
  Payload ID: 8250
  Gene Symbol: IDE
  Gene Name: insulin-degrading enzyme
  ENST ID: ENST00000478361
  CDS Start-End: 49-234
agcgcaagcaggaagcgtttgcggtgatcccggcgactgcgctggctaatgcggtaccggctagcgtggcttctgcaccccgcactgcccagcaccttccgctcagtcctcggcgcccgcctgccgcctccggagcgcctgtgtgggaactaccaggttgtttttcaaagcagcggcactattttgcatttccaccagcagtgtgtgaaaattccaatttctctatatccttgacaacacttgctatatgtacttttgttataagccatcctggtgggtatgaagtggtgtctcattggaattttgactttcattttcctgatgaccattgtaagagttttaaaatatattctctaggccgggcgtgttggctcatgcctgtaatcccagcactttgggaggatgaggcaggtggatcacctgcagtcaggagttcaggaccagcctgaccaacaagctcctgcatgtggcatctgaaagctatctgtgaagaggttcaagcaattcttctgcctcagcctcccgagtagctgggattacagtttccaaaaaaagacttacagcaaaatgaataatccagccatcaagagaataggaaatcacattaccaagtctcctgaagacaagcgagaatatcgagggctagagctggccaatggtatcaaagtacttcttatcagtgatcccaccacggataagtcatcagcagcacttgatgtgcacataggttcattgtcggatcctccaaatattgctggcttaagtcatttttgtgaacatatgctttttttgggaacaaagaaataccctaaagaaaatgaatacagccagtttctcagtgagcatgcaggaagttcaaatgcctttactagtggagagcataccaattactattttgatgtttctcatgaacacctagaaggtgccctagacaggtttgcacagttttttctgtgccccttgttcgatgaaagttgcaaagacagagaggtgaatgcagttgattcagaacatgagaagaatgtgatgaatgatgcctggagactctttcaattggaaaaagctacagggaatcctaaacaccccttcagtaaatttgggacaggtaacaaatatactctggagactagaccaaaccaagaaggcattgatgtaagacaagagctactgaaattccattctgcttactattcatccaacttaatggctgtttgtgttttaggtcgagaatctttagatgacttgactaatctggtggtaaagttattttctgaagtagagaacaaaaatgttccattgccagaatttcctgaacaccctttccaagaagaacatcttaaacaactttacaaaatagtacccattaaagatattaggaatctctatgtgacatttcccatacctgaccttcagaaatactacaaatcaaatcctggtcattatcttggtcatctcattgggcatgaaggtcctggaagtctgttatcagaacttaagtcaaagggctgggttaatactcttgttggtgggcagaaggaaggagcccgaggttttatgttttttatcattaatgtggacttgaccgaggaaggattattacatgttgaagatataattttgcacatgtttcaatacattcagaagttacgtgcagaaggacctcaagaatgggttttccaagagtgcaaggacttgaatgctgttgcttttaggtttaaagacaaagagaggccacggggctatacatctaagattgcaggaatattgcattattatcccctagaagaggtgctcacagcggaatatttactggaagaatttagacctgacttaatagagatggttctcgataaactcagaccagaaaatgtccgggttgccatagtttctaaatcttttgaaggaaaaactgatcgcacagaagagtggtatggaacccagtacaaacaagaagctataccggatgaagtcatcaagaaatggcaaaatgctgacctgaatgggaaatttaaacttcctacaaagaatgaatttattcctacgaattttgagattttaccgttagaaaaagaggcgacaccataccctgctcttattaaggatacagctatgagcaaactttggttcaaacaagatgataagttttttttgccgaaggcttgtctcaactttgaatttttcagctttgataaaattgttggcttttggctgggtgcgatagctcacacctgtaatcctaacattttgggaagccgaggcaggaagatcgcttgagcctaggagttcgagaccagcctggacaacacacccatttgcttatgtggaccccttgcactgtaacatggcctatttgtaccttgagctcctcaaagactcactcaacgagtatgcatatgcagcagagctagcaggcttgagctatgatctccaaaataccatctatgggatgtattcgctacatttatgctgatcctctccattgcaacatgacatacctgtttatcaggttattgaaggatgatttaaaagagtatacatatgcagcacgcctctcaggtttgagctatggcattgcatcaggaatgaatgcaatacttctttcagtgaaaggttacaatgacaagcagccaattttactaaagaagattattgagaaaatggctacctttgagattgatgaaaaaagatttgaaattatcaaagaagcatatatgcgatctcttaacaatttccgggctgaacagcctcaccagcatgccatgtactacctccgcttgctgatgactgaagtggcctggactaaagatgagttaaaagaagctctggatggtgagactttctacttaaagcttaatgctttcttcatttttttcctaaattcattttggtttattctgatattgactgtttatacttttaaataacttgtagttctattaaagctggctgtgtatatgttttataaaaacagtggtgggcaggatggctatagttaacagtaacatatacttttaaataggtagaaggaagatattgaacattcccaacccaaacaaatgataaataaacttgagatgatggatatgcttagtaccctgatgtgatcactatacattatatgtatatataataacattatatactctatgaatatctacaattattatttgtcaattaaaaataaaatgtaaaaaaaca

SEQ ID NO: 143011 - DNA, 755 bp, Homo sapiens
  Payload ID: 8251
  Gene Symbol: INSL3
  Gene Name: insulin-like 3 (Leydig cell)
  Uniprot ID: P51460
  ENST ID: ENST00000317306
  CDS Start-End: 18-413
cggcgccacccaccaccatggacccccgtctgcccgcctgggcgctggtgctgctgggccctgccctggtgttcgcgttgggccccgcgcccaccccagagatgcgtgagaagttgtgcggccaccacttcgtacgcgcgctagtgcgcgtgtgcgggggcccccgctggtccaccgaagccaggaggcctgcgaccggaggcgaccgtgagttgctacagtggctggagagacgacatctgctccatgggctggtggccgacagtaatctcacgctgggacctggcctgcagcccctgccccagacctctcaccatcaccgccaccaccgtgcagctgccaccaaccctgcacgctactgctgcctcagtggctgtacccaacaagacctgctgaccctctgtccctactgattcctccttgggtgcagcctcagagtggcctgaggcccagagggtctggtctggtgagctcctgaggccacacagcaccataaagtctcgcatctacaggcctttgattacctcctgggatgggtgctcactatctaccccagaccaatgccacctgcagcctgtggagtcaactgcagaataaatcacaccctagccctggcttggaggatccccgctttcacagatgctggacactgacagccaaatgtcctcactccaggggagccccagacgctccgctccctgcatgtgtaacaccccttcttgctgtctcttagtaaataaacgacccaaagcagc

SEQ ID NO: 143012 - DNA, 899 bp, Homo sapiens
  Payload ID: 8251
  Gene Symbol: INSL3
  Gene Name: insulin-like 3 (Leydig cell)
  Uniprot ID: P51460
  ENST ID: ENST00000379695
  CDS Start-End: 69-542
cccccagctgggacggcccaggcgcctataaagggggtccccgcttggccccggcgccacccaccaccatggacccccgtctgcccgcctgggcgctggtgctgctgggccctgccctggtgttcgcgttgggccccgcgcccaccccagagatgcgtgagaagttgtgcggccaccacttcgtacgcgcgctagtgcgcgtgtgcgggggcccccgctggtccaccgaagccaggaggcctgcgaccggaggcgaccagagggagtctcactctgtttcccaggctggtctcaaactcctgagctcaagtaatcctcccaccttgaccttccaaagtgttgggattagcgatgtgagttgctacagtggctggagagacgacatctgctccatgggctggtggccgacagtaatctcacgctgggacctggcctgcagcccctgccccagacctctcaccatcaccgccaccaccgtgcagctgccaccaaccctgcacgctactgctgcctcagtggctgtacccaacaagacctgctgaccctctgtccctactgattcctccttgggtgcagcctcagagtggcctgaggcccagagggtctggtctggtgagctcctgaggccacacagcaccataaagtctcgcatctacaggcctttgattacctcctgggatgggtgctcactatctaccccagaccaatgccacctgcagcctgtggagtcaactgcagaataaatcacaccctagccctggcttggaggatccccgctttcacagatgctggacactgacagccaaatgtcctcactccaggggagccccagacgctccgctccctgcatgtgtaacaccccttcttgctgtctcttagtaaataaacgacccaaagca

SEQ ID NO: 143013 - DNA, 758 bp, Homo sapiens
  Payload ID: 8251
  Gene Symbol: INSL3
  Gene Name: insulin-like 3 (Leydig cell)
  ENST ID: ENST00000598577
  CDS Start-End: 1-215
tggacccccgtctgcccgcctgggcgctggtgctgctgggccctgccctggtgttcgcgttgggccccgcgcccaccccagagatgcgtgagaagttgtgcggccaccacttcgtacgcgcgctagtgcgcgtgtgcgggggcccccgctggtccaccgaagccaggaggcctgcgaccggaggcgaccctgagtttcactctgtccccaggtgagttgctacagtggctggagagacgacatctgctccatgggctggtggccgacagtaatctcacgctgggacctggcctgcagcccctgccccagacctctcaccatcaccgccaccaccgtgcagctgccaccaaccctgcacgctactgctgcctcagtggctgtacccaacaagacctgctgaccctctgtccctactgattcctccttgggtgcagcctcagagtggcctgaggcccagagggtctggtctggtgagctcctgaggccacacagcaccataaagtctcgcatctacaggcctttgattacctcctgggatgggtgctcactatctaccccagaccaatgccacctgcagcctgtggagtcaactgcagaataaatcacaccctagccctggcttggaggatccccgctttcacagatgctggacactgacagccaaatgtcctcactccaggggagccccagacgctccgctccctgcatgtgtaacaccccttcttgctgtctcttagtaaataaacgacccaaagcag

SEQ ID NO: 143014 - DNA, 1952 bp, Homo sapiens
  Payload ID: 8252
  Gene Symbol: INSL4
  Gene Name: insulin-like 4 (placenta)
  Uniprot ID: Q14641
  ENST ID: ENST00000239316
  CDS Start-End: 106-525
agtctggagcccagaagggacacaccagcacagtctggtaggctacagcagcaagtctctaaagaaaggctgagaacacccagaacaggagagttcaggtccaggatggccagcctgttccggtcctatctgccagcaatctggctgctgctgagccaactccttagagaaagcctagcagcagagctgaggggatgtggtccccgatttggaaaacacttgctgtcatattgccccatgcctgagaagacattcaccaccaccccaggagggtggctgctggaatctggacgtcccaaagaaatggtgtcaacctccaacaacaaagatggacaagccttaggtacgacatcagaattcattcctaatttgtcaccagagctgaagaaaccactgtctgaagggcagccatcattgaagaaaataatactttcccgcaaaaagagaagtggacgtcacagatttgatccattctgttgtgaagtaatttgtgacgatggaacttcagttaaattatgtacatagtagagtaatcatggactggacatctcatccattctcatatgtattctcaatgacaaattcactgatgcccaattaaatgattgctgtttattagaacatgagaatcattattagtattcacatgtttcacttgctctgtactaatatagtctctccaaatggaggaagttagatagatggaataagttctagtagttgatagtacaatggggaaattatacttaacaataattcactgtatattccaaaatagctagaagagaattgtaatgattccaacacaaaaaagatgaatgttagtttggatgcatatcccaattaccctgatttgatcattacacattatatacacgtatcaaaatatcacatgtactacaaaaatgtgtataactgtaatatgtgaactacaaacttactggaaataaatttttaaagttttacacacataaacacatacgttcacacacactcactcaagtctcttcatttttcctcttttcacactagaagaaatgtaagagataaaggatctaaccatctctaacatcagctcatagtacggaggaaaagcagtgaaggaatgaactggtgggagaggtattaggcatgttcaccctagggtaaacccagagacctccctagaactttgcccaatgcatatcctccacctgcctctcagcacgctgcctttagaccttcaatcattctataaactcctcttttgtccctggcattactccacatcccctcatcaaagtggtgaattggcacaaatactggcattcctctggctacacatacctcctccctatgtgtctctaaatcctaaatcaaagagtacattttatactctgtcagtgaggttctactagttgtgtttgtttgtttgcaggctaactgaagctgctactacctcattatcaggtcctataaacttaattcaagtggcatgatttgagtagccccctgtgcctgcccataaagtgctctgaatctagtgtgggacatggagaagcaaaggataataagtgcaatgatacttgtaggtcatcatagagactgtaatgatccacaggaatcagggtcgtgtttaatgccaacatgtgaaagaataaatatacagggaacagtgtaggtaagaggagagagcaaaatttccctaaggaaactgatggctgatctgcatcttgaaagacatctaagcagaagagagtgcaaaaagggacaagtagaagcccaggaaaatgcacaaaggcctggaagcatagcatgtgtggaaacagccagagtcagcagggcaggaggtggtgtggagaaaaggaattgtcaagatctggttggaatggagacaggagagaggatctcaaacgattccacacaatgcagctatggggtttaggctgcatcctggagtaaggaagaactgc

SEQ ID NO: 143015 - DNA, 715 bp, Homo sapiens
  Payload ID: 8253
  Gene Symbol: INSL5
  Gene Name: insulin-like 5
  Uniprot ID: Q9Y5Q6
  ENST ID: ENST00000304526
  CDS Start-End: 36-443
ttaccatatcagattcacattcagtcctcagcaaaatgaagggctccattttcactctgtttttattctctgtcctatttgccatctcagaagtgcggagcaaggagtctgtgagactctgtgggctagaatacatacggacagtcatctatatctgtgctagctccaggtggagaaggcatcaggaggggatccctcaagctcagcaagctgagacaggaaactccttccagctcccacataaacgtgagttttctgaggaaaatccagcgcaaaaccttccgaaggtggatgcctcaggggaagaccgtctttggggtggacagatgcccactgaagagctttggaagtcaaagaagcattcagtgatgtcaagacaagatttacaaactttgtgttgcactgatggctgttccatgactgatttgagtgctctttgctaagacaagagcaaatacccaatgggtggcagagctttatcacatgtttaattacagtgttttactgcctggtagaacactaatattgtgttattaaaatgatggcttttgggtaggcaaaacttcttttctaaaaggtatagctgagcggttgaaaccacagtgatctctattttctccctttgccaaggttaatgaactgttcttttcaaattctactaatgctttgaaatttcaaatgctgcgcaaaattgcaataaaaatgctataaacca

SEQ ID NO: 143016 - DNA, 758 bp, Homo sapiens
  Payload ID: 8254
  Gene Symbol: INSL6
  Gene Name: insulin-like 6
  Uniprot ID: Q9Y581
  ENST ID: ENST00000381641
  CDS Start-End: 67-708
agacagggagcagggtccggccgaccgccattgcacaacgcggaggactagcctggggtcacagggatgccgcggctcctccgcttgtccctgctgtggcttggactcctgctggttcggttttctcgtgaactgagcgacatcagcagtgccaggaagctgtgcggcaggtacttggtgaaagaaatagaaaaactctgcggccatgccaactggagccagttccgtttcgaggaggaaacccctttctcacggttgattgcacaggcctcggagaaggtcgaagcctacagcccataccagttcgaaagcccgcaaaccgcttccccggcccggggaagaggcacaaacccagtgtctacttcttgggaagaagcagtaaacagttgggaaatgcagtcactacctgagtataaggataaaaagggatattcaccccttggtaagacaagagaattttcttcatcacataatatcaatgtatatattcatgagaatgcaaaatttcagaagaaacgtagaaacaaaattaaaaccttaagcaatttgttttgggggcatcatccccaaagaaaacgcagaggatattcagaaaagtgttgtcttacaggatgtacaaaagaagaacttagcattgcatgtcttccatatattgattttaaaaggctaaaggaaaaaagatcatcacttgtaactaagatatactaaccatcttagaattttttctaacctaataaaagcttaatacatttatttaa

SEQ ID NO: 143017 - DNA, 1097 bp, Homo sapiens
  Payload ID: 8255
  Gene Symbol: IGF1
  Gene Name: insulin-like growth factor 1 (somatomedin C)
  Uniprot ID: P05019
  ENST ID: ENST00000307046
  CDS Start-End: 183-770
cttctgtttgctaaatctcactgtcactgctaaattcagagcagatagagcctgcgcaatggaataaagtcctcaaaattgaaatgtgacattgctctcaacatctcccatctctctggatttctttttgcttcattattcctgctaaccaattcattttcagactttgtacttcagaagcaatgggaaaaatcagcagtcttccaacccaattatttaagtgctgcttttgtgatttcttgaaggtgaagatgcacaccatgtcctcctcgcatctcttctacctggcgctgtgcctgctcaccttcaccagctctgccacggctggaccggagacgctctgcggggctgagctggtggatgctcttcagttcgtgtgtggagacaggggcttttatttcaacaagcccacagggtatggctccagcagtcggagggcgcctcagacaggcatcgtggatgagtgctgcttccggagctgtgatctaaggaggctggagatgtattgcgcacccctcaagcctgccaagtcagctcgctctgtccgtgcccagcgccacaccgacatgcccaagacccagaagtatcagcccccatctaccaacaagaacacgaagtctcagagaaggaaaggttggccaaagacacatccaggaggggaacagaaggaggggacagaagcaagtctgcagatcagaggaaagaagaaagagcagaggagggagattggaagtagaaatgctgaatgcagaggcaaaaaaggaaaatgaaggacaggaggattaaacagacagaggcaaggatgatgagagaggagcagacagcaagaatgaaaagcagaaaatacaatagaggaaatgaagaaaagtaggcctgctggagctagatgatgatgtgatggaaatagaagtaaccttttagagaatctcgctaagaaacatggagaaaacggaaaagaaaaatgtaatgccctagaaagcgcaaagaaagacagtggcaaaaatgaaaaaaaaaaataaaaattataaaagaggcaaaaaaagacacactattctctgcctctaaaacacaattaaataaaagaatttaaataaaaa

SEQ ID NO: 143018 - DNA, 7359 bp, Homo sapiens
  Payload ID: 8255
  Gene Symbol: IGF1
  Gene Name: insulin-like growth factor 1 (somatomedin C)
  Uniprot ID: P05019
  ENST ID: ENST00000337514
  CDS Start-End: 265-726
gaaggcaaatgttcccccagctgtttcctgtctacagtgtctgtgttttgtagataaatgtgaggattttctctaaatccctcttctgtttgctaaatctcactgtcactgctaaattcagagcagatagagcctgcgcaatggaataaagtcctcaaaattgaaatgtgacattgctctcaacatctcccatctctctggatttctttttgcttcattattcctgctaaccaattcattttcagactttgtacttcagaagcaatgggaaaaatcagcagtcttccaacccaattatttaagtgctgcttttgtgatttcttgaaggtgaagatgcacaccatgtcctcctcgcatctcttctacctggcgctgtgcctgctcaccttcaccagctctgccacggctggaccggagacgctctgcggggctgagctggtggatgctcttcagttcgtgtgtggagacaggggcttttatttcaacaagcccacagggtatggctccagcagtcggagggcgcctcagacaggcatcgtggatgagtgctgcttccggagctgtgatctaaggaggctggagatgtattgcgcacccctcaagcctgccaagtcagctcgctctgtccgtgcccagcgccacaccgacatgcccaagacccagaaggaagtacatttgaagaacgcaagtagagggagtgcaggaaacaagaactacaggatgtaggaagaccctcctgaggagtgaagagtgacatgccaccgcaggatcctttgctctgcacgagttacctgttaaactttggaacacctaccaaaaaataagtttgataacatttaaaagatgggcgtttcccccaatgaaatacacaagtaaacattccaacattgtctttaggagtgatttgcaccttgcaaaaatggtcctggagttggtagattgctgttgatcttttatcaataatgttctatagaaaagaaaaaaaaaatatatatatatatatatcttagtccctgcctctcaagagccacaaatgcatgggtgttgtatagatccagttgcactaaattcctctctgaatcttggctgctggagccattcattcagcaaccttgtctaagtggtttatgaattgtttccttatttgcacttctttctacacaactcgggctgtttgttttacagtgtctgataatcttgttagtctatacccaccacctcccttcataacctttatatttgccgaatttggcctcctcaaaagcagcagcaagtcgtcaagaagcacaccaattctaacccacaagattccatctgtggcatttgtaccaaatataagttggatgcattttattttagacacaaagctttatttttccacatcatgcttacaaaaaagaataatgcaaatagttgcaactttgaggccaatcatttttaggcatatgttttaaacatagaaagtttcttcaactcaaaagagttccttcaaatgatgagttaatgtgcaacctaattagtaactttcctctttttattttttccatatagagcactatgtaaatttagcatatcaattatacaggatatatcaaacagtatgtaaaactctgttttttagtataatggtgctattttgtagtttgttatatgaaagagtctggccaaaacggtaatacgtgaaagcaaaacaataggggaagcctggagccaaagatgacacaaggggaagggtactgaaaacaccatccatttgggaaagaaggcaaagtccccccagttatgccttccaagaggaacttcagacacaaaagtccactgatgcaaattggactggcgagtccagagaggaaactgtggaatggaaaaagcagaaggctaggaattttagcagtcctggtttctttttctcatggaagaaatgaacatctgccagctgtgtcatggactcaccactgtgtgaccttgggcaagtcacttcacctctctgtgcctcagtttcctcatctgcaaaatgggggcaatatgtcatctacctacctcaaaggggtggtataaggtttaaaaagataaagattcagattttttttaccctgggttgctgtaagggtgcaacatcagggcgcttgagttgctgagatgcaaggaattctataaataacccattcatagcatagctagagattggtgaattgaatgctcctgacatctcagttcttgtcagtgaagctatccaaataactggccaactagttgttaaaagctaacagctcaatctcttaaaacacttttcaaaatatgtgggaagcatttgattttcaatttgattttgaattctgcatttggttttatgaatacaaagataagtgaaaagagagaaaggaaaagaaaaaggagaaaaacaaagagatttctaccagtgaaaggggaattaattactctttgttagcactcactgactcttctatgcagttactacatatctagtaaaacctcgtttaatactataaataatattctattcattttgaaaaacacaatgattccttcttttctaggcaatataaggaaagtgatccaaaatttgaaatattaaaataatatctaataaaaagtcacaaagttatcttctttaacaaactttactcttattcttagctgtatatacatttttttaaaagtttgttaaaatatgcttgactagagtttccagttgaaaggcaaaaacttccatcacaacaagaaatttcccatgcctgctcagaagggtagcccctagctctctgtgaatgtgttttatccattcaactgaaaattggtatcaagaaagtccactggttagtgtactagtccatcatagcctagaaaatgatccctatctgcagatcaagattttctcattagaacaatgaattatccagcattcagatctttctagtcaccttagaactttttggttaaaagtacccaggcttgattatttcatgcaaattctatattttacattcttggaaagtctatatgaaaaacaaaaataacatcttcagtttttctcccactgggtcacctcaaggatcagaggccaggaaaaaaaaaaaaaagactccctggatctctgaatatatgcaaaaagaaggccccatttagtggagccagcaatcctgttcagtcaacaagtattttaactctcagtccaacattatttgaattgagcacctcaagcatgcttagcaatgttctaatcactatggacagatgtaaaagaaactatacatcatttttgccctctgcctgttttccagacatacaggttctgtggaataagatactggactcctcttcccaagatggcacttctttttatttcttgtccccagtgtgtaccttttaaaattattccctctcaacaaaactttataggcagtcttctgcagacttaacgtgttttctgtcatagttagatgtgataattctaagagtgtctatgacttatttccttcacttaattctatccacagtcaaaaatcccccaaggaggaaagctgaaagatgcactgccatattatctttcttaactttttccaacacataatcctctccaactggattataaataaattgaaaataactcattataccaattcactattttattttttaatgaattaaaactagaaaacaaattgatgcaaaccctggaagtcagttgattactatatactacagcagaatgactcagatttcatagaaaggagcaaccaaaatgtcacaacccaaaactttacaagctttgcttcagaattagattgctttataattcttgaatgaggcaatttcaagatatttgtaaaagaacagtaaacattggtaagaatgagctttcaactcataggcttatttccaatttaattgaccatactggatacttaggtcaaatttctgttctctcttccccaaataatattaaagtattatttgaactttttaagatgaggcagttcccctgaaaaagttaatgcagctctccatcagaatccactcttctagggatatgaaaatctcttaacacccaccctacatacacagacacacacacacacacacacacacacacacacacacacattcaccctaaggatccaatggaatactgaaaagaaatcacttccttgaaaattttattaaaaaacaaacaaacaaacaaaaagcctgtccacccttgagaatccttcctctccttggaacgtcaatgtttgtgtagatgaaaccatctcatgctctgtggctccagggtttctgttactattttatgcacttgggagaaggcttagaataaaagatgtagcacattttgctttcccatttattgtttggccagctatgccaatgtggtgctattgtttctttaagaaagtacttgactaaaaaaaaaagaaaaaaagaaaaaaaagaaagcatagacatatttttttaaagtataaaaacaacaattctatagatagatggcttaataaaatagcattaggtctatctagccaccaccacctttcaactttttatcactcacaagtagtgtactgttcaccaaattgtgaatttgggggtgcaggggcaggagttggaaattttttaaagttagaaggctccattgttttgttggctctcaaacttagcaaaattagcaatatattatccaatcttctgaacttgatcaagagcatggagaataaacgcgggaaaaaagatcttataggcaaatagaagaatttaaaagataagtaagttccttattgatttttgtgcactctgctctaaaacagatattcagcaagtggagaaaataagaacaaagagaaaaaatacatagatttacctgcaaaaaatagcttctgccaaatcccccttgggtattctttggcatttactggtttatagaagacattctcccttcacccagacatctcaaagagcagtagctctcatgaaaagcaatcactgatctcatttgggaaatgttggaaagtatttccttatgagatgggggttatctactgataaagaaagaatttatgagaaattgttgaaagagatggctaacaatctgtgaagattttttgtttcttgtttttgttttttttttttttttactttatacagtctttatgaatttcttaatgttcaaaatgacttggttcttttcttctttttttatatcagaatgaggaataataagttaaacccacatagactctttaaaactataggctagatagaaatgtatgtttgacttgttgaagctataatcagactatttaaaatgttttgctatttttaatcttaaaagattgtgctaatttattagagcagaacctgtttggctctcctcagaagaaagaatctttccattcaaatcacatggctttccaccaatattttcaaaagataaatctgatttatgcaatggcatcatttattttaaaacagaagaattgtgaaagtttatgcccctcccttgcaaagaccataaagtccagatctggtaggggggcaacaacaaaaggaaaatgttgttgattcttggttttggattttgttttgttttcaatgctagtgtttaatcctgtagtacatatttgcttattgctattttaatattttataagaccttcctgttaggtattagaaagtgatacatagatatcttttttgtgtaatttctatttaaaaaagagagaagactgtcagaagctttaagtgcatatggtacaggataaagatatcaatttaaataaccaattcctatctggaacaatgcttttgttttttaaagaaacctctcacagataagacagaggcccaggggatttttgaagctgtctttattctgcccccatcccaacccagcccttattattttagtatctgcctcagaattttatagagggctgaccaagctgaaactctagaattaaaggaacctcactgaaaacatatatttcacgtgttccctctttttttttttcctttttgtgagatggggtctcgcactgtcccccaggctggagtgcagtggcatgatctcggctcactgcaacctccacctcctgggtttaagcgattctcctgcctcagcctcctgagtagctgggattacaggcacccaccactatgcccggctaattttttggatttttaatagagacggggttttaccatgttggccaggttggtctcaaactcctgaccttgtgatttgcccgcctcagcctcccaaattgctgggattacaggcatgagccaccacaccctgcccatgtgttccctcttaatgtatgattacatggatcttaaacatgatccttctctcctcattcttcaactatctttgatggggtctttcaaggggaaaaaaatccaagcttttttaaagtaaaaaaaaaaaaagagaggacacaaaaccaaatgttactgctcaactgaaatatgagttaagatggagacagagtttctcctaataaccggagctgaattacctttcactttcaaaaacatgaccttccacaatccttagaatctgcctttttttatattactgaggcctaaaagtaaacattactcattttattttgcccaaaatgcactgatgtaaagtaggaaaaataaaaacagagctctaaaatccctttcaagccacccattgaccccactcaccaactcatagcaaagtcacttctgttaatcccttaatctgattttgtttggatatttatcttgtacccgctgctaaacacactgcaggagggactctgaaacctcaagctgtctacttacatcttttatctgtgtctgtgtatcatgaaaatgtctattcaaaatatcaaaacctttcaaatatcacgcagcttatattcagtttacataaaggccccaaataccatgtcagatctttttggtaaaagagttaatgaactatgagaattgggattacatcatgtattttgcctcatgtatttttatcacacttataggccaagtgtgataaataaacttacagacactgaattaatttcccctgctactttgaaaccagaaaataatgactggccattcgttacatctgtcttagttgaaaagcatattttttattaaattaattctgattgtatttgaaattattattcaattcacttatggcagaggaatatcaatcctaatgacttctaaaaatgtaactaattgaatcattatcttacatttactgtttaataagcatattttgaaaatgtatggctagagtgtcataataaaatggtatatctttctttagtaattacattaaaattagtcatgtttgattaa

SEQ ID NO: 143019 - DNA, 761 bp, Homo sapiens
  Payload ID: 8255
  Gene Symbol: IGF1
  Gene Name: insulin-like growth factor 1 (somatomedin C)
  Uniprot ID: P05019
  ENST ID: ENST00000392904
  CDS Start-End: 72-548
aatgttcccccagctgtttcctgtctacagtgtctgtgttttgtagataaatactttgtacttcagaagcaatgggaaaaatcagcagtcttccaacccaattatttaagtgctgcttttgtgatttcttgaaggtgaagatgcacaccatgtcctcctcgcatctcttctacctggcgctgtgcctgctcaccttcaccagctctgccacggctggaccggagacgctctgcggggctgagctggtggatgctcttcagttcgtgtgtggagacaggggcttttatttcaacaagcccacagggtatggctccagcagtcggagggcgcctcagacaggcatcgtggatgagtgctgcttccggagctgtgatctaaggaggctggagatgtattgcgcacccctcaagcctgccaagtcagctcgctctgtccgtgcccagcgccacaccgacatgcccaagacccagaagtatcagcccccatctaccaacaagaacacgaagtctcagagaaggaaaggaagtacatttgaagaacgcaagtagagggagtgcaggaaacaagaactacaggatgtaggaagaccctcctgaggagtgaagagtgacatgccaccgcaggatcctttgctctgcacgagttacctgttaaactttggaacacctaccaaaaaataagtttgataacatttaaaagatgggcgtttcccccaatgaaatacacaagtaaacattccaacattgtctttaggagtgatt

SEQ ID NO: 143020 - DNA, 444 bp, Homo sapiens
  Payload ID: 8255
  Gene Symbol: IGF1
  Gene Name: insulin-like growth factor 1 (somatomedin C)
  ENST ID: ENST00000392905
  CDS Start-End: 1-420
ttgaaggtgaagatgcacaccatgtcctcctcgcatctcttctacctggcgctgtgcctgctcaccttcaccagctctgccacggctggaccggagacgctctgcggggctgagctggtggatgctcttcagttcgtgtgtggagacaggggcttttatttcaacaagcccacagggtatggctccagcagtcggagggcgcctcagacaggcatcgtggatgagtgctgcttccggagctgtgatctaaggaggctggagatgtattgcgcacccctcaagcctgccaagtcagctcgctctgtccgtgcccagcgccacaccgacatgcccaagacccagaagtatcagcccccatctaccaacaagaacacgaagtctcagagaaggaaaggaagtacatttgaagaacgcaagtagagggagtgcaggaaacaagaacta

SEQ ID NO: 143021 - DNA, 7370 bp, Homo sapiens
  Payload ID: 8255
  Gene Symbol: IGF1
  Gene Name: insulin-like growth factor 1 (somatomedin C)
  Uniprot ID: P05019
  ENST ID: ENST00000456098
  CDS Start-End: 220-696
ttttgtagataaatgtgaggattttctctaaatccctcttctgtttgctaaatctcactgtcactgctaaattcagagcagatagagcctgcgcaatggaataaagtcctcaaaattgaaatgtgacattgctctcaacatctcccatctctctggatttctttttgcttcattattcctgctaaccaattcattttcagactttgtacttcagaagcaatgggaaaaatcagcagtcttccaacccaattatttaagtgctgcttttgtgatttcttgaaggtgaagatgcacaccatgtcctcctcgcatctcttctacctggcgctgtgcctgctcaccttcaccagctctgccacggctggaccggagacgctctgcggggctgagctggtggatgctcttcagttcgtgtgtggagacaggggcttttatttcaacaagcccacagggtatggctccagcagtcggagggcgcctcagacaggcatcgtggatgagtgctgcttccggagctgtgatctaaggaggctggagatgtattgcgcacccctcaagcctgccaagtcagctcgctctgtccgtgcccagcgccacaccgacatgcccaagacccagaagtatcagcccccatctaccaacaagaacacgaagtctcagagaaggaaaggaagtacatttgaagaacgcaagtagagggagtgcaggaaacaagaactacaggatgtaggaagaccctcctgaggagtgaagagtgacatgccaccgcaggatcctttgctctgcacgagttacctgttaaactttggaacacctaccaaaaaataagtttgataacatttaaaagatgggcgtttcccccaatgaaatacacaagtaaacattccaacattgtctttaggagtgatttgcaccttgcaaaaatggtcctggagttggtagattgctgttgatcttttatcaataatgttctatagaaaagaaaaaaaaaatatatatatatatatatcttagtccctgcctctcaagagccacaaatgcatgggtgttgtatagatccagttgcactaaattcctctctgaatcttggctgctggagccattcattcagcaaccttgtctaagtggtttatgaattgtttccttatttgcacttctttctacacaactcgggctgtttgttttacagtgtctgataatcttgttagtctatacccaccacctcccttcataacctttatatttgccgaatttggcctcctcaaaagcagcagcaagtcgtcaagaagcacaccaattctaacccacaagattccatctgtggcatttgtaccaaatataagttggatgcattttattttagacacaaagctttatttttccacatcatgcttacaaaaaagaataatgcaaatagttgcaactttgaggccaatcatttttaggcatatgttttaaacatagaaagtttcttcaactcaaaagagttccttcaaatgatgagttaatgtgcaacctaattagtaactttcctctttttattttttccatatagagcactatgtaaatttagcatatcaattatacaggatatatcaaacagtatgtaaaactctgttttttagtataatggtgctattttgtagtttgttatatgaaagagtctggccaaaacggtaatacgtgaaagcaaaacaataggggaagcctggagccaaagatgacacaaggggaagggtactgaaaacaccatccatttgggaaagaaggcaaagtccccccagttatgccttccaagaggaacttcagacacaaaagtccactgatgcaaattggactggcgagtccagagaggaaactgtggaatggaaaaagcagaaggctaggaattttagcagtcctggtttctttttctcatggaagaaatgaacatctgccagctgtgtcatggactcaccactgtgtgaccttgggcaagtcacttcacctctctgtgcctcagtttcctcatctgcaaaatgggggcaatatgtcatctacctacctcaaaggggtggtataaggtttaaaaagataaagattcagattttttttaccctgggttgctgtaagggtgcaacatcagggcgcttgagttgctgagatgcaaggaattctataaataacccattcatagcatagctagagattggtgaattgaatgctcctgacatctcagttcttgtcagtgaagctatccaaataactggccaactagttgttaaaagctaacagctcaatctcttaaaacacttttcaaaatatgtgggaagcatttgattttcaatttgattttgaattctgcatttggttttatgaatacaaagataagtgaaaagagagaaaggaaaagaaaaaggagaaaaacaaagagatttctaccagtgaaaggggaattaattactctttgttagcactcactgactcttctatgcagttactacatatctagtaaaacctcgtttaatactataaataatattctattcattttgaaaaacacaatgattccttcttttctaggcaatataaggaaagtgatccaaaatttgaaatattaaaataatatctaataaaaagtcacaaagttatcttctttaacaaactttactcttattcttagctgtatatacatttttttaaaagtttgttaaaatatgcttgactagagtttccagttgaaaggcaaaaacttccatcacaacaagaaatttcccatgcctgctcagaagggtagcccctagctctctgtgaatgtgttttatccattcaactgaaaattggtatcaagaaagtccactggttagtgtactagtccatcatagcctagaaaatgatccctatctgcagatcaagattttctcattagaacaatgaattatccagcattcagatctttctagtcaccttagaactttttggttaaaagtacccaggcttgattatttcatgcaaattctatattttacattcttggaaagtctatatgaaaaacaaaaataacatcttcagtttttctcccactgggtcacctcaaggatcagaggccaggaaaaaaaaaaaaaagactccctggatctctgaatatatgcaaaaagaaggccccatttagtggagccagcaatcctgttcagtcaacaagtattttaactctcagtccaacattatttgaattgagcacctcaagcatgcttagcaatgttctaatcactatggacagatgtaaaagaaactatacatcatttttgccctctgcctgttttccagacatacaggttctgtggaataagatactggactcctcttcccaagatggcacttctttttatttcttgtccccagtgtgtaccttttaaaattattccctctcaacaaaactttataggcagtcttctgcagacttaacgtgttttctgtcatagttagatgtgataattctaagagtgtctatgacttatttccttcacttaattctatccacagtcaaaaatcccccaaggaggaaagctgaaagatgcactgccatattatctttcttaactttttccaacacataatcctctccaactggattataaataaattgaaaataactcattataccaattcactattttattttttaatgaattaaaactagaaaacaaattgatgcaaaccctggaagtcagttgattactatatactacagcagaatgactcagatttcatagaaaggagcaaccaaaatgtcacaacccaaaactttacaagctttgcttcagaattagattgctttataattcttgaatgaggcaatttcaagatatttgtaaaagaacagtaaacattggtaagaatgagctttcaactcataggcttatttccaatttaattgaccatactggatacttaggtcaaatttctgttctctcttccccaaataatattaaagtattatttgaactttttaagatgaggcagttcccctgaaaaagttaatgcagctctccatcagaatccactcttctagggatatgaaaatctcttaacacccaccctacatacacagacacacacacacacacacacacacacacacacacacacattcaccctaaggatccaatggaatactgaaaagaaatcacttccttgaaaattttattaaaaaacaaacaaacaaacaaaaagcctgtccacccttgagaatccttcctctccttggaacgtcaatgtttgtgtagatgaaaccatctcatgctctgtggctccagggtttctgttactattttatgcacttgggagaaggcttagaataaaagatgtagcacattttgctttcccatttattgtttggccagctatgccaatgtggtgctattgtttctttaagaaagtacttgactaaaaaaaaaagaaaaaaagaaaaaaaagaaagcatagacatatttttttaaagtataaaaacaacaattctatagatagatggcttaataaaatagcattaggtctatctagccaccaccacctttcaactttttatcactcacaagtagtgtactgttcaccaaattgtgaatttgggggtgcaggggcaggagttggaaattttttaaagttagaaggctccattgttttgttggctctcaaacttagcaaaattagcaatatattatccaatcttctgaacttgatcaagagcatggagaataaacgcgggaaaaaagatcttataggcaaatagaagaatttaaaagataagtaagttccttattgatttttgtgcactctgctctaaaacagatattcagcaagtggagaaaataagaacaaagagaaaaaatacatagatttacctgcaaaaaatagcttctgccaaatcccccttgggtattctttggcatttactggtttatagaagacattctcccttcacccagacatctcaaagagcagtagctctcatgaaaagcaatcactgatctcatttgggaaatgttggaaagtatttccttatgagatgggggttatctactgataaagaaagaatttatgagaaattgttgaaagagatggctaacaatctgtgaagattttttgtttcttgtttttgttttttttttttttttactttatacagtctttatgaatttcttaatgttcaaaatgacttggttcttttcttctttttttatatcagaatgaggaataataagttaaacccacatagactctttaaaactataggctagatagaaatgtatgtttgacttgttgaagctataatcagactatttaaaatgttttgctatttttaatcttaaaagattgtgctaatttattagagcagaacctgtttggctctcctcagaagaaagaatctttccattcaaatcacatggctttccaccaatattttcaaaagataaatctgatttatgcaatggcatcatttattttaaaacagaagaattgtgaaagtttatgcccctcccttgcaaagaccataaagtccagatctggtaggggggcaacaacaaaaggaaaatgttgttgattcttggttttggattttgttttgttttcaatgctagtgtttaatcctgtagtacatatttgcttattgctattttaatattttataagaccttcctgttaggtattagaaagtgatacatagatatcttttttgtgtaatttctatttaaaaaagagagaagactgtcagaagctttaagtgcatatggtacaggataaagatatcaatttaaataaccaattcctatctggaacaatgcttttgttttttaaagaaacctctcacagataagacagaggcccaggggatttttgaagctgtctttattctgcccccatcccaacccagcccttattattttagtatctgcctcagaattttatagagggctgaccaagctgaaactctagaattaaaggaacctcactgaaaacatatatttcacgtgttccctctttttttttttcctttttgtgagatggggtctcgcactgtcccccaggctggagtgcagtggcatgatctcggctcactgcaacctccacctcctgggtttaagcgattctcctgcctcagcctcctgagtagctgggattacaggcacccaccactatgcccggctaattttttggatttttaatagagacggggttttaccatgttggccaggttggtctcaaactcctgaccttgtgatttgcccgcctcagcctcccaaattgctgggattacaggcatgagccaccacaccctgcccatgtgttccctcttaatgtatgattacatggatcttaaacatgatccttctctcctcattcttcaactatctttgatggggtctttcaaggggaaaaaaatccaagcttttttaaagtaaaaaaaaaaaaagagaggacacaaaaccaaatgttactgctcaactgaaatatgagttaagatggagacagagtttctcctaataaccggagctgaattacctttcactttcaaaaacatgaccttccacaatccttagaatctgcctttttttatattactgaggcctaaaagtaaacattactcattttattttgcccaaaatgcactgatgtaaagtaggaaaaataaaaacagagctctaaaatccctttcaagccacccattgaccccactcaccaactcatagcaaagtcacttctgttaatcccttaatctgattttgtttggatatttatcttgtacccgctgctaaacacactgcaggagggactctgaaacctcaagctgtctacttacatcttttatctgtgtctgtgtatcatgaaaatgtctattcaaaatatcaaaacctttcaaatatcacgcagcttatattcagtttacataaaggccccaaataccatgtcagatctttttggtaaaagagttaatgaactatgagaattgggattacatcatgtattttgcctcatgtatttttatcacacttataggccaagtgtgataaataaacttacagacactgaattaatttcccctgctactttgaaaccagaaaataatgactggccattcgttacatctgtcttagttgaaaagcatattttttattaaattaattctgattgtatttgaaattattattcaattcacttatggcagaggaatatcaatcctaatgacttctaaaaatgtaactaattgaatcattatcttacatttactgtttaataagcatattttgaaaatgtatggctagagtgtcataataaaatggtatatctttctttagtaattacattaaaattagtcatgtttgattaattagttc

SEQ ID NO: 143022 - DNA, 612 bp, Homo sapiens
  Payload ID: 8255
  Gene Symbol: IGF1
  Gene Name: insulin-like growth factor 1 (somatomedin C)
  Uniprot ID: P05019
  ENST ID: ENST00000424202
  CDS Start-End: 151-564
gcatacctgcctgggtgtccaaatgtaactagatgctttcacaaaccccacccacaaagcagcacatgtttttaagacttcagttttctattcacatcggcctcataatacccaccctgacctgctgtaaaagacctggaacaaacaaaaatgattacacctacagtgaagatgcacaccatgtcctcctcgcatctcttctacctggcgctgtgcctgctcaccttcaccagctctgccacggctggaccggagacgctctgcggggctgagctggtggatgctcttcagttcgtgtgtggagacaggggcttttatttcaacaagcccacagggtatggctccagcagtcggagggcgcctcagacaggcatcgtggatgagtgctgcttccggagctgtgatctaaggaggctggagatgtattgcgcacccctcaagcctgccaagtcagctcgctctgtccgtgcccagcgccacaccgacatgcccaagacccagaaggaagtacatttgaagaacgcaagtagagggagtgcaggaaacaagaactacaggatgtaggaagaccctcctgaggagtgaagagtgacatgccaccgcaggatcctt

SEQ ID NO: 143023 - DNA, 11803 bp, Homo sapiens
  Payload ID: 8256
  Gene Symbol: IGF1R
  Gene Name: insulin-like growth factor 1 receptor
  Uniprot ID: P08069
  ENST ID: ENST00000268035
  CDS Start-End: 612-4715
gggaaggagctcgccgcggcggcggcggcgctgagggaggaggcggcggcgagcggagccaggaggaggaggaggagggggagccgctcattcattttgactccgcgtttctgcccctcgccggcctcgcctgtgacccggacttcggggcgatcttgcgaactgcgtcgcgccctcccgcggcggaagctcgggcgtccggccgcctcccgcgcggccagggccgggcttgtttttcctcgcctaggcagatttgggctttgccccctttctttgcagttttccccccttcctgcctctccgggtttgaaaatggaggccgacgacgccgacagcccgccccggcgcgcctcgggttcccgactccgccgagccctgggccgctgctgccggcgctgaggggccgccccgcgccgcccgccccgtccgcgcacccggagggccccggcggcgccgccttcggagtattgtttccttcgcccttgtttttggagggggagcgaagactgagtttgagacttgtttcctttcatttcctttttttcttttcttttcttttttttttttttttttttttttgagaaaggggaatttcatcccaaataaaaggaatgaagtctggctccggaggagggtccccgacctcgctgtgggggctcctgtttctctccgccgcgctctcgctctggccgacgagtggagaaatctgcgggccaggcatcgacatccgcaacgactatcagcagctgaagcgcctggagaactgcacggtgatcgagggctacctccacatcctgctcatctccaaggccgaggactaccgcagctaccgcttccccaagctcacggtcattaccgagtacttgctgctgttccgagtggctggcctcgagagcctcggagacctcttccccaacctcacggtcatccgcggctggaaactcttctacaactacgccctggtcatcttcgagatgaccaatctcaaggatattgggctttacaacctgaggaacattactcggggggccatcaggattgagaaaaatgctgacctctgttacctctccactgtggactggtccctgatcctggatgcggtgtccaataactacattgtggggaataagcccccaaaggaatgtggggacctgtgtccagggaccatggaggagaagccgatgtgtgagaagaccaccatcaacaatgagtacaactaccgctgctggaccacaaaccgctgccagaaaatgtgcccaagcacgtgtgggaagcgggcgtgcaccgagaacaatgagtgctgccaccccgagtgcctgggcagctgcagcgcgcctgacaacgacacggcctgtgtagcttgccgccactactactatgccggtgtctgtgtgcctgcctgcccgcccaacacctacaggtttgagggctggcgctgtgtggaccgtgacttctgcgccaacatcctcagcgccgagagcagcgactccgaggggtttgtgatccacgacggcgagtgcatgcaggagtgcccctcgggcttcatccgcaacggcagccagagcatgtactgcatcccttgtgaaggtccttgcccgaaggtctgtgaggaagaaaagaaaacaaagaccattgattctgttacttctgctcagatgctccaaggatgcaccatcttcaagggcaatttgctcattaacatccgacgggggaataacattgcttcagagctggagaacttcatggggctcatcgaggtggtgacgggctacgtgaagatccgccattctcatgccttggtctccttgtccttcctaaaaaaccttcgcctcatcctaggagaggagcagctagaagggaattactccttctacgtcctcgacaaccagaacttgcagcaactgtgggactgggaccaccgcaacctgaccatcaaagcagggaaaatgtactttgctttcaatcccaaattatgtgtttccgaaatttaccgcatggaggaagtgacggggactaaagggcgccaaagcaaaggggacataaacaccaggaacaacggggagagagcctcctgtgaaagtgacgtcctgcatttcacctccaccaccacgtcgaagaatcgcatcatcataacctggcaccggtaccggccccctgactacagggatctcatcagcttcaccgtttactacaaggaagcaccctttaagaatgtcacagagtatgatgggcaggatgcctgcggctccaacagctggaacatggtggacgtggacctcccgcccaacaaggacgtggagcccggcatcttactacatgggctgaagccctggactcagtacgccgtttacgtcaaggctgtgaccctcaccatggtggagaacgaccatatccgtggggccaagagtgagatcttgtacattcgcaccaatgcttcagttccttccattcccttggacgttctttcagcatcgaactcctcttctcagttaatcgtgaagtggaaccctccctctctgcccaacggcaacctgagttactacattgtgcgctggcagcggcagcctcaggacggctacctttaccggcacaattactgctccaaagacaaaatccccatcaggaagtatgccgacggcaccatcgacattgaggaggtcacagagaaccccaagactgaggtgtgtggtggggagaaagggccttgctgcgcctgccccaaaactgaagccgagaagcaggccgagaaggaggaggctgaataccgcaaagtctttgagaatttcctgcacaactccatcttcgtgcccagacctgaaaggaagcggagagatgtcatgcaagtggccaacaccaccatgtccagccgaagcaggaacaccacggccgcagacacctacaacatcaccgacccggaagagctggagacagagtaccctttctttgagagcagagtggataacaaggagagaactgtcatttctaaccttcggcctttcacattgtaccgcatcgatatccacagctgcaaccacgaggctgagaagctgggctgcagcgcctccaacttcgtctttgcaaggactatgcccgcagaaggagcagatgacattcctgggccagtgacctgggagccaaggcctgaaaactccatctttttaaagtggccggaacctgagaatcccaatggattgattctaatgtatgaaataaaatacggatcacaagttgaggatcagcgagaatgtgtgtccagacaggaatacaggaagtatggaggggccaagctaaaccggctaaacccggggaactacacagcccggattcaggccacatctctctctgggaatgggtcgtggacagatcctgtgttcttctatgtccaggccaaaacaggatatgaaaacttcatccatctgatcatcgctctgcccgtcgctgtcctgttgatcgtgggagggttggtgattatgctgtacgtcttccatagaaagagaaataacagcaggctggggaatggagtgctgtatgcctctgtgaacccggagtacttcagcgctgctgatgtgtacgttcctgatgagtgggaggtggctcgggagaagatcaccatgagccgggaacttgggcaggggtcgtttgggatggtctatgaaggagttgccaagggtgtggtgaaagatgaacctgaaaccagagtggccattaaaacagtgaacgaggccgcaagcatgcgtgagaggattgagtttctcaacgaagcttctgtgatgaaggagttcaattgtcaccatgtggtgcgattgctgggtgtggtgtcccaaggccagccaacactggtcatcatggaactgatgacacggggcgatctcaaaagttatctccggtctctgaggccagaaatggagaataatccagtcctagcacctccaagcctgagcaagatgattcagatggccggagagattgcagacggcatggcatacctcaacgccaataagttcgtccacagagaccttgctgcccggaattgcatggtagccgaagatttcacagtcaaaatcggagattttggtatgacgcgagatatctatgagacagactattaccggaaaggagggaaagggctgctgcccgtgcgctggatgtctcctgagtccctcaaggatggagtcttcaccacttactcggacgtctggtccttcggggtcgtcctctgggagatcgccacactggccgagcagccctaccagggcttgtccaacgagcaagtccttcgcttcgtcatggagggcggccttctggacaagccagacaactgtcctgacatgctgtttgaactgatgcgcatgtgctggcagtataaccccaagatgaggccttccttcctggagatcatcagcagcatcaaagaggagatggagcctggcttccgggaggtctccttctactacagcgaggagaacaagctgcccgagccggaggagctggacctggagccagagaacatggagagcgtccccctggacccctcggcctcctcgtcctccctgccactgcccgacagacactcaggacacaaggccgagaacggccccggccctggggtgctggtcctccgcgccagcttcgacgagagacagccttacgcccacatgaacgggggccgcaagaacgagcgggccttgccgctgccccagtcttcgacctgctgatccttggatcctgaatctgtgcaaacagtaacgtgtgcgcacgcgcagcggggtggggggggagagagagttttaacaatccattcacaagcctcctgtacctcagtggatcttcagaactgcccttgctgcccgcgggagacagcttctctgcagtaaaacacatttgggatgttccttttttcaatatgcaagcagctttttattccctgcccaaacccttaactgacatgggcctttaagaaccttaatgacaacacttaatagcaacagagcacttgagaaccagtctcctcactctgtccctgtccttccctgttctccctttctctctcctctctgcttcataacggaaaaataattgccacaagtccagctgggaagccctttttatcagtttgaggaagtggctgtccctgtggccccatccaaccactgtacacacccgcctgacaccgtgggtcattacaaaaaaacacgtggagatggaaatttttacctttatctttcacctttctagggacatgaaatttacaaagggccatcgttcatccaaggctgttaccattttaacgctgcctaattttgccaaaatcctgaactttctccctcatcggcccggcgctgattcctcgtgtccggaggcatgggtgagcatggcagctggttgctccatttgagagacacgctggcgacacactccgtccatccgactgcccctgctgtgctgctcaaggccacaggcacacaggtctcattgcttctgactagattattatttgggggaactggacacaataggtctttctctcagtgaaggtggggagaagctgaaccggcttccctgccctgcctccccagccccctgcccaacccccaagaatctggtggccatgggccccgaagcagcctggcggacaggcttggagtcaaggggccccatgcctgcttctctcccagccccagctcccccgcccgcccccaaggacacagatgggaaggggtttccagggactcagccccactgttgatgcaggtttgcaaggaaagaaattcaaacaccacaacagcagtaagaagaaaagcagtcaatggattcaagcattctaagctttgttgacattttctctgttcctaggacttcttcatgggtcttacagttctatgttagaccatgaaacatttgcatacacatcgtctttaatgtcacttttataacttttttacggttcagatattcatctatacgtctgtacagaaaaaaaaaagctgctattttttttgttcttgatctttgtggatttaatctatgaaaaccttcaggtccaccctctcccctttctgctcactccaagaaacttcttatgctttgtactagagtgcgtgactttcttcctcttttcccggtaatggatacttctatcacataatttgccatgaactgttggatgcctttttataaatacatcccccatccctgctcccacctgcccctttagttgttttctaacccgtaggctctctgggcacgaggcagaaagcaggccgggcacccatcctgagagggccgcgctcctctccccagcctgccctcacagcattggagcctgttacagtgcaagacatgatacaaactcaggtcagaaaaacaaaggttaaatatttcacacgtctttgttcagtgtttccactcaccgtggttgagaagcctcaccctctctttcccttgcctttgcttaggttgtgacacacatatatatatatttttttaattcttgggtacaacagcagtgttaaccgcagacactaggcatttggattactatttttcttaatggctatttaatccttccatcccacgaaaaacagctgctgagtccaagggagcagcagagcgtggtccggcagggcctgttgtggccctcgccacccccctcaccggaccgactgacctgtctttggaaccagaacatcccaagggaactccttcgcactggcgttgagtgggaccccgggatccaggctggcccagggcggcaccctcagggctgtgcccgctggagtgctaggtggaggcagcacagacgccacggtggcccaagagcccctttgcttcttgctgggggaccagggctgtggtgctggcccactttccctcggccaggaatccaggtccttggggcccaggggtcttgtcttgtttcatttttagcacttctcaccagagagatgacagcacaagagttgcttctgggatagaaatgtttaggagtaagaacaaagctgggatacggtgattgctagttgtgactgaagattcaacacagaaaagaaagtttatacggcttttttgctggtcagcagtttgtcccactgctttctctagtctctatcccatagcgtgttccctttaaaaaaaaaaaaaaggtattatatgtaggagttttcttttaatttattttgtgataaattaccagtttcaatcactgtagaaaagccccattatgaatttaaatttcaaggaaagggtgtgtgtgtgtgtatgtgtggggtgtgtgtgtgtgagagtgatgggacagttcttgattttttgggttttttttcccccaaacatttatctacctcactcttattttttatatgtgtatatagacaaaagaatacatctcacctttctcagcacctgacaataggccgttgatactggtaacctcatccacgccacaggcgccacacccaggtgatgcagggggaagccaggctgtattccggggtcaaagcaacactaactcacctctctgctcatttcagacagcttgcctttttctgagatgtcctgttttgtgttgctttttttgttttgttttctatcttggtttccaccaaggtgttagatttctcctcctcctagccaggtggccctgtgaggccaacgagggcaccagagcacacctgggggagccaccaggctgtccctggctggttgtctttggaacaaactgcttctgtgcagatggaatgaccaacacatttcgtccttaagagagcagtggttcctcaggttctgaggagaggaaggtgtccaggcagcaccatctctgtgcgaatccccagggtaaaggcgtggggcattgggtttgctccccttgctgctgctccatccctgcaggaggctcgcgctgaggcaggaccgtgcggccatggctgctgcattcattgagcacaaaggtgcagctgcagcagcagctggagagcaagagtcacccagcctgtgcgccagaatgcagaggctcctgacctcacagccagtccctgatagaacacacgcaggagcagagtcccctccccctccaggctgccctctcaacttctccctcacctccttccctaggggtagacagagatgtaccaaaccttccggctggaaagcccagtggccggcgccgaggctcgtggcgtcacgccccccccgccagggctgtacctccgtctccctggtcctgctgctcacaggacagacggctcgctcccctcttccagcagctgctcttacaggcactgatgatttcgctgggaagtgtggcgggcagctttgcctaagcgtggatggctcctcggcaattccagcctaagtgaaggcgctcaggagcctcctgctggaacgcgacccatctctcccaggaccccggggatcttaaggtcattgagaaatactgttggatcagggttttgttcttccacactgtaggtgaccccttggaataacggcctctcctctcgtgcacatacctaccggtttccacaactggatttctacagatcattcagctggttataagggttttgtttaaactgtccgagttactgatgtcattttgtttttgttttatgtaggtagcttttaagtagaaaacactaacagtgtagtgcccatcatagcaaatgcttcagaaacacctcaataaaagagaaaacttggcttgtgtgatggtgcagtcactttactggaccaacccacccaccttgactataccaaggcatcatctatccacagttctagcctaacttcatgctgatttctctgcctcttgatttttctctgtgtgttccaaataatcttaagctgagttgtggcattttccatgcaacctccttctgccagcagctcacactgcttgaagtcatatgaaccactgaggcacatcatggaattgatgtgagcattaagacgttctcccacacagcccttccctgaggcagcaggagctggtgtgtactggagacactgttgaacttgatcaagacccagaccaccccaggtctccttcgtgggatgtcatgacgtttgacatacctttggaacgagcctcctccttggaagatggaagaccgtgttcgtggccgacctggcctctcctggcctgtttcttaagatgcggagtcacatttcaatggtacgaaaagtggcttcgtaaaatagaagagcagtcactgtggaactaccaaatggcgagatgctcggtgcacattggggtgctttgggataaaagatttatgagccaactattctctggcaccagattctaggccagtttgttccactgaagcttttcccacagcagtccacctctgcaggctggcagccgaatggcttgccagtggctctgtggcaagatcacactgagatcgatgggtgagaaggctaggatgcttgtctagtgttcttagctgtcacgttggctccttccagggtggccagacggtgttggccactcccttctaaaacacaggcgccctcctggtgacagtgacccgccgtggtatgccttggcccattccagcagtcccagttatgcatttcaagtttggggtttgttcttttcgttaatgttcctctgtgttgtcagctgtcttcatttcctgggctaagcagcattgggagatgtggaccagagatccactccttaagaaccagtggcgaaagacactttctttcttcactctgaagtagctggtggtacaaatgagaacttcaagagaggatgttatttagactgaacctctgttgccagagatgctgaagatacagaccttggacaggtcagagggtttcatttttggccttcatcttagatgactggttgcgtcatttggagaagtgagtgctccttgatggtggaatgaccgggtggtgggtacagaaccattgtcacagggatcctggcacagagaagagttacgagcagcagggtgcagggcttggaaggaatgtgggcaaggttttgaacttgattgttcttgaagctatcagaccacatcgaggctcagcagtcatccgtgggcatttggtttcaacaaagaaacctaacatcctactctggaaactgatctcggagttaaggcgaattgttcaagaacacaaactacatcgcactcgtcagttgtcagttctggggcatgactttagcgttttgtttctgcgagaacataacgatcactcatttttatgtcccacgtgtgtgtgtccgcatctttctggtcaacattgttttaactagtcactcattagcgttttcaatagggctcttaagtccagtagattacgggtagtcagttgacgaagatctggtttacaagaactaattaaatgtttcattgcatttttgtaagaacagaataattttataaaatgtttgtagtttataattgccgaaaataatttaaagacactttttttttctctgtgtgtgcaaatgtgtgtttgtgatccattttttttttttttttttaggacacctgtttactagctagctttacaatatgccaaaaaaggatttctccctgaccccatccgtggttcaccctcttttccccccatgctttttgccctagtttataacaaaggaatgatgatgatttaaaaagtagttctgtatcttcagtatcttggtcttccagaaccctctggttgggaaggggatcattttttactggtcatttccctttggagtgtagctactttaacagatggaaagaacctcattggccatggaaacagccgaggtgttggagcccagcagtgcatggcaccgttcggcatctggcttgattggtctggctgccgtcattgtcagcacagtgccatggacatgggaagacttgactgcacagccaatggttttcatgatgattacagcatacacagtgatcacataaacgatgacagctatggggcacacaggccatttgcttacatgcctcgtatcatgactgattactgctttgttagaacacagaagagaccctattttatttaaggcagaaccccgaagatacgtatttccaatacagaaaagaatttttaataaaaactataacatacacaaaaattggttttaaagttgactccacttcctctaactccagtggattgttggccatgtctccccaactccacaatatctctatcatgggaaacacctggggtttttgcgctacataggagaaagatctggaaactatttgggttttgttttcaacttttcatttggatgtttggcgttgcacacacacatccaccggtggaagagacgcccggtgaaaacacctgtctgctttctaagccagtgaggttgaggtgagaggtttgccagagtttgtctacctctgggtatccctttgtctgggataaaaaaaatcaaaccagaaggcgggatggaatggatgcaccgcaaataatgcattttctgagttttcttgttaaaaaaaaatttttttaagtaagaaaaaaaaaggtaataacatggccaatttgttacataaaatgactttctgtgtataaattattcctaaaaaatcctgtttatataaaaaatcagtagatgaaaaaaatttcaaaatgtttttgtatattctgttgtaagaatttattcctgttattgcgatatactctggattctttacataatggaaaaaagaaactgtctattttgaatggctgaagctaaggcaacgttagtttctcttactctgcttttttctagtaaagtactacatggtttaagttaaataaaataattctgtatgca

SEQ ID NO: 143024 - DNA, 11726 bp, Homo sapiens
  Payload ID: 8256
  Gene Symbol: IGF1R
  Gene Name: insulin-like growth factor 1 receptor
  ENST ID: ENST00000558762
  CDS Start-End: 539-4639
ggagggggagccgctcattcattttgactccgcgtttctgcccctcgccggcctcgcctgtgacccggacttcggggcgatcttgcgaactgcgtcgcgccctcccgcggcggaagctcgggcgtccggccgcctcccgcgcggccagggccgggcttgtttttcctcgcctaggcagatttgggctttgccccctttctttgcagttttccccccttcctgcctctccgggtttgaaaatggaggccgacgacgccgacagcccgccccggcgcgcctcgggttcccgactccgccgagccctgggccgctgctgccggcgctgaggggccgccccgcgccgcccgccccgtccgcgcacccggagggccccggcggcgccgccttcggagtattgtttccttcgcccttgtttttggagggggagcgaagactgagtttgagacttgtttcctttcatttcctttttttcttttcttttcttttttttttttttttttttttttgagaaaggggaatttcatcccaaataaaaggaatgaagtctggctccggaggagggtccccgacctcgctgtgggggctcctgtttctctccgccgcgctctcgctctggccgacgagtggagaaatctgcgggccaggcatcgacatccgcaacgactatcagcagctgaagcgcctggagaactgcacggtgatcgagggctacctccacatcctgctcatctccaaggccgaggactaccgcagctaccgcttccccaagctcacggtcattaccgagtacttgctgctgttccgagtggctggcctcgagagcctcggagacctcttccccaacctcacggtcatccgcggctggaaactcttctacaactacgccctggtcatcttcgagatgaccaatctcaaggatattgggctttacaacctgaggaacattactcggggggccatcaggattgagaaaaatgctgacctctgttacctctccactgtggactggtccctgatcctggatgcggtgtccaataactacattgtggggaataagcccccaaaggaatgtggggacctgtgtccagggaccatggaggagaagccgatgtgtgagaagaccaccatcaacaatgagtacaactaccgctgctggaccacaaaccgctgccagaaaatgtgcccaagcacgtgtgggaagcgggcgtgcaccgagaacaatgagtgctgccaccccgagtgcctgggcagctgcagcgcgcctgacaacgacacggcctgtgtagcttgccgccactactactatgccggtgtctgtgtgcctgcctgcccgcccaacacctacaggtttgagggctggcgctgtgtggaccgtgacttctgcgccaacatcctcagcgccgagagcagcgactccgaggggtttgtgatccacgacggcgagtgcatgcaggagtgcccctcgggcttcatccgcaacggcagccagagcatgtactgcatcccttgtgaaggtccttgcccgaaggtctgtgaggaagaaaagaaaacaaagaccattgattctgttacttctgctcagatgctccaaggatgcaccatcttcaagggcaatttgctcattaacatccgacgggggaataacattgcttcagagctggagaacttcatggggctcatcgaggtggtgacgggctacgtgaagatccgccattctcatgccttggtctccttgtccttcctaaaaaaccttcgcctcatcctaggagaggagcagctagaagggaattactccttctacgtcctcgacaaccagaacttgcagcaactgtgggactgggaccaccgcaacctgaccatcaaagcagggaaaatgtactttgctttcaatcccaaattatgtgtttccgaaatttaccgcatggaggaagtgacggggactaaagggcgccaaagcaaaggggacataaacaccaggaacaacggggagagagcctcctgtgaaagtgacgtcctgcatttcacctccaccaccacgtcgaagaatcgcatcatcataacctggcaccggtaccggccccctgactacagggatctcatcagcttcaccgtttactacaaggaagcaccctttaagaatgtcacagagtatgatgggcaggatgcctgcggctccaacagctggaacatggtggacgtggacctcccgcccaacaaggacgtggagcccggcatcttactacatgggctgaagccctggactcagtacgccgtttacgtcaaggctgtgaccctcaccatggtggagaacgaccatatccgtggggccaagagtgagatcttgtacattcgcaccaatgcttcagttccttccattcccttggacgttctttcagcatcgaactcctcttctcagttaatcgtgaagtggaaccctccctctctgcccaacggcaacctgagttactacattgtgcgctggcagcggcagcctcaggacggctacctttaccggcacaattactgctccaaagacaaaatccccatcaggaagtatgccgacggcaccatcgacattgaggaggtcacagagaaccccaagactgaggtgtgtggtggggagaaagggccttgctgcgcctgccccaaaactgaagccgagaagcaggccgagaaggaggaggctgaataccgcaaagtctttgagaatttcctgcacaactccatcttcgtgcccagacctgaaaggaagcggagagatgtcatgcaagtggccaacaccaccatgtccagccgaagcaggaacaccacggccgcagacacctacaacatcaccgacccggaagagctggagacagagtaccctttctttgagagcagagtggataacaaggagagaactgtcatttctaaccttcggcctttcacattgtaccgcatcgatatccacagctgcaaccacgaggctgagaagctgggctgcagcgcctccaacttcgtctttgcaaggactatgcccgcagaaggagcagatgacattcctgggccagtgacctgggagccaaggcctgaaaactccatctttttaaagtggccggaacctgagaatcccaatggattgattctaatgtatgaaataaaatacggatcacaagttgaggatcagcgagaatgtgtgtccagacaggaatacaggaagtatggaggggccaagctaaaccggctaaacccggggaactacacagcccggattcaggccacatctctctctgggaatgggtcgtggacagatcctgtgttcttctatgtccaggccaaaagatatgaaaacttcatccatctgatcatcgctctgcccgtcgctgtcctgttgatcgtgggagggttggtgattatgctgtacgtcttccatagaaagagaaataacagcaggctggggaatggagtgctgtatgcctctgtgaacccggagtacttcagcgctgctgatgtgtacgttcctgatgagtgggaggtggctcgggagaagatcaccatgagccgggaacttgggcaggggtcgtttgggatggtctatgaaggagttgccaagggtgtggtgaaagatgaacctgaaaccagagtggccattaaaacagtgaacgaggccgcaagcatgcgtgagaggattgagtttctcaacgaagcttctgtgatgaaggagttcaattgtcaccatgtggtgcgattgctgggtgtggtgtcccaaggccagccaacactggtcatcatggaactgatgacacggggcgatctcaaaagttatctccggtctctgaggccagaaatggagaataatccagtcctagcacctccaagcctgagcaagatgattcagatggccggagagattgcagacggcatggcatacctcaacgccaataagttcgtccacagagaccttgctgcccggaattgcatggtagccgaagatttcacagtcaaaatcggagattttggtatgacgcgagatatctatgagacagactattaccggaaaggagggaaagggctgctgcccgtgcgctggatgtctcctgagtccctcaaggatggagtcttcaccacttactcggacgtctggtccttcggggtcgtcctctgggagatcgccacactggccgagcagccctaccagggcttgtccaacgagcaagtccttcgcttcgtcatggagggcggccttctggacaagccagacaactgtcctgacatgctgtttgaactgatgcgcatgtgctggcagtataaccccaagatgaggccttccttcctggagatcatcagcagcatcaaagaggagatggagcctggcttccgggaggtctccttctactacagcgaggagaacaagctgcccgagccggaggagctggacctggagccagagaacatggagagcgtccccctggacccctcggcctcctcgtcctccctgccactgcccgacagacactcaggacacaaggccgagaacggccccggccctggggtgctggtcctccgcgccagcttcgacgagagacagccttacgcccacatgaacgggggccgcaagaacgagcgggccttgccgctgccccagtcttcgacctgctgatccttggatcctgaatctgtgcaaacagtaacgtgtgcgcacgcgcagcggggtggggggggagagagagttttaacaatccattcacaagcctcctgtacctcagtggatcttcagaactgcccttgctgcccgcgggagacagcttctctgcagtaaaacacatttgggatgttccttttttcaatatgcaagcagctttttattccctgcccaaacccttaactgacatgggcctttaagaaccttaatgacaacacttaatagcaacagagcacttgagaaccagtctcctcactctgtccctgtccttccctgttctccctttctctctcctctctgcttcataacggaaaaataattgccacaagtccagctgggaagccctttttatcagtttgaggaagtggctgtccctgtggccccatccaaccactgtacacacccgcctgacaccgtgggtcattacaaaaaaacacgtggagatggaaatttttacctttatctttcacctttctagggacatgaaatttacaaagggccatcgttcatccaaggctgttaccattttaacgctgcctaattttgccaaaatcctgaactttctccctcatcggcccggcgctgattcctcgtgtccggaggcatgggtgagcatggcagctggttgctccatttgagagacacgctggcgacacactccgtccatccgactgcccctgctgtgctgctcaaggccacaggcacacaggtctcattgcttctgactagattattatttgggggaactggacacaataggtctttctctcagtgaaggtggggagaagctgaaccggcttccctgccctgcctccccagccccctgcccaacccccaagaatctggtggccatgggccccgaagcagcctggcggacaggcttggagtcaaggggccccatgcctgcttctctcccagccccagctcccccgcccgcccccaaggacacagatgggaaggggtttccagggactcagccccactgttgatgcaggtttgcaaggaaagaaattcaaacaccacaacagcagtaagaagaaaagcagtcaatggattcaagcattctaagctttgttgacattttctctgttcctaggacttcttcatgggtcttacagttctatgttagaccatgaaacatttgcatacacatcgtctttaatgtcacttttataacttttttacggttcagatattcatctatacgtctgtacagaaaaaaaaaagctgctattttttttgttcttgatctttgtggatttaatctatgaaaaccttcaggtccaccctctcccctttctgctcactccaagaaacttcttatgctttgtactagagtgcgtgactttcttcctcttttcccggtaatggatacttctatcacataatttgccatgaactgttggatgcctttttataaatacatcccccatccctgctcccacctgcccctttagttgttttctaacccgtaggctctctgggcacgaggcagaaagcaggccgggcacccatcctgagagggccgcgctcctctccccagcctgccctcacagcattggagcctgttacagtgcaagacatgatacaaactcaggtcagaaaaacaaaggttaaatatttcacacgtctttgttcagtgtttccactcaccgtggttgagaagcctcaccctctctttcccttgcctttgcttaggttgtgacacacatatatatatatttttttaattcttgggtacaacagcagtgttaaccgcagacactaggcatttggattactatttttcttaatggctatttaatccttccatcccacgaaaaacagctgctgagtccaagggagcagcagagcgtggtccggcagggcctgttgtggccctcgccacccccctcaccggaccgactgacctgtctttggaaccagaacatcccaagggaactccttcgcactggcgttgagtgggaccccgggatccaggctggcccagggcggcaccctcagggctgtgcccgctggagtgctaggtggaggcagcacagacgccacggtggcccaagagcccctttgcttcttgctgggggaccagggctgtggtgctggcccactttccctcggccaggaatccaggtccttggggcccaggggtcttgtcttgtttcatttttagcacttctcaccagagagatgacagcacaagagttgcttctgggatagaaatgtttaggagtaagaacaaagctgggatacggtgattgctagttgtgactgaagattcaacacagaaaagaaagtttatacggcttttttgctggtcagcagtttgtcccactgctttctctagtctctatcccatagcgtgttccctttaaaaaaaaaaaaaaggtattatatgtaggagttttcttttaatttattttgtgataaattaccagtttcaatcactgtagaaaagccccattatgaatttaaatttcaaggaaagggtgtgtgtgtgtgtatgtgtggggtgtgtgtgtgtgagagtgatgggacagttcttgattttttgggttttttttcccccaaacatttatctacctcactcttattttttatatgtgtatatagacaaaagaatacatctcacctttctcagcacctgacaataggccgttgatactggtaacctcatccacgccacaggcgccacacccaggtgatgcagggggaagccaggctgtattccggggtcaaagcaacactaactcacctctctgctcatttcagacagcttgcctttttctgagatgtcctgttttgtgttgctttttttgttttgttttctatcttggtttccaccaaggtgttagatttctcctcctcctagccaggtggccctgtgaggccaacgagggcaccagagcacacctgggggagccaccaggctgtccctggctggttgtctttggaacaaactgcttctgtgcagatggaatgaccaacacatttcgtccttaagagagcagtggttcctcaggttctgaggagaggaaggtgtccaggcagcaccatctctgtgcgaatccccagggtaaaggcgtggggcattgggtttgctccccttgctgctgctccatccctgcaggaggctcgcgctgaggcaggaccgtgcggccatggctgctgcattcattgagcacaaaggtgcagctgcagcagcagctggagagcaagagtcacccagcctgtgcgccagaatgcagaggctcctgacctcacagccagtccctgatagaacacacgcaggagcagagtcccctccccctccaggctgccctctcaacttctccctcacctccttccctaggggtagacagagatgtaccaaaccttccggctggaaagcccagtggccggcgccgaggctcgtggcgtcacgccccccccgccagggctgtacctccgtctccctggtcctgctgctcacaggacagacggctcgctcccctcttccagcagctgctcttacaggcactgatgatttcgctgggaagtgtggcgggcagctttgcctaagcgtggatggctcctcggcaattccagcctaagtgaaggcgctcaggagcctcctgctggaacgcgacccatctctcccaggaccccggggatcttaaggtcattgagaaatactgttggatcagggttttgttcttccacactgtaggtgaccccttggaataacggcctctcctctcgtgcacatacctaccggtttccacaactggatttctacagatcattcagctggttataagggttttgtttaaactgtccgagttactgatgtcattttgtttttgttttatgtaggtagcttttaagtagaaaacactaacagtgtagtgcccatcatagcaaatgcttcagaaacacctcaataaaagagaaaacttggcttgtgtgatggtgcagtcactttactggaccaacccacccaccttgactataccaaggcatcatctatccacagttctagcctaacttcatgctgatttctctgcctcttgatttttctctgtgtgttccaaataatcttaagctgagttgtggcattttccatgcaacctccttctgccagcagctcacactgcttgaagtcatatgaaccactgaggcacatcatggaattgatgtgagcattaagacgttctcccacacagcccttccctgaggcagcaggagctggtgtgtactggagacactgttgaacttgatcaagacccagaccaccccaggtctccttcgtgggatgtcatgacgtttgacatacctttggaacgagcctcctccttggaagatggaagaccgtgttcgtggccgacctggcctctcctggcctgtttcttaagatgcggagtcacatttcaatggtacgaaaagtggcttcgtaaaatagaagagcagtcactgtggaactaccaaatggcgagatgctcggtgcacattggggtgctttgggataaaagatttatgagccaactattctctggcaccagattctaggccagtttgttccactgaagcttttcccacagcagtccacctctgcaggctggcagccgaatggcttgccagtggctctgtggcaagatcacactgagatcgatgggtgagaaggctaggatgcttgtctagtgttcttagctgtcacgttggctccttccagggtggccagacggtgttggccactcccttctaaaacacaggcgccctcctggtgacagtgacccgccgtggtatgccttggcccattccagcagtcccagttatgcatttcaagtttggggtttgttcttttcgttaatgttcctctgtgttgtcagctgtcttcatttcctgggctaagcagcattgggagatgtggaccagagatccactccttaagaaccagtggcgaaagacactttctttcttcactctgaagtagctggtggtacaaatgagaacttcaagagaggatgttatttagactgaacctctgttgccagagatgctgaagatacagaccttggacaggtcagagggtttcatttttggccttcatcttagatgactggttgcgtcatttggagaagtgagtgctccttgatggtggaatgaccgggtggtgggtacagaaccattgtcacagggatcctggcacagagaagagttacgagcagcagggtgcagggcttggaaggaatgtgggcaaggttttgaacttgattgttcttgaagctatcagaccacatcgaggctcagcagtcatccgtgggcatttggtttcaacaaagaaacctaacatcctactctggaaactgatctcggagttaaggcgaattgttcaagaacacaaactacatcgcactcgtcagttgtcagttctggggcatgactttagcgttttgtttctgcgagaacataacgatcactcatttttatgtcccacgtgtgtgtgtccgcatctttctggtcaacattgttttaactagtcactcattagcgttttcaatagggctcttaagtccagtagattacgggtagtcagttgacgaagatctggtttacaagaactaattaaatgtttcattgcatttttgtaagaacagaataattttataaaatgtttgtagtttataattgccgaaaataatttaaagacactttttttttctctgtgtgtgcaaatgtgtgtttgtgatccattttttttttttttttttaggacacctgtttactagctagctttacaatatgccaaaaaaggatttctccctgaccccatccgtggttcaccctcttttccccccatgctttttgccctagtttataacaaaggaatgatgatgatttaaaaagtagttctgtatcttcagtatcttggtcttccagaaccctctggttgggaaggggatcattttttactggtcatttccctttggagtgtagctactttaacagatggaaagaacctcattggccatggaaacagccgaggtgttggagcccagcagtgcatggcaccgttcggcatctggcttgattggtctggctgccgtcattgtcagcacagtgccatggacatgggaagacttgactgcacagccaatggttttcatgatgattacagcatacacagtgatcacataaacgatgacagctatggggcacacaggccatttgcttacatgcctcgtatcatgactgattactgctttgttagaacacagaagagaccctattttatttaaggcagaaccccgaagatacgtatttccaatacagaaaagaatttttaataaaaactataacatacacaaaaattggttttaaagttgactccacttcctctaactccagtggattgttggccatgtctccccaactccacaatatctctatcatgggaaacacctggggtttttgcgctacataggagaaagatctggaaactatttgggttttgttttcaacttttcatttggatgtttggcgttgcacacacacatccaccggtggaagagacgcccggtgaaaacacctgtctgctttctaagccagtgaggttgaggtgagaggtttgccagagtttgtctacctctgggtatccctttgtctgggataaaaaaaatcaaaccagaaggcgggatggaatggatgcaccgcaaataatgcattttctgagttttcttgttaaaaaaaaatttttttaagtaagaaaaaaaaaggtaataacatggccaatttgttacataaaatgactttctgtgtataaattattcctaaaaaatcctgtttatataaaaaatcagtagatgaaaaaaatttcaaaatgtttttgtatattctgttgtaagaatttattcctgttattgcgatatactctggattctttacataatggaaaaaagaaactgtctattttgaatggctgaagctaaggcaacgttagtttctcttactctgcttttttctagtaaagtactacatggtttaagttaaataaaataattctgtatgc

SEQ ID NO: 143025 - DNA, 310 bp, Homo sapiens
  Payload ID: 8256
  Gene Symbol: IGF1R
  Gene Name: insulin-like growth factor 1 receptor
  ENST ID: ENST00000560972
  CDS Start-End: 1-310
aactacacagcccggattcaggccacatctctctctgggaatgggtcgtggacagatcctgtgttcttctatgtccaggccaaaacaggatatgaaaacttcatccatctgatcatcgctctgcccgtcgctgtcctgttgatcgtgggagggttggtgattatgctgtacgtcttccatagaaagagaaataacagcaggctggggaatggagtgctgtatgcctctgtgaacccggagtacttcagcgctgctgatggtgcgattgctgggtgtggtgtcccaaggccagccaacactggtcatcatg

SEQ ID NO: 143026 - DNA, 572 bp, Homo sapiens
  Payload ID: 8256
  Gene Symbol: IGF1R
  Gene Name: insulin-like growth factor 1 receptor
  ENST ID: ENST00000558355
  CDS Start-End: 1-572
atgaccaatctcaaggatattgggctttacaacctgaggaacattactcggggggccatcaggattgagaaaaatgctgacctctgttacctctccactgtggactggtccctgatcctggatgcggtgtccaataactacattgtggggaataagcccccaaaggaatgtggggacctgtgtccagggaccatggaggagaagccgatgtgtgagaagaccaccatcaacaatgagtacaactaccgctgctggaccacaaaccgctgccagaaaatgtgcccaagcacgtgtgggaagcgggcgtgcaccgagaacaatgagtgctgccaccccgagtgcctgggcagctgcagcgcgcctgacaacgacacggcctgtgtagcttgccgccactactactatgccggtgtctgtgtgcctgcctgcccgcccaacacctacaggtttgagggctggcgctgtgtggaccgtgacttctgcgccaacatcctcagcgccgagagcagcgactccgaggggtttgtgatccacgacggcgagtgcatgcaggagtgcccctcgggcttcat

SEQ ID NO: 143027 - DNA, 1034 bp, Homo sapiens
  Payload ID: 8256
  Gene Symbol: IGF1R
  Gene Name: insulin-like growth factor 1 receptor
  ENST ID: ENST00000558898
  CDS Start-End: 398-1034
caccaaaaccaagatggtaacgagagtgacctgtgatcgtcctcactgctgcactcccaccagcgccatgagtgtttacatgtcatagcaacatcaggaagttaccctatatggtctaaaatggagagtgtgcccaagcacgtgtgggaagcgggcgtgcaccgagaacaatgagtgctgccaccccgagtgcctgggcagctgcagcgcgcctgacaacgacacggcctgtgtagcttgccgccactactactatgccggtgtctgtgtgcctgcctgcccgcccaacacctacaggtttgagggctggcgctgtgtggaccgtgacttctgcgccaacatcctcagcgccgagagcagcgactccgaggggtttgtgatccacgacggcgagtgcatgcaggagtgcccctcgggcttcatccgcaacggcagccagagcatgtactgcatcccttgtgaaggtccttgcccgaaggtctgtgaggaagaaaagaaaacaaagaccattgattctgttacttctgctcagatgctccaaggatgcaccatcttcaagggcaatttgctcattaacatccgacgggggaataacattgcttcagagctggagaacttcatggggctcatcgaggtggtgacgggctacgtgaagatccgccattctcatgccttggtctccttgtccttcctaaaaaaccttcgcctcatcctaggagaggagcagctagaagggaattactccttctacgtcctcgacaaccagaacttgcagcaactgtgggactgggaccaccgcaacctgaccatcaaagcagggaaaatgtactttgctttcaatcccaaattatgtgtttccgaaatttaccgcatggaggaagtgacggggactaaagggcgccaaagcaaaggggacataaacaccaggaacaacggggagagagcctcctgtgaaagtgacgtcctgcatttcacctccaccaccacgtcgaagaatcgcatcatcataacctggcaccggtaccggccccctg

SEQ ID NO: 143028 - DNA, 525 bp, Homo sapiens
  Payload ID: 8256
  Gene Symbol: IGF1R
  Gene Name: insulin-like growth factor 1 receptor
  ENST ID: ENST00000560144
  CDS Start-End: 1-271
gactcagtacgccgtttacgtcaaggctgtgaccctcaccatggtggagaacgaccatatccgtggggccaagagtgagatcttgtacattcgcaccaatgcttcagttaatcgtgaagtggaaccctccctctctgcccaacggcaacctgagttactacattgtgcgctggcagcggcagcctcaggacggctacctttaccggcacaattactgctccaaagacaaaatccccatcaggaagtatgccgacggcaccatcgacattgaggaggtcacagagaaccccaagactgaggtgtgtggtggggagaaagggccttgctgcgcctgccccaaaactgaagccgagaagcaggccgagaaggaggaggctgaataccgcaaagtctttgagaatttcctgcacaactccatcttcgtgcccagacctgaaaggaagcggagagatgtcatgcaagtggccaacaccaccatgtccagccgaagcaggaacaccacggccgcagacacctacaacatca

SEQ ID NO: 143029 - DNA, 1023 bp, Homo sapiens
  Payload ID: 8257
  Gene Symbol: IGF2
  Gene Name: insulin-like growth factor 2
  Uniprot ID: P01344
  ENST ID: ENST00000381389
  CDS Start-End: 167-709
tccccgggtcttccaacggactgggcgttgctcccggacactgaggactggccccggggtctcgctcaccttcagcagcgtccaccgcctgccacagagcgttcgatcgctcgctgcctgagctcctggtgcgcccgcggacgcagcctccagcttcgcgacaccaatgggaatcccaatggggaagtcgatgctggtgcttctcaccttcttggccttcgcctcgtgctgcattgctgcttaccgccccagtgagaccctgtgcggcggggagctggtggacaccctccagttcgtctgtggggaccgcggcttctacttcagcaggcccgcaagccgtgtgagccgtcgcagccgtggcatcgttgaggagtgctgtttccgcagctgtgacctggccctcctggagacgtactgtgctacccccgccaagtccgagagggacgtgtcgacccctccgaccgtgcttccggacaacttccccagataccccgtgggcaagttcttccaatatgacacctggaagcagtccacccagcgcctgcgcaggggcctgcctgccctcctgcgtgcccgccggggtcacgtgctcgccaaggagctcgaggcgttcagggaggccaaacgtcaccgtcccctgattgctctacccacccaagaccccgcccacgggggcgcccccccagagatggccagcaatcggaagtgagcaaaactgccgcaagtctgcagcccggcgccaccatcctgcagcctcctcctgaccacggacgtttccatcaggttccatcccgaaaatctctcggttccacgtccccctggggcttctcctgacccagtccccgtgccccgcctccccgaaacaggctactctcctcggccccctccatcgggctgaggaagcacagcagcatcttcaaacatgtacaaaatcgattggctttaaacacccttcacataccctccccccaaattatccccaattatccccacacataaaaaatcaaaacattaaactaaccc

SEQ ID NO: 143030 - DNA, 1005 bp, Homo sapiens
  Payload ID: 8257
  Gene Symbol: IGF2
  Gene Name: insulin-like growth factor 2
  Uniprot ID: P01344
  ENST ID: ENST00000381392
  CDS Start-End: 107-658
aactggacattagcttctcctgtgaaagagacttccagcttcctcctcctcctcttcctcctcctcctcctgccccagcgagccttctgctgagctgtagacaccaatgggaatcccaatggggaagtcgatgctggtgcttctcaccttcttggccttcgcctcgtgctgcattgctgcttaccgccccagtgagaccctgtgcggcggggagctggtggacaccctccagttcgtctgtggggaccgcggcttctacttcagacttccaggcaggcccgcaagccgtgtgagccgtcgcagccgtggcatcgttgaggagtgctgtttccgcagctgtgacctggccctcctggagacgtactgtgctacccccgccaagtccgagagggacgtgtcgacccctccgaccgtgcttccggacaacttccccagataccccgtgggcaagttcttccaatatgacacctggaagcagtccacccagcgcctgcgcaggggcctgcctgccctcctgcgtgcccgccggggtcacgtgctcgccaaggagctcgaggcgttcagggaggccaaacgtcaccgtcccctgattgctctacccacccaagaccccgcccacgggggcgcccccccagagatggccagcaatcggaagtgagcaaaactgccgcaagtctgcagcccggcgccaccatcctgcagcctcctcctgaccacggacgtttccatcaggttccatcccgaaaatctctcggttccacgtccccctggggcttctcctgacccagtccccgtgccccgcctccccgaaacaggctactctcctcggccccctccatcgggctgaggaagcacagcagcatcttcaaacatgtacaaaatcgattggctttaaacacccttcacataccctccccccaaattatccccaattatccccacacataaaaaatcaaaacattaaactaacccccttcccccccccccacaacaaccctcttaaaa

SEQ ID NO: 143031 - DNA, 4527 bp, Homo sapiens
  Payload ID: 8257
  Gene Symbol: IGF2
  Gene Name: insulin-like growth factor 2
  Uniprot ID: P01344
  ENST ID: ENST00000381395
  CDS Start-End: 110-652
gcaaactggacattagcttctcctgtgaaagagacttccagcttcctcctcctcctcttcctcctcctcctcctgccccagcgagccttctgctgagctgtagacaccaatgggaatcccaatggggaagtcgatgctggtgcttctcaccttcttggccttcgcctcgtgctgcattgctgcttaccgccccagtgagaccctgtgcggcggggagctggtggacaccctccagttcgtctgtggggaccgcggcttctacttcagcaggcccgcaagccgtgtgagccgtcgcagccgtggcatcgttgaggagtgctgtttccgcagctgtgacctggccctcctggagacgtactgtgctacccccgccaagtccgagagggacgtgtcgacccctccgaccgtgcttccggacaacttccccagataccccgtgggcaagttcttccaatatgacacctggaagcagtccacccagcgcctgcgcaggggcctgcctgccctcctgcgtgcccgccggggtcacgtgctcgccaaggagctcgaggcgttcagggaggccaaacgtcaccgtcccctgattgctctacccacccaagaccccgcccacgggggcgcccccccagagatggccagcaatcggaagtgagcaaaactgccgcaagtctgcagcccggcgccaccatcctgcagcctcctcctgaccacggacgtttccatcaggttccatcccgaaaatctctcggttccacgtccccctggggcttctcctgacccagtccccgtgccccgcctccccgaaacaggctactctcctcggccccctccatcgggctgaggaagcacagcagcatcttcaaacatgtacaaaatcgattggctttaaacacccttcacataccctccccccaaattatccccaattatccccacacataaaaaatcaaaacattaaactaacccccttcccccccccccacaacaaccctcttaaaactaattggctttttagaaacaccccacaaaagctcagaaattggctttaaaaaaaacaaccaccaaaaaaaatcaattggctaaaaaaaaaaagtattaaaaacgaattggctgagaaacaattggcaaaataaaggaatttggcactccccacccccctctttctcttctcccttggactttgagtcaaattggcctggacttgagtccctgaaccagcaaagagaaaagaaggaccccagaaatcacaggtgggcacgtcgctgctaccgccatctcccttctcacgggaattttcagggtaaactggccatccgaaaatagcaacaacccagactggctcctcactcccttttccatcactaaaaatcacagagcagtcagagggacccagtaagaccaaaggaggggaggacagagcatgaaaaccaaaatccatgcaaatgaaatgtaattggcacgaccctcacccccaaatcttacatctcaattcccatcctaaaaagcactcatactttatgcatccccgcagctacacacacacaacacacagcacacgcatgaacacagcacacacacgagcacagcacacacacaaacgcacagcacacacagcacacagatgagcacacagcacacacacaaacgcacagcacacacacgcacacacatgcacacacagcacacaaacgcacggcacacacacgcacacacatgcacacacagcacacacacaaacgcacagcacacacaaacgcacagcacacacgcacacacagcacacacacgagcacacagcacacaaacgcacagcacacgcacacacatgcacacacagcacacacactagcacacagcacacacacaaagacacagcacacacatgcacacacagcacacacacgcgaacacagcacacacgaacacagcacacacagcacacacacaaacacagcacacacatgcacacagcacacgcacacacagcacacacatgaacacagcacacagcacacacatgcacacacagcacacacgcatgcacagcacacatgaacacagcacacacacaaacacacagcacacacatgcacacacagcacacacactcatgcgcagcacatacatgaacacagctcacagcacacaaacacgcagcacacacgttgcacacgcaagcacccacctgcacacacacatgcgcacacacacgcacacccccacaaaattggatgaaaacaataagcatatctaagcaactacgatatctgtatggatcaggccaaagtcccgctaagattctccaatgttttcatggtctgagccccgctcctgttcccatctccactgcccctcggccctgtctgtgccctgcctctcagaggagggggctcagatggtgcggcctgagtgtgcggccggcggcatttgggatacacccgtagggtgggcggggtgtgtcccaggcctaattccatctttccaccatgacagagatgcccttgtgaggctggcctccttggcgcctgtccccacggcccccgcagcgtgagccacgatgctccccataccccacccattcccgatacaccttacttactgtgtgttggcccagccagagtgaggaaggagtttggccacattggagatggcggtagctgagcagacatgcccccacgagtagcctgactccctggtgtgctcctggaaggaagatcttggggacccccccaccggagcacacctagggatcatctttgcccgtctcctggggaccccccaagaaatgtggagtcctcgggggccgtgcactgatgcggggagtgtgggaagtctggcggttggaggggtgggtggggggcagtgggggctgggcggggggagttctggggtaggaagtggtcccgggagattttggatggaaaagtcaggaggattgacagcagacttgcagaattacatagagaaattaggaacccccaaatttcatgtcaattgatctattccccctctttgtttcttggggcatttttccttttttttttttttttgttttttttttacccctccttagctttatgcgctcagaaaccaaattaaaccccccccccatgtaacaggggggcagtgacaaaagcaagaacgcacgaagccagcctggagaccaccacgtcctgccccccgccatttatcgccctgattggattttgtttttcatctgtccctgttgcttgggttgagttgagggtggagcctcctggggggcactggccactgagcccccttggagaagtcagaggggagtggagaaggccactgtccggcctggcttctggggacagtggctggtccccagaagtcctgagggcggaggggggggttgggcagggtctcctcaggtgtcaggagggtgctcggaggccacaggagggggctcctggctggcctgaggctggccggaggggaaggggctagcaggtgtgtaaacagagggttccatcaggctggggcagggtggccgccttccgcacacttgaggaaccctcccctctccctcggtgacatcttgcccgcccctcagcaccctgccttgtctccaggaggtccgaagctctgtgggacctcttgggggcaaggtggggtgaggccggggagtagggaggtcaggcgggtctgagcccacagagcaggagagctgccaggtctgcccatcgaccaggttgcttgggccccggagcccacgggtctggtgatgccatagcagccaccaccgcggcgcctagggctgcggcagggactcggcctctgggaggtttacctcgcccccacttgtgcccccagctcagcccccctgcacgcagcccgactagcagtctagaggcctgaggcttctgggtcctggtgacggggctggcatgaccccgggggtcgtccatgccagtccgcctcagtcgcagagggtccctcggcaagcgccctgtgagtgggccattcggaacattggacagaagcccaaagagccaaattgtcacaattgtggaacccacattggcctgagatccaaaacgcttcgaggcaccccaaattacctgcccattcgtcaggacacccacccacccagtgttatattctgcctcgccggagtgggtgttcccgggggcacttgccgaccagccccttgcgtccccaggtttgcagctctcccctgggccactaaccatcctggcccgggctgcctgtctgacctccgtgcctagtcgtggctctccatcttgtctcctccccgtgtccccaatgtcttcagtggggggccccctcttgggtcccctcctctgccatcacctgaagacccccacgccaaacactgaatgtcacctgtgcctgccgcctcggtccaccttgcggcccgtgtttgactcaactcaactcctttaacgctaatatttccggcaaaatcccatgcttgggttttgtctttaaccttgtaacgcttgcaatcccaataaagcattaaaagtcatgatcttc

SEQ ID NO: 143032 - DNA, 5179 bp, Homo sapiens
  Payload ID: 8257
  Gene Symbol: IGF2
  Gene Name: insulin-like growth factor 2
  Uniprot ID: P01344
  ENST ID: ENST00000381406
  CDS Start-End: 753-1304
cgcctgtccccctcccgaggcccgggctcgcgacggcagagggctccgtcggcccaaaccgagctgggcgcccgcggtccgggtgcagcctccactccgccccccagtcaccgcctcccccggcccctcgacgtggcgcccttccctccgcttctctgtgctccccgcgcccctcttggcgtctggccccggcccccgctctttctcccgcaaccttcccttcgctccctcccgtcccccccagctcctagcctccgactccctccccccctcacgcccgccctctcgccttcgccgaaccaaagtggattaattacacgctttctgtttctctccgtgctgttctctcccgctgtgcgcctgcccgcctctcgctgtcctctctccccctcgccctctcttcggcccccccctttcacgttcactctgtctctcccactatctctgcccccctctatccttgatacaacagctgacctcatttcccgataccttttcccccccgaaaagtacaacatctggcccgccccagcccgaagacagcccgtcctccctggacaatcagacgaattctccccccccccccaaaaaaaagccatccccccgctctgccccgtcgcacattcggcccccgcgactcggccagagcggcgctggcagaggagtgtccggcaggagggccaacgcccgctgttcggtttgcgacacgcagcagggaggtgggcggcagcgtcgccggcttccagacaccaatgggaatcccaatggggaagtcgatgctggtgcttctcaccttcttggccttcgcctcgtgctgcattgctgcttaccgccccagtgagaccctgtgcggcggggagctggtggacaccctccagttcgtctgtggggaccgcggcttctacttcagacttccaggcaggcccgcaagccgtgtgagccgtcgcagccgtggcatcgttgaggagtgctgtttccgcagctgtgacctggccctcctggagacgtactgtgctacccccgccaagtccgagagggacgtgtcgacccctccgaccgtgcttccggacaacttccccagataccccgtgggcaagttcttccaatatgacacctggaagcagtccacccagcgcctgcgcaggggcctgcctgccctcctgcgtgcccgccggggtcacgtgctcgccaaggagctcgaggcgttcagggaggccaaacgtcaccgtcccctgattgctctacccacccaagaccccgcccacgggggcgcccccccagagatggccagcaatcggaagtgagcaaaactgccgcaagtctgcagcccggcgccaccatcctgcagcctcctcctgaccacggacgtttccatcaggttccatcccgaaaatctctcggttccacgtccccctggggcttctcctgacccagtccccgtgccccgcctccccgaaacaggctactctcctcggccccctccatcgggctgaggaagcacagcagcatcttcaaacatgtacaaaatcgattggctttaaacacccttcacataccctccccccaaattatccccaattatccccacacataaaaaatcaaaacattaaactaacccccttcccccccccccacaacaaccctcttaaaactaattggctttttagaaacaccccacaaaagctcagaaattggctttaaaaaaaacaaccaccaaaaaaaatcaattggctaaaaaaaaaaagtattaaaaacgaattggctgagaaacaattggcaaaataaaggaatttggcactccccacccccctctttctcttctcccttggactttgagtcaaattggcctggacttgagtccctgaaccagcaaagagaaaagaaggaccccagaaatcacaggtgggcacgtcgctgctaccgccatctcccttctcacgggaattttcagggtaaactggccatccgaaaatagcaacaacccagactggctcctcactcccttttccatcactaaaaatcacagagcagtcagagggacccagtaagaccaaaggaggggaggacagagcatgaaaaccaaaatccatgcaaatgaaatgtaattggcacgaccctcacccccaaatcttacatctcaattcccatcctaaaaagcactcatactttatgcatccccgcagctacacacacacaacacacagcacacgcatgaacacagcacacacacgagcacagcacacacacaaacgcacagcacacacagcacacagatgagcacacagcacacacacaaacgcacagcacacacacgcacacacatgcacacacagcacacaaacgcacggcacacacacgcacacacatgcacacacagcacacacacaaacgcacagcacacacaaacgcacagcacacacgcacacacagcacacacacgagcacacagcacacaaacgcacagcacacgcacacacatgcacacacagcacacacactagcacacagcacacacacaaagacacagcacacacatgcacacacagcacacacacgcgaacacagcacacacgaacacagcacacacagcacacacacaaacacagcacacacatgcacacagcacacgcacacacagcacacacatgaacacagcacacagcacacacatgcacacacagcacacacgcatgcacagcacacatgaacacagcacacacacaaacacacagcacacacatgcacacacagcacacacactcatgcgcagcacatacatgaacacagctcacagcacacaaacacgcagcacacacgttgcacacgcaagcacccacctgcacacacacatgcgcacacacacgcacacccccacaaaattggatgaaaacaataagcatatctaagcaactacgatatctgtatggatcaggccaaagtcccgctaagattctccaatgttttcatggtctgagccccgctcctgttcccatctccactgcccctcggccctgtctgtgccctgcctctcagaggagggggctcagatggtgcggcctgagtgtgcggccggcggcatttgggatacacccgtagggtgggcggggtgtgtcccaggcctaattccatctttccaccatgacagagatgcccttgtgaggctggcctccttggcgcctgtccccacggcccccgcagcgtgagccacgatgctccccataccccacccattcccgatacaccttacttactgtgtgttggcccagccagagtgaggaaggagtttggccacattggagatggcggtagctgagcagacatgcccccacgagtagcctgactccctggtgtgctcctggaaggaagatcttggggacccccccaccggagcacacctagggatcatctttgcccgtctcctggggaccccccaagaaatgtggagtcctcgggggccgtgcactgatgcggggagtgtgggaagtctggcggttggaggggtgggtggggggcagtgggggctgggcggggggagttctggggtaggaagtggtcccgggagattttggatggaaaagtcaggaggattgacagcagacttgcagaattacatagagaaattaggaacccccaaatttcatgtcaattgatctattccccctctttgtttcttggggcatttttccttttttttttttttttgttttttttttacccctccttagctttatgcgctcagaaaccaaattaaaccccccccccatgtaacaggggggcagtgacaaaagcaagaacgcacgaagccagcctggagaccaccacgtcctgccccccgccatttatcgccctgattggattttgtttttcatctgtccctgttgcttgggttgagttgagggtggagcctcctggggggcactggccactgagcccccttggagaagtcagaggggagtggagaaggccactgtccggcctggcttctggggacagtggctggtccccagaagtcctgagggcggaggggggggttgggcagggtctcctcaggtgtcaggagggtgctcggaggccacaggagggggctcctggctggcctgaggctggccggaggggaaggggctagcaggtgtgtaaacagagggttccatcaggctggggcagggtggccgccttccgcacacttgaggaaccctcccctctccctcggtgacatcttgcccgcccctcagcaccctgccttgtctccaggaggtccgaagctctgtgggacctcttgggggcaaggtggggtgaggccggggagtagggaggtcaggcgggtctgagcccacagagcaggagagctgccaggtctgcccatcgaccaggttgcttgggccccggagcccacgggtctggtgatgccatagcagccaccaccgcggcgcctagggctgcggcagggactcggcctctgggaggtttacctcgcccccacttgtgcccccagctcagcccccctgcacgcagcccgactagcagtctagaggcctgaggcttctgggtcctggtgacggggctggcatgaccccgggggtcgtccatgccagtccgcctcagtcgcagagggtccctcggcaagcgccctgtgagtgggccattcggaacattggacagaagcccaaagagccaaattgtcacaattgtggaacccacattggcctgagatccaaaacgcttcgaggcaccccaaattacctgcccattcgtcaggacacccacccacccagtgttatattctgcctcgccggagtgggtgttcccgggggcacttgccgaccagccccttgcgtccccaggtttgcagctctcccctgggccactaaccatcctggcccgggctgcctgtctgacctccgtgcctagtcgtggctctccatcttgtctcctccccgtgtccccaatgtcttcagtggggggccccctcttgggtcccctcctctgccatcacctgaagacccccacgccaaacactgaatgtcacctgtgcctgccgcctcggtccaccttgcggcccgtgtttgactcaactcaactcctttaacgctaatatttccggcaaaatcccatgcttgggttttgtctttaaccttgtaacgcttgcaatcccaataaagcattaaaagtcatgatcttc

SEQ ID NO: 143033 - DNA, 1583 bp, Homo sapiens
  Payload ID: 8257
  Gene Symbol: IGF2
  Gene Name: insulin-like growth factor 2
  Uniprot ID: P01344
  ENST ID: ENST00000434045
  CDS Start-End: 386-1096
cactgcagcttccccaaccccgcgcacagcgggcactggtttcgggcctctctgtctcctacgaagtccccagagcaactcggatttgggaaatttctctctagcgttgcccaaacacacttgggtcggccgcgcgccctcaggacgtggacagggagggcttccccgtgtccaggaaagcgaccgggcattgcccccagtctcccccaaatttgggcattgtccccgggtcttccaacggactgggcgttgctcccggacactgaggactggccccggggtctcgctcaccttcagcagcgtccaccgcctgccacagagcgttcgatcgctcgctgcctgagctcctggtgcgcccgcggacgcagcctccagcttcgcggagatggtttccccagacccccaaattatcgtggtggcccccgagaccgaactcgcgtctatgcaagtccaacgcactgaggacggggtaaccattatccagatattttgggtgggccgcaaaggcgagctacttagacgcaccccggtgagctcggccatgcagacaccaatgggaatcccaatggggaagtcgatgctggtgcttctcaccttcttggccttcgcctcgtgctgcattgctgcttaccgccccagtgagaccctgtgcggcggggagctggtggacaccctccagttcgtctgtggggaccgcggcttctacttcagcaggcccgcaagccgtgtgagccgtcgcagccgtggcatcgttgaggagtgctgtttccgcagctgtgacctggccctcctggagacgtactgtgctacccccgccaagtccgagagggacgtgtcgacccctccgaccgtgcttccggacaacttccccagataccccgtgggcaagttcttccaatatgacacctggaagcagtccacccagcgcctgcgcaggggcctgcctgccctcctgcgtgcccgccggggtcacgtgctcgccaaggagctcgaggcgttcagggaggccaaacgtcaccgtcccctgattgctctacccacccaagaccccgcccacgggggcgcccccccagagatggccagcaatcggaagtgagcaaaactgccgcaagtctgcagcccggcgccaccatcctgcagcctcctcctgaccacggacgtttccatcaggttccatcccgaaaatctctcggttccacgtccccctggggcttctcctgacccagtccccgtgccccgcctccccgaaacaggctactctcctcggccccctccatcgggctgaggaagcacagcagcatcttcaaacatgtacaaaatcgattggctttaaacacccttcacataccctccccccaaattatccccaattatccccacacataaaaaatcaaaacattaaactaacccccttcccccccccccacaacaaccctcttaaaactaattggctttttagaaacaccccacaaaagctcagaaattggctttaaaaaaaacaaccaccaaaaaaaatcaattggctaaaaaaaaaaagtattaaaaacgaattggctgagaaacaattggcaaaataaaggaat

SEQ ID NO: 143034 - DNA, 934 bp, Homo sapiens
  Payload ID: 8257
  Gene Symbol: IGF2
  Gene Name: insulin-like growth factor 2
  Uniprot ID: P01344
  ENST ID: ENST00000418738
  CDS Start-End: 121-663
ggcactgaccagcctgcaaactggacattagcttctcctgtgaaagagacttccagcttcctcctcctcctcttcctcctcctcctcctgccccagcgagccttctgctgagctacaccaatgggaatcccaatggggaagtcgatgctggtgcttctcaccttcttggccttcgcctcgtgctgcattgctgcttaccgccccagtgagaccctgtgcggcggggagctggtggacaccctccagttcgtctgtggggaccgcggcttctacttcagcaggcccgcaagccgtgtgagccgtcgcagccgtggcatcgttgaggagtgctgtttccgcagctgtgacctggccctcctggagacgtactgtgctacccccgccaagtccgagagggacgtgtcgacccctccgaccgtgcttccggacaacttccccagataccccgtgggcaagttcttccaatatgacacctggaagcagtccacccagcgcctgcgcaggggcctgcctgccctcctgcgtgcccgccggggtcacgtgctcgccaaggagctcgaggcgttcagggaggccaaacgtcaccgtcccctgattgctctacccacccaagaccccgcccacgggggcgcccccccagagatggccagcaatcggaagtgagcaaaactgccgcaagtctgcagcccggcgccaccatcctgcagcctcctcctgaccacggacgtttccatcaggttccatcccgaaaatctctcggttccacgtccccctggggcttctcctgacccagtccccgtgccccgcctccccgaaacaggctactctcctcggccccctccatcgggctgaggaagcacagcagcatcttcaaacatgtacaaaatcgattggctttaaacacccttcacataccctccccccaaattatccc

SEQ ID NO: 143035 - DNA, 5585 bp, Homo sapiens
  Payload ID: 8257
  Gene Symbol: IGF2
  Gene Name: insulin-like growth factor 2
  Uniprot ID: P01344
  ENST ID: ENST00000416167
  CDS Start-End: 1168-1710
gcctgctctccggcggagctgcgtgaggcccggccggccccggccccccccttccggccgcccccgcctcctggcccacgcctgcccgcgctctgcccaccagcgcctccatcgggcaaggcggccccgcgtcgacgccgcccgctgcctcgctgctgactcccgtcccgggcgccgtccgcggggtcgcgctccgccgggcctgcggattccccgccgcctcctcttcatctacctcaactccccccatccccgcttcgcccgaggaggcggttccccccgcaggcagtccggctcgcaggccgccggcgttgtcacccccccccgcgctccccctccagccctccccccggcgcgcagcctcgggccgctcccctttccgcgctgcgtcccggagcggccccggtgccgccaccgcctgtccccctcccgaggcccgggctcgcgacggcagagggctccgtcggcccaaaccgagctgggcgcccgcggtccgggtgcagcctccactccgccccccagtcaccgcctcccccggcccctcgacgtggcgcccttccctccgcttctctgtgctccccgcgcccctcttggcgtctggccccggcccccgctctttctcccgcaaccttcccttcgctccctcccgtcccccccagctcctagcctccgactccctccccccctcacgcccgccctctcgccttcgccgaaccaaagtggattaattacacgctttctgtttctctccgtgctgttctctcccgctgtgcgcctgcccgcctctcgctgtcctctctccccctcgccctctcttcggcccccccctttcacgttcactctgtctctcccactatctctgcccccctctatccttgatacaacagctgacctcatttcccgataccttttcccccccgaaaagtacaacatctggcccgccccagcccgaagacagcccgtcctccctggacaatcagacgaattctccccccccccccaaaaaaaagccatccccccgctctgccccgtcgcacattcggcccccgcgactcggccagagcggcgctggcagaggagtgtccggcaggagggccaacgcccgctgttcggtttgcgacacgcagcagggaggtgggcggcagcgtcgccggcttccagacaccaatgggaatcccaatggggaagtcgatgctggtgcttctcaccttcttggccttcgcctcgtgctgcattgctgcttaccgccccagtgagaccctgtgcggcggggagctggtggacaccctccagttcgtctgtggggaccgcggcttctacttcagcaggcccgcaagccgtgtgagccgtcgcagccgtggcatcgttgaggagtgctgtttccgcagctgtgacctggccctcctggagacgtactgtgctacccccgccaagtccgagagggacgtgtcgacccctccgaccgtgcttccggacaacttccccagataccccgtgggcaagttcttccaatatgacacctggaagcagtccacccagcgcctgcgcaggggcctgcctgccctcctgcgtgcccgccggggtcacgtgctcgccaaggagctcgaggcgttcagggaggccaaacgtcaccgtcccctgattgctctacccacccaagaccccgcccacgggggcgcccccccagagatggccagcaatcggaagtgagcaaaactgccgcaagtctgcagcccggcgccaccatcctgcagcctcctcctgaccacggacgtttccatcaggttccatcccgaaaatctctcggttccacgtccccctggggcttctcctgacccagtccccgtgccccgcctccccgaaacaggctactctcctcggccccctccatcgggctgaggaagcacagcagcatcttcaaacatgtacaaaatcgattggctttaaacacccttcacataccctccccccaaattatccccaattatccccacacataaaaaatcaaaacattaaactaacccccttcccccccccccacaacaaccctcttaaaactaattggctttttagaaacaccccacaaaagctcagaaattggctttaaaaaaaacaaccaccaaaaaaaatcaattggctaaaaaaaaaaagtattaaaaacgaattggctgagaaacaattggcaaaataaaggaatttggcactccccacccccctctttctcttctcccttggactttgagtcaaattggcctggacttgagtccctgaaccagcaaagagaaaagaaggaccccagaaatcacaggtgggcacgtcgctgctaccgccatctcccttctcacgggaattttcagggtaaactggccatccgaaaatagcaacaacccagactggctcctcactcccttttccatcactaaaaatcacagagcagtcagagggacccagtaagaccaaaggaggggaggacagagcatgaaaaccaaaatccatgcaaatgaaatgtaattggcacgaccctcacccccaaatcttacatctcaattcccatcctaaaaagcactcatactttatgcatccccgcagctacacacacacaacacacagcacacgcatgaacacagcacacacacgagcacagcacacacacaaacgcacagcacacacagcacacagatgagcacacagcacacacacaaacgcacagcacacacacgcacacacatgcacacacagcacacaaacgcacggcacacacacgcacacacatgcacacacagcacacacacaaacgcacagcacacacaaacgcacagcacacacgcacacacagcacacacacgagcacacagcacacaaacgcacagcacacgcacacacatgcacacacagcacacacactagcacacagcacacacacaaagacacagcacacacatgcacacacagcacacacacgcgaacacagcacacacgaacacagcacacacagcacacacacaaacacagcacacacatgcacacagcacacgcacacacagcacacacatgaacacagcacacagcacacacatgcacacacagcacacacgcatgcacagcacacatgaacacagcacacacacaaacacacagcacacacatgcacacacagcacacacactcatgcgcagcacatacatgaacacagctcacagcacacaaacacgcagcacacacgttgcacacgcaagcacccacctgcacacacacatgcgcacacacacgcacacccccacaaaattggatgaaaacaataagcatatctaagcaactacgatatctgtatggatcaggccaaagtcccgctaagattctccaatgttttcatggtctgagccccgctcctgttcccatctccactgcccctcggccctgtctgtgccctgcctctcagaggagggggctcagatggtgcggcctgagtgtgcggccggcggcatttgggatacacccgtagggtgggcggggtgtgtcccaggcctaattccatctttccaccatgacagagatgcccttgtgaggctggcctccttggcgcctgtccccacggcccccgcagcgtgagccacgatgctccccataccccacccattcccgatacaccttacttactgtgtgttggcccagccagagtgaggaaggagtttggccacattggagatggcggtagctgagcagacatgcccccacgagtagcctgactccctggtgtgctcctggaaggaagatcttggggacccccccaccggagcacacctagggatcatctttgcccgtctcctggggaccccccaagaaatgtggagtcctcgggggccgtgcactgatgcggggagtgtgggaagtctggcggttggaggggtgggtggggggcagtgggggctgggcggggggagttctggggtaggaagtggtcccgggagattttggatggaaaagtcaggaggattgacagcagacttgcagaattacatagagaaattaggaacccccaaatttcatgtcaattgatctattccccctctttgtttcttggggcatttttccttttttttttttttttgttttttttttacccctccttagctttatgcgctcagaaaccaaattaaaccccccccccatgtaacaggggggcagtgacaaaagcaagaacgcacgaagccagcctggagaccaccacgtcctgccccccgccatttatcgccctgattggattttgtttttcatctgtccctgttgcttgggttgagttgagggtggagcctcctggggggcactggccactgagcccccttggagaagtcagaggggagtggagaaggccactgtccggcctggcttctggggacagtggctggtccccagaagtcctgagggcggaggggggggttgggcagggtctcctcaggtgtcaggagggtgctcggaggccacaggagggggctcctggctggcctgaggctggccggaggggaaggggctagcaggtgtgtaaacagagggttccatcaggctggggcagggtggccgccttccgcacacttgaggaaccctcccctctccctcggtgacatcttgcccgcccctcagcaccctgccttgtctccaggaggtccgaagctctgtgggacctcttgggggcaaggtggggtgaggccggggagtagggaggtcaggcgggtctgagcccacagagcaggagagctgccaggtctgcccatcgaccaggttgcttgggccccggagcccacgggtctggtgatgccatagcagccaccaccgcggcgcctagggctgcggcagggactcggcctctgggaggtttacctcgcccccacttgtgcccccagctcagcccccctgcacgcagcccgactagcagtctagaggcctgaggcttctgggtcctggtgacggggctggcatgaccccgggggtcgtccatgccagtccgcctcagtcgcagagggtccctcggcaagcgccctgtgagtgggccattcggaacattggacagaagcccaaagagccaaattgtcacaattgtggaacccacattggcctgagatccaaaacgcttcgaggcaccccaaattacctgcccattcgtcaggacacccacccacccagtgttatattctgcctcgccggagtgggtgttcccgggggcacttgccgaccagccccttgcgtccccaggtttgcagctctcccctgggccactaaccatcctggcccgggctgcctgtctgacctccgtgcctagtcgtggctctccatcttgtctcctccccgtgtccccaatgtcttcagtggggggccccctcttgggtcccctcctctgccatcacctgaagacccccacgccaaacactgaatgtcacctgtgcctgccgcctcggtccaccttgcggcccgtgtttgactcaactcaactcctttaacgctaatatttccggcaaaatcccatgcttgggttttgtctttaaccttgtaacgcttgcaatcccaataaagcattaaaagtcatgatcttc

SEQ ID NO: 143036 - DNA, 8274 bp, Homo sapiens
  Payload ID: 8258
  Gene Symbol: IGF2BP1
  Gene Name: insulin-like growth factor 2 mRNA binding protein 1
  Uniprot ID: Q9NZI8
  ENST ID: ENST00000290341
  CDS Start-End: 335-2068
atttagaggcggcgccagggcggccgcggagaaacgtgacacaccagccctctcggaggggtttcggaccgaagggaagaagctgcgccgtgtcgtccgtctccctgcgcgccgcgggcacttctcctgggctctccccgaactctcccgcgacctctgcgcgccctcaggccgccttccccgccctgggctcgggacaacttctggggtggggtgcaaagaaagtttgcggctcctgccgccggcctctccgcctcttggcctaggaggctcgccgcccgcgcccgctcgttcggccttgcccgggaccgcgtcctgccccgagaccgccaccatgaacaagctttacatcggcaacctcaacgagagcgtgacccccgcggacttggagaaagtgtttgcggagcacaagatctcctacagcggccagttcttggtcaaatccggctacgccttcgtggactgcccggacgagcactgggcgatgaaggccatcgaaactttctccgggaaagtagaattacaaggaaaacgcttagagattgaacattcggtgcccaaaaaacaaaggagccggaaaattcaaatccgaaatattccaccccagctccgatgggaagtactggacagcctgctggctcagtatggtacagtagagaactgtgagcaagtgaacaccgagagtgagacggcagtggtgaatgtcacctattccaaccgggagcagaccaggcaagccatcatgaagctgaatggccaccagttggagaaccatgccctgaaggtctcctacatccccgatgagcagatagcacagggacctgagaatgggcgccgagggggctttggctctcggggtcagccccgccagggctcacctgtggcagcgggggccccagccaagcagcagcaagtggacatcccccttcggctcctggtgcccacccagtatgtgggtgccattattggcaaggagggggccaccatccgcaacatcacaaaacagacccagtccaagatagacgtgcataggaaggagaacgcaggtgcagctgaaaaagccatcagtgtgcactccacccctgagggctgctcctccgcttgtaagatgatcttggagattatgcataaagaggctaaggacaccaaaacggctgacgaggttcccctgaagatcctggcccataataactttgtagggcgtctcattggcaaggaaggacggaacctgaagaaggtagagcaagataccgagacaaaaatcaccatctcctcgttgcaagaccttaccctttacaaccctgagaggaccatcactgtgaagggggccatcgagaattgttgcagggccgagcaggaaataatgaagaaagttcgggaggcctatgagaatgatgtggctgccatgagcctgcagtctcacctgatccctggcctgaacctggctgctgtaggtcttttcccagcttcatccagcgcagtcccgccgcctcccagcagcgttactggggctgctccctatagctcctttatgcaggctcccgagcaggagatggtgcaggtgtttatccccgcccaggcagtgggcgccatcatcggcaagaaggggcagcacatcaaacagctctcccggtttgccagcgcctccatcaagattgcaccacccgaaacacctgactccaaagttcgtatggttatcatcactggaccgccagaggcccaattcaaggctcagggaagaatctatggcaaactcaaggaggagaacttctttggtcccaaggaggaagtgaagctggagacccacatacgtgtgccagcatcagcagctggccgggtcattggcaaaggtggaaaaacggtgaacgagttgcagaatttgacggcagctgaggtggtagtaccaagagaccagacccctgatgagaacgaccaggtcatcgtgaaaatcatcggacatttctatgccagtcagatggctcaacggaagatccgagacatcctggcccaggttaagcagcagcatcagaagggacagagtaaccaggcccaggcacggaggaagtgaccagcccctccctgtcccttcgagtccaggacaacaacgggcagaaatcgagagtgtgctctccccggcaggcctgagaatgagtgggaatccgggacacctgggccgggctgtagatcaggtttgcccacttgattgagaaagatgttccagtgaggaaccctgatctctcagccccaaacacccacccaattggcccaacactgtctgcccctcggggtgtcagaaattctagcgcaaggcacttttaaacgtggattgtttaaagaagctctccaggccccaccaagagggtggatcacacctcagtgggaagaaaaataaaatttccttcaggttttaaaaacatgcagagaggtgttttaatcagccttaaaggatggttcatttcttgaccttaatgtttttccaatcttcttccccctacttgggtaattgattaaaatacctccatttacggcctctttctatatttacactaatttttttatctttattgctaccagaaaaaaatgcgaacgaatgcattgctttgcttacagtattgactcaagggaaaagaactgtcagtatctgtagattaattccaatcactccctaaccaataggtacaatacggaatgaagaagaggggaaaatggggagaaagatggttaaaatacataataatccacgtttaaaaggagcgcacttgtggctgatctatgccagatcaccatcttcaaattggcacaactgaaatttccccactctgttggggcttccccaccacattcatgtccctctcccgtgtaggtttcacattatgtccaggtgcacataggtggtattgaatgctcagcagggtaggggctgaccactgtccctgattcccatcgttctcaggcggattttatatttttttaaagtctattttaatgattggatatgagcactgggaaggggacgctaactccccttgataaagtctcggttccatggaggacttgagtggccccaaaggctgccacggtgccctcaccccagcccatgtgctcccataagggctggttcctagaggcaggggttgtggggcactcccagccacggcactgttaccttggtggtgggacttggaacccaaccctgagctcccgataaagctaaagtccatcatctggcaaattcagtaaattggagagtacttgcttctgtttgtatctgagaggaatttttaactgacggcttctgtctccatgaatcattatcagcatgatgaaaggtgtgtctaaaaaacaattcagaataccagcagcattgtacagcaaggggtaaataagcttaatttattaatttaccaggcttaattaagatcccatggagtgtttagcccttgtgggagacagaagccatcagttaaatgaggttaggcctctcctcctaatatactgattgacaatgcatattagccaggtaatgcactttagctaccctggacaatgctatcaagtgtgctgggaagggaggaaggcctctctacatatggaaaagcccatgcgtggagttcccctcctttcaacattgcaacaacagtaacaacaagacaaccgcaacatgtgggcgtagtcaggcaatgctgtgtgcgaagtaaactacctcaaggtatgaagttacctcagcaattattttcctttttgttccccccaaccccattaaaaaaatttttttttgatttttgtttttttgcagcttgctgatattttatataaaaaagaaaagcaaagcaaaagagaagctgatagtcttgaatattttatttttttaatgaaaagaaaaaacaagaaagttatgtttcataatttcttacaacatgagccagtaaccctttaggaactctctatggagaacaggcctggtgggaaaggctttgggggctgcccccttaggaggaggctagtgctaagagggaaggcccaggtttgagagagcccagaggggcagagcccagagccttgtttggccctgatctctgacttctagagccccagctgctggcggctgctggaatatcctacctgataggattaaaaggcctagtggagctgggggctctcagtggttaaacaatgcccaacaaccaaccagctggcccttggtctcctctctttcctcctttggttaaagagcatctcagccagcttttcccaccagtggtgctgttgagatattttaaaatattgcctccgttttatcgaggagagaaataataactaaaaaatataccctttaaaaaaacctatatttctctgtctaaaaatatgggagctgagattccgttcgtggaaaaaagacaaggccaccctctcgccctcagagaggtccacctggtttgtcattgcaatgcttttcattttttttttttgttattgtttcatttcagttccgtcttgctattcttcctaatctatatccatagatctaaggggcaaacagatactagttaactgcccccacctctgtctccctgtcttctttagatcggtctgattgattttaaaagtggacccaaacttagggaattcttgatttagggtggctggtggcaaggaggggcaggggatatggggacgtgactgggacaggttcctgccttatcattttctccctaggacattcccttgtagcccccagaattgtctggcccaaattgaatagaagcagaaaaacatttagggataacatcaggccagtagaattaagcctctccacctgtcccaaccataaaaagggtctcccagctttccatctctggctctatatgctttatcccaaaacaaagcagataacgttcagacgtcggccatttagtaatttaaagcgaatttccagcagcaagcatgctttgatatctggttcagactatcatcaggaagaaaaaaaaatcccacagtacctgaaatgtgattgttgcagtgttcagtttccttgggggcctgctcccttcacaccttgagcccaagtccttttccgttggctgattcagctcccagaagagacgaggaagtgtgtggcaagggactggaaaacttcacttgcttggattaggcaaggctccactcattgttgatatttgcccagcaggaaaatcatgtaagttataccaccagaaagcaaaaggagcatggtttggtggttaaggtttagtgggatgaaggacctgtcttggtgggccgggccctcttgtgccccgtaggctaggtcttagggcaactccttgccctcctgctcagcacctccatttccccatccttggtgagataacaagctatcgcgaaaagcacttgggagatttggatgatttgagaagagtgacttaaaaaaaatgcttctgtgctctaagatatatatgtgtgtgtgtgtgctacatatatatttttaagaaaggaccatctctttaggatatatttttaaattctttgaaacacataaccaaaatggtttgattcactgactgactttgaagctgcatctgccagttacaccccaaatggctttaatcccctctcgggtctggttgccttttgcagtttgggttgtggactcagctcctgtgaggggtctggttaggagagagccatttttaaggacagggagttttatagcccttttctactttcctcccctcctcccagtccttatcaatcttttttcctttttcctgaccccctccttctggaggcagttgggagctatccttgtttatgcctcactattggcagaaaagaccccatttaaaacccagagaacactggagggggatgctctagttggttctgtgtccattttcctctgtgccaaagacagacagacagaggctgagagaggctgttcctgaatcaaagcaatagccagctttcgacacatacctggctgtctgaggaggaaggcctcctggaaactgggagctaagggcgaggcccttcccttcagaggctcctgggggattagggtgtggtgtttgccaagccaaggggtagggagccgagaaattggtctgtcggctcctggttgcactttggggaaggagaggaagtttggggctccaggtagctccctgttgtgggactgctctgtcccctgcccctactgcagagatagcactgccgagttcccttcaggcctggcagacgggcagtgaggaggggcctcagttagctctcaagggtgccttcccctcctcccaacccagacataccctctgccaaactgggaaccagcagtgctagtaactacctcacagagccccagagggcctgcttgagccttcttgctccacaggagaagctggtgcctctaggcaaccccttcctcccacctctcatcaggggtgggggttctcctttctttcccctgaagtgtttatggggagatcctagtggctttgccattcaaaccactcgactgtttgcctgtttcttgaaaaccagtagaagggaaacagcacagcctgtcacagtaattgcaggaagattgaagaaaaatcctcatcaatgccaggggacataaaagccatttcccttccaaatactcgacaatttagatgcagaacatttctctgtattcagacttagagtaacaccagctgaaaactgcagtttctttcctttggatacataaggcttctctatcggggtacgggacagggaggaggcctcatgtctgaagggggatttaggggcgagagccccagccctgaccctcggtcctgtgcaccgctttggggcacagtctgatggcgcctttgctggcgccttagtatggttgactccggatggacaaaagaaaaaaaattttttttcttgaatgaaatagcaggaagctcctcgggagcatgtgttttgattaaccgcaggtgatggatgctacgagtataaatggattaactacctcaatccttacagtaagattggaactaagggcagggactcatgcataagggtatgaatcccagccaggacaagtgagttgaggcttgtgccacaaaaggtttgtccttggggaacaggcaggcctgccaggatcccccccatatcgattgggctgggagggctggccatgaggtccccactttctgctttccttgcccatgtgtcacccctttggcctccagcttgtccctctctcactttctatagctttgttggaccagatggtgaggaaaggaatggcctcttcccttctagagggggctggctggagtgagacctggggcttggcctggaacccaccacacagccccaaagtcaggaagcctggggaaaccagagctgagacctcttcaacagggtttctttgagatcctacacctccattgggccctttttcagtcttcaatgggggcccagttggctctagaaggagaagaggtgaagcaggatcctttgccctgggggagtctgagggcgcggtccttggactcattcaggccgtctttgtagttgggggagttccactgggcgatcccagcccctccccacccaccctctaatggacctcctcatagaagccccatttcacttttgttttatctacctcttagcaaaacaatagataaattaggtagtggcagctccacttgcttaggttagggggggaaaaagatttctttttccaaaggaaaaaaatattaccttgagaatactttccaaaaaataaaattaaaaaaaaaaaaaccaaaaaaaaaaatttttttttaaaagggagacattttccagtgaccactggattgttttaatttcccaagcttttttttcccccataaataagtttcactctttggcgattttcttcacttgtttaagataacgtgctagctattccaacaggtaacagctttcacagtctgcccctggcctgtctcaccccatcccccaccctattcctgccagtgagtccttcctgtgcttctctcccttctcccctcccagccagctgacttcagtcacccctgtcccccctcccctgccaataagctcccccaggaataaaggctttgttttggggatgcttaaatcttgactggcacttcccggctgtgggggctggggagccacttgtaacatttctgtgcagattttatgttagccactgctatgtaaaagcacgttcaaaatgaatttcagcagattatgtgttaccataatgaataaacgtcctctatcaccatt

SEQ ID NO: 143037 - DNA, 1317 bp, Homo sapiens
  Payload ID: 8258
  Gene Symbol: IGF2BP1
  Gene Name: insulin-like growth factor 2 mRNA binding protein 1
  Uniprot ID: Q9NZI8
  ENST ID: ENST00000431824
  CDS Start-End: 1-1317
atgaacaagctttacatcggcaacctcaacgagagcgtgacccccgcggacttggagaaagtgtttgcggagcacaagatctcctacagcggccagttcttggtcaaatccggctacgccttcgtggactgcccggacgagcactgggcgatgaaggccatcgaaactttctccgggaaagtagaattacaaggaaaacgcttagagattgaacattcggtgcccaaaaaacaaaggagccggaaaattcaaatccgaaatattccaccccagctccgatgggaagtactggacagcctgctggctcagtatggtacagtagagaactgtgagcaagtgaacaccgagagtgagacggcagtggtgaatgtcacctattccaaccgggagcagaccaggcaggctgacgaggttcccctgaagatcctggcccataataactttgtagggcgtctcattggcaaggaaggacggaacctgaagaaggtagagcaagataccgagacaaaaatcaccatctcctcgttgcaagaccttaccctttacaaccctgagaggaccatcactgtgaagggggccatcgagaattgttgcagggccgagcaggaaataatgaagaaagttcgggaggcctatgagaatgatgtggctgccatgagcctgcagtctcacctgatccctggcctgaacctggctgctgtaggtcttttcccagcttcatccagcgcagtcccgccgcctcccagcagcgttactggggctgctccctatagctcctttatgcaggctcccgagcaggagatggtgcaggtgtttatccccgcccaggcagtgggcgccatcatcggcaagaaggggcagcacatcaaacagctctcccggtttgccagcgcctccatcaagattgcaccacccgaaacacctgactccaaagttcgtatggttatcatcactggaccgccagaggcccaattcaaggctcagggaagaatctatggcaaactcaaggaggagaacttctttggtcccaaggaggaagtgaagctggagacccacatacgtgtgccagcatcagcagctggccgggtcattggcaaaggtggaaaaacggtgaacgagttgcagaatttgacggcagctgaggtggtagtaccaagagaccagacccctgatgagaacgaccaggtcatcgtgaaaatcatcggacatttctatgccagtcagatggctcaacggaagatccgagacatcctggcccaggttaagcagcagcatcagaagggacagagtaaccaggcccaggcacggaggaagtga

SEQ ID NO: 143038 - DNA, 3291 bp, Homo sapiens
  Payload ID: 8259
  Gene Symbol: IGF2BP2
  Gene Name: insulin-like growth factor 2 mRNA binding protein 2
  Uniprot ID: Q9Y6M1
  ENST ID: ENST00000346192
  CDS Start-End: 65-1735
cggaggaggcgaggagcgccgggtaccgggccgggggagccgcgggctctcggggaagagacggatgatgaacaagctttacatcgggaacctgagccccgccgtcaccgccgacgacctccggcagctctttggggacaggaagctgcccctggcgggacaggtcctgctgaagtccggctacgccttcgtggactaccccgaccagaactgggccatccgcgccatcgagaccctctcgggtaaagtggaattgcatgggaaaatcatggaagttgattactcagtctctaaaaagctaaggagcaggaaaattcagattcgaaacatccctcctcacctgcagtgggaggtgttggatggacttttggctcaatatgggacagtggagaatgtggaacaagtcaacacagacacagaaaccgccgttgtcaacgtcacatatgcaacaagagaagaagcaaaaatagccatggagaagctaagcgggcatcagtttgagaactactccttcaagatttcctacatcccggatgaagaggtgagctccccttcgccccctcagcgagcccagcgtggggaccactcttcccgggagcaaggccacgcccctgggggcacttctcaggccagacagattgatttcccgctgcggatcctggtccccacccagtttgttggtgccatcatcggaaaggagggcttgaccataaagaacatcactaagcagacccagtcccgggtagatatccatagaaaagagaactctggagctgcagagaagcctgtcaccatccatgccaccccagaggggacttctgaagcatgccgcatgattcttgaaatcatgcagaaagaggcagatgagaccaaactagccgaagagattcctctgaaaatcttggcacacaatggcttggttggaagactgattggaaaagaaggcagaaatttgaagaaaattgaacatgaaacagggaccaagataacaatctcatctttgcaggatttgagcatatacaacccggaaagaaccatcactgtgaagggcacagttgaggcctgtgccagtgctgagatagagattatgaagaagctgcgtgaggcctttgaaaatgatatgctggctgttaacacccactccggatacttctccagcctgtacccccatcaccagtttggcccgttcccgcatcatcactcttatccagagcaggagattgtgaatctcttcatcccaacccaggctgtgggcgccatcatcgggaagaagggggcacacatcaaacagctggcgagattcgccggagcctctatcaagattgcccctgcggaaggcccagacgtcagcgaaaggatggtcatcatcaccgggccaccggaagcccagttcaaggcccagggacggatctttgggaaactgaaagaggaaaacttctttaaccccaaagaagaagtgaagctggaagcgcatatcagagtgccctcttccacagctggccgggtgattggcaaaggtggcaagaccgtgaacgaactgcagaacttaaccagtgcagaagtcatcgtgcctcgtgaccaaacgccagatgaaaatgaggaagtgatcgtcagaattatcgggcacttctttgctagccagactgcacagcgcaagatcagggaaattgtacaacaggtgaagcagcaggagcagaaataccctcagggagtcgcctcacagcgcagcaagtgaggctcccacaggcaccagcaaaacaacggatgaatgtagcccttccaacacctgacagaatgagaccaaacgcagccagccagatcgggagcaaaccaaagaccatctgaggaatgagaagtctgcggaggcggccagggactctgccgaggccctgagaaccccaggggccgaggaggggcggggaaggtcagccaggtttgccagaaccaccgagccccgcctcccgccccccagggcttctgcaggcttcagccatccacttcaccatccactcggatctctcctgaactcccacgacgctatcccttttagttgaactaacataggtgaacgtgttcaaagccaagcaaaatgcacaccctttttctgtggcaaatcgtctctgtacatgtgtgtacatattagaaagggaagatgttaagatatgtggcctgtgggttacacagggtgcctgcagcggtaatatattttagaaataatatatcaaataactcaactaactccaatttttaatcaattattaatttttttttctttttaaagagaaagcaggcttttctagactttaaagaataaagtctttgggaggtctcacggtgtagagaggagctttgaggccacccgcacaaaattcacccagagggaaatctcgtcggaaggacactcacggcagttctggatcacctgtgtatgtcaacagaagggataccgtctccttgaagaggaaactctgtcactcctcatgcctgtctagctcatacacccatttctctttgcttcacaggttttaaactggttttttgcatactgctatataattctctgtctctctctgtttatctctcccctccctcccctccccttcttctccatctccattcttttgaatttcctcatccctccatctcaatcccgtatctacgcacccccccccccccaggcaaagcagtgctctgagtatcacatcacacaaaaggaacaaaagcgaaacacacaaaccagcctcaacttacacttggttactcaaaagaacaagagtcaatggtacttgtcctagcgttttggaagaggaaaacaggaacccaccaaaccaaccaatcaaccaaacaaagaaaaaattccacaatgaaagaatgtattttgtctttttgcattttggtgtataagccatcaatattcagcaaaatgattcctttctttaaaaaaaaaaaatgtggaggaaagtagaaatttaccaaggttgttggcccagggcgttaaattcacagatttttttaacgagaaaaacacacagaagaagctacctcaggtgtttttacctcagcaccttgctcttgtgtttcccttagagattttgtaaagctgatagttggagcatttttttatttttttaataaaaatgagttggaaaaaaaataagatatcaactgccagcctggagaaggtgacagtccaagtgtgcaacagctgttctgaattgtcttccgctagccaagaacctatatggccttcttttggacaaaccttgaaaatgtttatttaaaaaaaaaaaa

SEQ ID NO: 143039 - DNA, 3688 bp, Homo sapiens
  Payload ID: 8259
  Gene Symbol: IGF2BP2
  Gene Name: insulin-like growth factor 2 mRNA binding protein 2
  Uniprot ID: Q9Y6M1
  ENST ID: ENST00000382199
  CDS Start-End: 97-1896
ggggggcggaggaggaggagagacgagggcagcggaggaggcgaggagcgccgggtaccgggccgggggagccgcgggctctcggggaagagacggatgatgaacaagctttacatcgggaacctgagccccgccgtcaccgccgacgacctccggcagctctttggggacaggaagctgcccctggcgggacaggtcctgctgaagtccggctacgccttcgtggactaccccgaccagaactgggccatccgcgccatcgagaccctctcgggtaaagtggaattgcatgggaaaatcatggaagttgattactcagtctctaaaaagctaaggagcaggaaaattcagattcgaaacatccctcctcacctgcagtgggaggtgttggatggacttttggctcaatatgggacagtggagaatgtggaacaagtcaacacagacacagaaaccgccgttgtcaacgtcacatatgcaacaagagaagaagcaaaaatagccatggagaagctaagcgggcatcagtttgagaactactccttcaagatttcctacatcccggatgaagaggtgagctccccttcgccccctcagcgagcccagcgtggggaccactcttcccgggagcaaggccacgcccctgggggcacttctcaggccagacagattgatttcccgctgcggatcctggtccccacccagtttgttggtgccatcatcggaaaggagggcttgaccataaagaacatcactaagcagacccagtcccgggtagatatccatagaaaagagaactctggagctgcagagaagcctgtcaccatccatgccaccccagaggggacttctgaagcatgccgcatgattcttgaaatcatgcagaaagaggcagatgagaccaaactagccgaagagattcctctgaaaatcttggcacacaatggcttggttggaagactgattggaaaagaaggcagaaatttgaagaaaattgaacatgaaacagggaccaagataacaatctcatctttgcaggatttgagcatatacaacccggaaagaaccatcactgtgaagggcacagttgaggcctgtgccagtgctgagatagagattatgaagaagctgcgtgaggcctttgaaaatgatatgctggctgttaaccaacaagccaatctgatcccagggttgaacctcagcgcacttggcatcttttcaacaggactgtccgtgctatctccaccagcagggccccgcggagctccccccgctgccccctaccaccccttcactacccactccggatacttctccagcctgtacccccatcaccagtttggcccgttcccgcatcatcactcttatccagagcaggagattgtgaatctcttcatcccaacccaggctgtgggcgccatcatcgggaagaagggggcacacatcaaacagctggcgagattcgccggagcctctatcaagattgcccctgcggaaggcccagacgtcagcgaaaggatggtcatcatcaccgggccaccggaagcccagttcaaggcccagggacggatctttgggaaactgaaagaggaaaacttctttaaccccaaagaagaagtgaagctggaagcgcatatcagagtgccctcttccacagctggccgggtgattggcaaaggtggcaagaccgtgaacgaactgcagaacttaaccagtgcagaagtcatcgtgcctcgtgaccaaacgccagatgaaaatgaggaagtgatcgtcagaattatcgggcacttctttgctagccagactgcacagcgcaagatcagggaaattgtacaacaggtgaagcagcaggagcagaaataccctcagggagtcgcctcacagcgcagcaagtgaggctcccacaggcaccagcaaaacaacggatgaatgtagcccttccaacacctgacagaatgagaccaaacgcagccagccagatcgggagcaaaccaaagaccatctgaggaatgagaagtctgcggaggcggccagggactctgccgaggccctgagaaccccaggggccgaggaggggcggggaaggtcagccaggtttgccagaaccaccgagccccgcctcccgccccccagggcttctgcaggcttcagccatccacttcaccatccactcggatctctcctgaactcccacgacgctatcccttttagttgaactaacataggtgaacgtgttcaaagccaagcaaaatgcacaccctttttctgtggcaaatcgtctctgtacatgtgtgtacatattagaaagggaagatgttaagatatgtggcctgtgggttacacagggtgcctgcagcggtaatatattttagaaataatatatcaaataactcaactaactccaatttttaatcaattattaatttttttttctttttaaagagaaagcaggcttttctagactttaaagaataaagtctttgggaggtctcacggtgtagagaggagctttgaggccacccgcacaaaattcacccagagggaaatctcgtcggaaggacactcacggcagttctggatcacctgtgtatgtcaacagaagggataccgtctccttgaagaggaaactctgtcactcctcatgcctgtctagctcatacacccatttctctttgcttcacaggttttaaactggttttttgcatactgctatataattctctgtctctctctgtttatctctcccctccctcccctccccttcttctccatctccattcttttgaatttcctcatccctccatctcaatcccgtatctacgcacccccccccccccaggcaaagcagtgctctgagtatcacatcacacaaaaggaacaaaagcgaaacacacaaaccagcctcaacttacacttggttactcaaaagaacaagagtcaatggtacttgtcctagcgttttggaagaggaaaacaggaacccaccaaaccaaccaatcaaccaaacaaagaaaaaattccacaatgaaagaatgtattttgtctttttgcattttggtgtataagccatcaatattcagcaaaatgattcctttctttaaaaaaaaaaaatgtggaggaaagtagaaatttaccaaggttgttggcccagggcgttaaattcacagatttttttaacgagaaaaacacacagaagaagctacctcaggtgtttttacctcagcaccttgctcttgtgtttcccttagagattttgtaaagctgatagttggagcatttttttatttttttaataaaaatgagttggaaaaaaaataagatatcaactgccagcctggagaaggtgacagtccaagtgtgcaacagctgttctgaattgtcttccgctagccaagaacctatatggccttcttttggacaaaccttgaaaatgtttatttaaaaaaaaaaaagatgacaaagaaaaacagagagagagaatattggagatgtcctgaattttaatagggtacgcgccattagggctttttgcgctaaaggatgaacatgtactggtttatgtggacaagccattataccaccagactgcaatgccagtttcctctactgcaaacagtgttctgtgacaaaaaaaaaaaaaaaaaaaagaaaaaaaaagaaaaaacagaaatatatccagctaacaaga

SEQ ID NO: 143040 - DNA, 3426 bp, Homo sapiens
  Payload ID: 8259
  Gene Symbol: IGF2BP2
  Gene Name: insulin-like growth factor 2 mRNA binding protein 2
  ENST ID: ENST00000457616
  CDS Start-End: 53-1870
ggagcgccgggtaccgggccgggggagccgcgggctctcggggaagagacggatgatgaacaagctttacatcgggaacctgagccccgccgtcaccgccgacgacctccggcagctctttggggacaggaagctgcccctggcgggacaggtcctgctgaagtccggctacgccttcgtggactaccccgaccagaactgggccatccgcgccatcgagaccctctcgggtaaagtggaattgcatgggaaaatcatggaagttgattactcagtctctaaaaagctaaggagcaggaaaattcagattcgaaacatccctcctcacctgcagtgggaggtgttggatggacttttggctcaatatgggacagtggagaatgtggaacaagtttttgccttttccctagtcaacacagacacagaaaccgccgttgtcaacgtcacatatgcaacaagagaagaagcaaaaatagccatggagaagctaagcgggcatcagtttgagaactactccttcaagatttcctacatcccggatgaagaggtgagctccccttcgccccctcagcgagcccagcgtggggaccactcttcccgggagcaaggccacgcccctgggggcacttctcaggccagacagattgatttcccgctgcggatcctggtccccacccagtttgttggtgccatcatcggaaaggagggcttgaccataaagaacatcactaagcagacccagtcccgggtagatatccatagaaaagagaactctggagctgcagagaagcctgtcaccatccatgccaccccagaggggacttctgaagcatgccgcatgattcttgaaatcatgcagaaagaggcagatgagaccaaactagccgaagagattcctctgaaaatcttggcacacaatggcttggttggaagactgattggaaaagaaggcagaaatttgaagaaaattgaacatgaaacagggaccaagataacaatctcatctttgcaggatttgagcatatacaacccggaaagaaccatcactgtgaagggcacagttgaggcctgtgccagtgctgagatagagattatgaagaagctgcgtgaggcctttgaaaatgatatgctggctgttaaccaacaagccaatctgatcccagggttgaacctcagcgcacttggcatcttttcaacaggactgtccgtgctatctccaccagcagggccccgcggagctccccccgctgccccctaccaccccttcactacccactccggatacttctccagcctgtacccccatcaccagtttggcccgttcccgcatcatcactcttatccagagcaggagattgtgaatctcttcatcccaacccaggctgtgggcgccatcatcgggaagaagggggcacacatcaaacagctggcgagattcgccggagcctctatcaagattgcccctgcggaaggcccagacgtcagcgaaaggatggtcatcatcaccgggccaccggaagcccagttcaaggcccagggacggatctttgggaaactgaaagaggaaaacttctttaaccccaaagaagaagtgaagctggaagcgcatatcagagtgccctcttccacagctggccgggtgattggcaaaggtggcaagaccgtgaacgaactgcagaacttaaccagtgcagaagtcatcgtgcctcgtgaccaaacgccagatgaaaatgaggaagtgatcgtcagaattatcgggcacttctttgctagccagactgcacagcgcaagatcagggaaattgtacaacaggtgaagcagcaggagcagaaataccctcagggagtcgcctcacagcgcagcaagtgaggctcccacaggcaccagcaaaacaacggatgaatgtagcccttccaacacctgacagaatgagaccaaacgcagccagccagatcgggagcaaaccaaagaccatctgaggaatgagaagtctgcggaggcggccagggactctgccgaggccctgagaaccccaggggccgaggaggggcggggaaggtcagccaggtttgccagaaccaccgagccccgcctcccgccccccagggcttctgcaggcttcagccatccacttcaccatccactcggatctctcctgaactcccacgacgctatcccttttagttgaactaacataggtgaacgtgttcaaagccaagcaaaatgcacaccctttttctgtggcaaatcgtctctgtacatgtgtgtacatattagaaagggaagatgttaagatatgtggcctgtgggttacacagggtgcctgcagcggtaatatattttagaaataatatatcaaataactcaactaactccaatttttaatcaattattaatttttttttctttttaaagagaaagcaggcttttctagactttaaagaataaagtctttgggaggtctcacggtgtagagaggagctttgaggccacccgcacaaaattcacccagagggaaatctcgtcggaaggacactcacggcagttctggatcacctgtgtatgtcaacagaagggataccgtctccttgaagaggaaactctgtcactcctcatgcctgtctagctcatacacccatttctctttgcttcacaggttttaaactggttttttgcatactgctatataattctctgtctctctctgtttatctctcccctccctcccctccccttcttctccatctccattcttttgaatttcctcatccctccatctcaatcccgtatctacgcacccccccccccccaggcaaagcagtgctctgagtatcacatcacacaaaaggaacaaaagcgaaacacacaaaccagcctcaacttacacttggttactcaaaagaacaagagtcaatggtacttgtcctagcgttttggaagaggaaaacaggaacccaccaaaccaaccaatcaaccaaacaaagaaaaaattccacaatgaaagaatgtattttgtctttttgcattttggtgtataagccatcaatattcagcaaaatgattcctttctttaaaaaaaaaaaatgtggaggaaagtagaaatttaccaaggttgttggcccagggcgttaaattcacagatttttttaacgagaaaaacacacagaagaagctacctcaggtgtttttacctcagcaccttgctcttgtgtttcccttagagattttgtaaagctgatagttggagcatttttttatttttttaataaaaatgagttggaaaaaaaataagatatcaactgccagcctggagaaggtgacagtccaagtgtgcaacagctgttctgaattgtcttccgctagccaagaacctatatggccttcttttggacaaaccttgaaaatgtttatttaaaaaaaaaaaa

SEQ ID NO: 143041 - DNA, 1711 bp, Homo sapiens
  Payload ID: 8259
  Gene Symbol: IGF2BP2
  Gene Name: insulin-like growth factor 2 mRNA binding protein 2
  Uniprot ID: Q9Y6M1
  ENST ID: ENST00000421047
  CDS Start-End: 71-1681
aggctaagggagagatagctaatgaccggtattgtgtactgagatcagacttcagggatgaagcagctgtatgttctcatgtcctggacactaccacgttgatggctttctaaatccagggagcaggaaaattcagattcgaaacatccctcctcacctgcagtgggaggtgttggatggacttttggctcaatatgggacagtggagaatgtggaacaagtcaacacagacacagaaaccgccgttgtcaacgtcacatatgcaacaagagaagaagcaaaaatagccatggagaagctaagcgggcatcagtttgagaactactccttcaagatttcctacatcccggatgaagaggtgagctccccttcgccccctcagcgagcccagcgtggggaccactcttcccgggagcaaggccacgcccctgggggcacttctcaggccagacagattgatttcccgctgcggatcctggtccccacccagtttgttggtgccatcatcggaaaggagggcttgaccataaagaacatcactaagcagacccagtcccgggtagatatccatagaaaagagaactctggagctgcagagaagcctgtcaccatccatgccaccccagaggggacttctgaagcatgccgcatgattcttgaaatcatgcagaaagaggcagatgagaccaaactagccgaagagattcctctgaaaatcttggcacacaatggcttggttggaagactgattggaaaagaaggcagaaatttgaagaaaattgaacatgaaacagggaccaagataacaatctcatctttgcaggatttgagcatatacaacccggaaagaaccatcactgtgaagggcacagttgaggcctgtgccagtgctgagatagagattatgaagaagctgcgtgaggcctttgaaaatgatatgctggctgttaaccaacaagccaatctgatcccagggttgaacctcagcgcacttggcatcttttcaacaggactgtccgtgctatctccaccagcagggccccgcggagctccccccgctgccccctaccaccccttcactacccactccggatacttctccagcctgtacccccatcaccagtttggcccgttcccgcatcatcactcttatccagagcaggagattgtgaatctcttcatcccaacccaggctgtgggcgccatcatcgggaagaagggggcacacatcaaacagctggcgagattcgccggagcctctatcaagattgcccctgcggaaggcccagacgtcagcgaaaggatggtcatcatcaccgggccaccggaagcccagttcaaggcccagggacggatctttgggaaactgaaagaggaaaacttctttaaccccaaagaagaagtgaagctggaagcgcatatcagagtgccctcttccacagctggccgggtgattggcaaaggtggcaagaccgtgaacgaactgcagaacttaaccagtgcagaagtcatcgtgcctcgtgaccaaacgccagatgaaaatgaggaagtgatcgtcagaattatcgggcacttctttgctagccagactgcacagcgcaagatcagggaaattgtacaacaggtgaagcagcaggagcagaaataccctcagggagtcgcctcacagcgcagcaagtgaggctcccacaggcaccagcaaaacaacgga

SEQ ID NO: 143042 - DNA, 4250 bp, Homo sapiens
  Payload ID: 8260
  Gene Symbol: IGF2BP3
  Gene Name: insulin-like growth factor 2 mRNA binding protein 3
  Uniprot ID: O00425
  ENST ID: ENST00000258729
  CDS Start-End: 358-2097
ggccgaagccaaaggggttgggaaggaagagacaaaaagtagttttttcccctcctcctcctcctttctcttgctaatcccgcctcctcctaagacttaggaagactggtggatgcgtttgggttgtagctaggctttttcttttctttctcttttaaaacacatctagacaaggaaaaaacaagcctcggatctgatttttcactcctcgttcttgtgcttggttcttactgtgtttgtgtattttaaaggcgagaagacgaggggaacaaaaccagctggatccatccatcaccgtgggtggttttaatttttcgttttttctcgttatttttttttaaacaaccactcttcacaatgaacaaactgtatatcggaaacctcagcgagaacgccgccccctcggacctagaaagtatcttcaaggacgccaagatcccggtgtcgggacccttcctggtgaagactggctacgcgttcgtggactgcccggacgagagctgggccctcaaggccatcgaggcgctttcaggtaaaatagaactgcacgggaaacccatagaagttgagcactcggtcccaaaaaggcaaaggattcggaaacttcagatacgaaatatcccgcctcatttacagtgggaggtgctggatagtttactagtccagtatggagtggtggagagctgtgagcaagtgaacactgactcggaaactgcagttgtaaatgtaacctattccagtaaggaccaagctagacaagcactagacaaactgaatggatttcagttagagaatttcaccttgaaagtagcctatatccctgatgaaatggccgcccagcaaaaccccttgcagcagccccgaggtcgccgggggcttgggcagaggggctcctcaaggcaggggtctccaggatccgtatccaagcagaaaccatgtgatttgcctctgcgcctgctggttcccacccaatttgttggagccatcataggaaaagaaggtgccaccattcggaacatcaccaaacagacccagtctaaaatcgatgtccaccgtaaagaaaatgcgggggctgctgagaagtcgattactatcctctctactcctgaaggcacctctgcggcttgtaagtctattctggagattatgcataaggaagctcaagatataaaattcacagaagagatccccttgaagattttagctcataataactttgttggacgtcttattggtaaagaaggaagaaatcttaaaaaaattgagcaagacacagacactaaaatcacgatatctccattgcaggaattgacgctgtataatccagaacgcactattacagttaaaggcaatgttgagacatgtgccaaagctgaggaggagatcatgaagaaaatcagggagtcttatgaaaatgatattgcttctatgaatcttcaagcacatttaattcctggattaaatctgaacgccttgggtctgttcccacccacttcagggatgccacctcccacctcagggcccccttcagccatgactcctccctacccgcagtttgagcaatcagaaacggagactgttcatctgtttatcccagctctatcagtcggtgccatcatcggcaagcagggccagcacatcaagcagctttctcgctttgctggagcttcaattaagattgctccagcggaagcaccagatgctaaagtgaggatggtgattatcactggaccaccagaggctcagttcaaggctcagggaagaatttatggaaaaattaaagaagaaaactttgttagtcctaaagaagaggtgaaacttgaagctcatatcagagtgccatcctttgctgctggcagagttattggaaaaggaggcaaaacggtgaatgaacttcagaatttgtcaagtgcagaagttgttgtccctcgtgaccagacacctgatgagaatgaccaagtggttgtcaaaataactggtcacttctatgcttgccaggttgcccagagaaaaattcaggaaattctgactcaggtaaagcagcaccaacaacagaaggctctgcaaagtggaccacctcagtcaagacggaagtaaaggctcaggaaacagcccaccacagaggcagatgccaaaccaaagacagattgcttaaccaacagatgggcgctgaccccctatccagaatcacatgcacaagtttttacctagccagttgtttctgaggaccaggcaacttttgaactcctgtctctgtgagaatgtatactttatgctctctgaaatgtatgacacccagctttaaaacaaacaaacaaacaaacaaaaaaagggtgggggagggagggaaagagaagagctctgcacttccctttgttgtagtctcacagtataacagatattctaattcttcttaatattcccccataatgccagaaattggcttaatgatgctttcactaaattcatcaaatagattgctcctaaatccaattgttaaaattggatcagaataattatcacaggaacttaaatgttaagccattagcatagaaaaactgttctcagttttatttttacctaacactaacatgagtaacctaagggaagtgctgaatggtgttggcaggggtattaaacgtgcatttttactcaactacctcaggtattcagtaatacaatgaaaagcaaaattgttccttttttttgaaaattttatatactttataatgatagaagtccaaccgttttttaaaaaataaatttaaaatttaacagcaatcagctaacaggcaaattaagatttttacttctggctggtgacagtaaagctggaaaattaatttcagggttttttgaggcttttgacacagttattagttaaatcaaatgttcaaaaatacggagcagtgcctagtatctggagagcagcactaccatttattctttcatttatagttgggaaagtttttgacggtactaacaaagtggtcgcaggagattttggaacggctggtttaaatggcttcaggagacttcagttttttgtttagctacatgattgaatgcataataaatgctttgtgcttctgactatcaatacctaaagaaagtgcatcagtgaagagatgcaagactttcaactgactggcaaaaagcaagctttagcttgtcttataggatgcttagtttgccactacacttcagaccaatgggacagtcatagatggtgtgacagtgtttaaacgcaacaaaaggctacatttccatggggccagcactgtcatgagcctcactaagctattttgaagatttttaagcactgataaattaaaaaaaaaaaattagactccaccttaagtagtaaagtataacaggatttctgtatactgtgcaatcagttctttgaaaaaaaagtcaaaagatagagaatacaagaaaagtttttgggatataatttgaatgactgtgaaaacatatgacctttgataacgaactcatttgctcactccttgacagcaaagcccagtacgtacaattgtgttgggtgtgggtggtctccaaggccacgctgctctctgaattgattttttgagttttgtttgtaagatgatcacagtcatgttacactgatctaaaggacatatatataaccctttaaaaaaaaaatcactgcctcattcttatttcaagatgaatttctatacagactagatgtttttctgaagatcaattagacattttgaaaatgatttaaagtgttttccttaatgttctctgaaaacaagtttcttttgtagttttaaccaaaaaagtgccctttttgtcactggattctcctagcattcatgatttttttttcatacaatgaattaaaattgctaaaatcatggactggctttctggttggatttcaggtaagatgtgtttaaggccagagcttttctcagtatttgatttttttccccaatatttgattttttaaaaatatacacataggtgctgcatttatatctgctggtttaaattctgtcatatttcacttctagccttttagtatggcaaatcatattttacttttacttaagcatttgtaatttggagtatctggtactagctaagaaataattctataattgagttttgtactcaccatatatggatcattcctcatgtataatgtgccccaaatgcagcttcattttccagataccttgacgcagaataaattttttcatcatttaggtgca

SEQ ID NO: 143043 - DNA, 2988 bp, Homo sapiens
  Payload ID: 8260
  Gene Symbol: IGF2BP3
  Gene Name: insulin-like growth factor 2 mRNA binding protein 3
  ENST ID: ENST00000421467
  CDS Start-End: 346-591
aggggttgggaaggaagagacaaaaagtagttttttcccctcctcctcctcctttctcttgctaatcccgcctcctcctaagacttaggaagactggtggatgcgtttgggttgtagctaggctttttcttttctttctcttttaaaacacatctagacaaggaaaaaacaagcctcggatctgatttttcactcctcgttcttgtgcttggttcttactgtgtttgtgtattttaaaggcgagaagacgaggggaacaaaaccagctggatccatccatcaccgtgggtggttttaatttttcgttttttctcgttatttttttttaaacaaccactcttcacaatgaacaaactgtatatcggaaacctcagcgagaacgccgccccctcggacctagaaagtatcttcaaggacgccaagatcccggtgtcgggacccttcctggtgaagactggctacgcgttcgtggactgcccggacgagagctgggccctcaaggccatcgaggcgctttcaggtaaaatagaactgcacgggaaacccatagaagttgagcactcggtcccaaaaaggcaaagtgaacactgactcggaaactgcagttgtaaatgtaacctattccagtaaggaccaagctagacaagcactagacaaactgaatggatttcagttagagaatttcaccttgaaagtagcctatatccctgatgaaatggccgcccagcaaaaccccttgcagcagccccgaggtcgccgggggcttgggcagaggggctcctcaaggcaggggtctccaggatccgtatccaagcagaaaccatgtgatttgcctctgcgcctgctggttcccacccaatttgttggagccatcataggaaaagaaggtgccaccattcggaacatcaccaaacagacccagtctaaaatcgatgtccaccgtaaagaaaatgcgggggctgctgagaagtcgattactatcctctctactcctgaaggcacctctgcggcttgtaagtctattctggagattatgcataaggaagctcaagatataaaattcacagaagagatccccttgaagattttagctcataataactttgttggacgtcttattggtaaagaaggaagaaatcttaaaaaaattgagcaagacacagacactaaaatcacgatatctccattgcaggaattgacgctgtataatccagaacgcactattacagttaaaggcaatgttgagacatgtgccaaagctgaggaggagatcatgaagaaaatcagggagtcttatgaaaatgatattgcttctatgaatcttcaagcacatttaattcctggattaaatctgaacgccttgggtctgttcccacccacttcagggatgccacctcccacctcagggcccccttcagccatgactcctccctacccgcagtttgagattgctccagcggaagcaccagatgctaaagtgaggatggtgattatcactggaccaccagaggctcagttcaaggctcagggaagaatttatggaaaaattaaagaagaaaactttgttagtcctaaagaagaggtgaaacttgaagctcatatcagagtgccatcctttgctgctggcagagttattggaaaaggaggcaaaacggtgaatgaacttcagaatttgtcaagtgcagaagttgttgtccctcgtgaccagacacctgatgagaatgaccaagtggttgtcaaaataactggtcacttctatgcttgccaggttgcccagagaaaaattcaggaaattctgactcaggtaaagcagcaccaacaacagaaggctctgcaaagtggaccacctcagtcaagacggaagtaaaggctcaggaaacagcccaccacagaggcagatgccaaaccaaagacagattgcttaaccaacagatgggcgctgaccccctatccagaatcacatgcacaagtttttacctagccagttgtttctgaggaccaggcaacttttgaactcctgtctctgtgagaatgtatactttatgctctctgaaatgtatgacacccagctttaaaacaaacaaacaaacaaacaaaaaaagggtgggggagggagggaaagagaagagctctgcacttccctttgttgtagtctcacagtataacagatattctaattcttcttaatattcccccataatgccagaaattggcttaatgatgctttcactaaattcatcaaatagattgctcctaaatccaattgttaaaattggatcagaataattatcacaggaacttaaatgttaagccattagcatagaaaaactgttctcagttttatttttacctaacactaacatgagtaacctaagggaagtgctgaatggtgttggcaggggtattaaacgtgcatttttactcaactacctcaggtattcagtaatacaatgaaaagcaaaattgttccttttttttgaaaattttatatactttataatgatagaagtccaaccgttttttaaaaaataaatttaaaatttaacagcaatcagctaacaggcaaattaagatttttacttctggctggtgacagtaaagctggaaaattaatttcagggttttttgaggcttttgacacagttattagttaaatcaaatgttcaaaaatacggagcagtgcctagtatctggagagcagcactaccatttattctttcatttatagttgggaaagtttttgacggtactaacaaagtggtcgcaggagattttggaacggctggtttaaatggcttcaggagacttcagttttttgtttagctacatgattgaatgcataataaatgctttgtgcttctgactatcaatacctaaagaaagtgcatcagtgaagagatgcaagactttcaactgactggcaaaaagcaagctttagcttgtcttataggatgcttagtttgccactacacttcagaccaatgggac

SEQ ID NO: 143044 - DNA, 2126 bp, Homo sapiens
  Payload ID: 8260
  Gene Symbol: IGF2BP3
  Gene Name: insulin-like growth factor 2 mRNA binding protein 3
  Uniprot ID: O00425
  ENST ID: ENST00000619562
  CDS Start-End: 295-891
ggctgctgagaagtcgattactatcctctctactcctgaaggcacctctgcggcttgtaagtctattctggagattatgcataaggaagctcaagatataaaattcacagaagagatccccttgaagattttagctcataataactttgttggacgtcttattggtaaagaaggaagaaatcttaaaaaaattgagcaagacacagacactaaaatcacgatatctcccttcaagcacatttaattcctggattaaatctgaacgccttgggtctgttcccacccacttcagggatgccacctcccacctcagggcccccttcagccatgactcctccctacccgcagtttgagcaatcagaaacggagactgttcatctgtttatcccagctctatcagtcggtgccatcatcggcaagcagggccagcacatcaagcagctttctcgctttgctggagcttcaattaagattgctccagcggaagcaccagatgctaaagtgaggatggtgattatcactggaccaccagaggctcagttcaaggctcagggaagaatttatggaaaaattaaagaagaaaactttgttagtcctaaagaagaggtgaaacttgaagctcatatcagagtgccatcctttgctgctggcagagttattggaaaaggaggcaaaacggtgaatgaacttcagaatttgtcaagtgcagaagttgttgtccctcgtgaccagacacctgatgagaatgaccaagtggttgtcaaaataactggtcacttctatgcttgccaggttgcccagagaaaaattcaggaaattctgactcaggtaaagcagcaccaacaacagaaggctctgcaaagtggaccacctcagtcaagacggaagtaaaggctcaggaaacagcccaccacagaggcagatgccaaaccaaagacagattgcttaaccaacagatgggcgctgaccccctatccagaatcacatgcacaagtttttacctagccagttgtttctgaggaccaggcaacttttgaactcctgtctctgtgagaatgtatactttatgctctctgaaatgtatgacacccagctttaaaacaaacaaacaaacaaacaaaaaaagggtgggggagggagggaaagagaagagctctgcacttccctttgttgtagtctcacagtataacagatattctaattcttcttaatattcccccataatgccagaaattggcttaatgatgctttcactaaattcatcaaatagattgctcctaaatccaattgttaaaattggatcagaataattatcacaggaacttaaatgttaagccattagcatagaaaaactgttctcagttttatttttacctaacactaacatgagtaacctaagggaagtgctgaatggtgttggcaggggtattaaacgtgcatttttactcaactacctcaggtattcagtaatacaatgaaaagcaaaattgttccttttttttgaaaattttatatactttataatgatagaagtccaaccgttttttaaaaaataaatttaaaatttaacagcaatcagctaacaggcaaattaagatttttacttctggctggtgacagtaaagctggaaaattaatttcagggttttttgaggcttttgacacagttattagttaaatcaaatgttcaaaaatacggagcagtgcctagtatctggagagcagcactaccatttattctttcatttatagttgggaaagtttttgacggtactaacaaagtggtcgcaggagattttggaacggctggtttaaatggcttcaggagacttcagttttttgtttagctacatgattgaatgcataataaatgctttgtgcttctgactatcaatacctaaagaaagtgcatcagtgaagagatgcaagactttcaactgactggcaaaaagcaagctttagcttgtcttataggatgcttagtttgccactacacttcagaccaatgggacagtcatagatggtgtgacagtgtttaaacgcaacaaaaggctacatttccatggggccagcactgtcatgagcctcactaagctattttgaagatttttaagcactgataaatt

SEQ ID NO: 143045 - DNA, 14044 bp, Homo sapiens
  Payload ID: 8261
  Gene Symbol: IGF2R
  Gene Name: insulin-like growth factor 2 receptor
  Uniprot ID: P11717
  ENST ID: ENST00000356956
  CDS Start-End: 149-7624
cgagcccagtcgagccgcgctcacctcgggctcccgctccgtctccacctccgcctttgccctggcggcgcgaccccgtcccgggcgcggcccccagcagtcgcgcgccgttagcctcgcgcccgccgcgcagtccgggcccggcgcgatgggggccgccgccggccggagcccccacctggggcccgcgcccgcccgccgcccgcagcgctctctgctcctgctgcagctgctgctgctcgtcgctgccccggggtccacgcaggcccaggccgccccgttccccgagctgtgcagttatacatgggaagctgttgataccaaaaataatgtactttataaaatcaacatctgtggaagtgtggatattgtccagtgcgggccatcaagtgctgtttgtatgcacgacttgaagacacgcacttatcattcagtgggtgactctgttttgagaagtgcaaccagatctctcctggaattcaacacaacagtgagctgtgaccagcaaggcacaaatcacagagtccagagcagcattgccttcctgtgtgggaaaaccctgggaactcctgaatttgtaactgcaacagaatgtgtgcactactttgagtggaggaccactgcagcctgcaagaaagacatatttaaagcaaataaggaggtgccatgctatgtgtttgatgaagagttgaggaagcatgatctcaatcctctgatcaagcttagtggtgcctacttggtggatgactccgatccggacacttctctattcatcaatgtttgtagagacatagacacactacgagacccaggttcacagctgcgggcctgtccccccggcactgccgcctgcctggtaagaggacaccaggcgtttgatgttggccagccccgggacggactgaagctggtgcgcaaggacaggcttgtcctgagttacgtgagggaagaggcaggaaagctagacttttgtgatggtcacagccctgcggtgactattacatttgtttgcccgtcggagcggagagagggcaccattcccaaactcacagctaaatccaactgccgctatgaaattgagtggattactgagtatgcctgccacagagattacctggaaagtaaaacttgttctctgagcggcgagcagcaggatgtctccatagacctcacaccacttgcccagagcggaggttcatcctatatttcagatggaaaagaatatttgttttatttgaatgtctgtggagaaactgaaatacagttctgtaataaaaaacaagctgcagtttgccaagtgaaaaagagcgatacctctcaagtcaaagcagcaggaagataccacaatcagaccctccgatattcggatggagacctcaccttgatatattttggaggtgatgaatgcagctcagggtttcagcggatgagcgtcataaactttgagtgcaataaaaccgcaggtaacgatgggaaaggaactcctgtattcacaggggaggttgactgcacctacttcttcacatgggacacggaatacgcctgtgttaaggagaaggaagacctcctctgcggtgccaccgacgggaagaagcgctatgacctgtccgcgctggtccgccatgcagaaccagagcagaattgggaagctgtggatggcagtcagacggaaacagagaagaagcattttttcattaatatttgtcacagagtgctgcaggaaggcaaggcacgagggtgtcccgaggacgcggcagtgtgtgcagtggataaaaatggaagtaaaaatctgggaaaatttatttcctctcccatgaaagagaaaggaaacattcaactctcttattcagatggtgatgattgtggtcatggcaagaaaattaaaactaatatcacacttgtatgcaagccaggtgatctggaaagtgcaccagtgttgagaacttctggggaaggcggttgcttttatgagtttgagtggcacacagctgcggcctgtgtgctgtctaagacagaaggggagaactgcacggtctttgactcccaggcagggttttcttttgacttatcacctctcacaaagaaaaatggtgcctataaagttgagacaaagaagtatgacttttatataaatgtgtgtggcccggtgtctgtgagcccctgtcagccagactcaggagcctgccaggtggcaaaaagtgatgagaagacttggaacttgggtctgagtaatgcgaagctttcatattatgatgggatgatccaactgaactacagaggcggcacaccctataacaatgaaagacacacaccgagagctacgctcatcacctttctctgtgatcgagacgcgggagtgggcttccctgaatatcaggaagaggataactccacctacaacttccggtggtacaccagctatgcctgcccggaggagcccctggaatgcgtagtgaccgacccctccacgctggagcagtacgacctctccagtctggcaaaatctgaaggtggccttggaggaaactggtatgccatggacaactcaggggaacatgtcacgtggaggaaatactacattaacgtgtgtcggcctctgaatccagtgccgggctgcaaccgatatgcatcggcttgccagatgaagtatgaaaaagatcagggctccttcactgaagtggtttccatcagtaacttgggaatggcaaagaccggcccggtggttgaggacagcggcagcctccttctggaatacgtgaatgggtcggcctgcaccaccagcgatggcagacagaccacatataccacgaggatccatctcgtctgctccaggggcaggctgaacagccaccccatcttttctctcaactgggagtgtgtggtcagtttcctgtggaacacagaggctgcctgtcccattcagacaacgacggatacagaccaggcttgctctataagggatcccaacagtggatttgtgtttaatcttaatccgctaaacagttcgcaaggatataacgtctctggcattgggaagatttttatgtttaatgtctgcggcacaatgcctgtctgtgggaccatcctgggaaaacctgcttctggctgtgaggcagaaacccaaactgaagagctcaagaattggaagccagcaaggccagtcggaattgagaaaagcctccagctgtccacagagggcttcatcactctgacctacaaagggcctctctctgccaaaggtaccgctgatgcttttatcgtccgctttgtttgcaatgatgatgtttactcagggcccctcaaattcctgcatcaagatatcgactctgggcaagggatccgaaacacttactttgagtttgaaaccgcgttggcctgtgttccttctccagtggactgccaagtcaccgacctggctggaaatgagtacgacctgactggcctaagcacagtcaggaaaccttggacggctgttgacacctctgtcgatgggagaaagaggactttctatttgagcgtttgcaatcctctcccttacattcctggatgccagggcagcgcagtggggtcttgcttagtgtcagaaggcaatagctggaatctgggtgtggtgcagatgagtccccaagccgcggcgaatggatctttgagcatcatgtatgtcaacggtgacaagtgtgggaaccagcgcttctccaccaggatcacgtttgagtgtgctcagatatcgggctcaccagcatttcagcttcaggatggttgtgagtacgtgtttatctggagaactgtggaagcctgtcccgttgtcagagtggaaggggacaactgtgaggtgaaagacccaaggcatggcaacttgtatgacctgaagcccctgggcctcaacgacaccatcgtgagcgctggcgaatacacttattacttccgggtctgtgggaagctttcctcagacgtctgccccacaagtgacaagtccaaggtggtctcctcatgtcaggaaaagcgggaaccgcagggatttcacaaagtggcaggtctcctgactcagaagctaacttatgaaaatggcttgttaaaaatgaacttcacggggggggacacttgccataaggtttatcagcgctccacagccatcttcttctactgtgaccgcggcacccagcggccagtatttctaaaggagacttcagattgttcctacttgtttgagtggcgaacgcagtatgcctgcccacctttcgatctgactgaatgttcattcaaagatggggctggcaactccttcgacctctcgtccctgtcaaggtacagtgacaactgggaagccatcactgggacgggggacccggagcactacctcatcaatgtctgcaagtctctggccccgcaggctggcactgagccgtgccctccagaagcagccgcgtgtctgctgggtggctccaagcccgtgaacctcggcagggtaagggacggacctcagtggagagatggcataattgtcctgaaatacgttgatggcgacttatgtccagatgggattcggaaaaagtcaaccaccatccgattcacctgcagcgagagccaagtgaactccaggcccatgttcatcagcgccgtggaggactgtgagtacacctttgcctggcccacagccacagcctgtcccatgaagagcaacgagcatgatgactgccaggtcaccaacccaagcacaggacacctgtttgatctgagctccttaagtggcagggcgggattcacagctgcttacagcgagaaggggttggtttacatgagcatctgtggggagaatgaaaactgccctcctggcgtgggggcctgctttggacagaccaggattagcgtgggcaaggccaacaagaggctgagatacgtggaccaggtcctgcagctggtgtacaaggatgggtccccttgtccctccaaatccggcctgagctataagagtgtgatcagtttcgtgtgcaggcctgaggccaggccaaccaataggcccatgctcatctccctggacaagcagacatgcactctcttcttctcctggcacacgccgctggcctgcgagcaagcgaccgaatgttccgtgaggaatggaagctctattgttgacttgtctccccttattcatcgcactggtggttatgaggcttatgatgagagtgaggatgatgcctccgataccaaccctgatttctacatcaatatttgtcagccactaaatcccatgcacggagtgccctgtcctgccggagccgctgtgtgcaaagttcctattgatggtccccccatagatatcggccgggtagcaggaccaccaatactcaatccaatagcaaatgagatttacttgaattttgaaagcagtactccttgcttagcggacaagcatttcaactacacctcgctcatcgcgtttcactgtaagagaggtgtgagcatgggaacgcctaagctgttaaggaccagcgagtgcgactttgtgttcgaatgggagactcctgtcgtctgtcctgatgaagtgaggatggatggctgtaccctgacagatgagcagctcctctacagcttcaacttgtccagcctttccacgagcacctttaaggtgactcgcgactcgcgcacctacagcgttggggtgtgcacctttgcagtcgggccagaacaaggaggctgtaaggacggaggagtctgtctgctctcaggcaccaagggggcatcctttggacggctgcaatcaatgaaactggattacaggcaccaggatgaagcggtcgttttaagttacgtgaatggtgatcgttgccctccagaaaccgatgacggcgtcccctgtgtcttccccttcatattcaatgggaagagctacgaggagtgcatcatagagagcagggcgaagctgtggtgtagcacaactgcggactacgacagagaccacgagtggggcttctgcagacactcaaacagctaccggacatccagcatcatatttaagtgtgatgaagatgaggacattgggaggccacaagtcttcagtgaagtgcgtgggtgtgatgtgacatttgagtggaaaacaaaagttgtctgccctccaaagaagttggagtgcaaattcgtccagaaacacaaaacctacgacctgcggctgctctcctctctcaccgggtcctggtccctcgtccacaacggagtctcgtactatataaatctgtgccagaaaatatataaagggcccctgggctgctctgaaagggccagcatttgcagaaggaccacaactggtgacgtccaggtcctgggactcgttcacacgcagaagctgggtgtcataggtgacaaagttgttgtcacgtactccaaaggttatccgtgtggtggaaataagaccgcatcctccgtgatagaattgacctgtacaaagacggtgggcagacctgcattcaagaggtttgatatcgacagctgcacttactacttcagctgggactcccgggctgcctgcgccgtgaagcctcaggaggtgcagatggtgaatgggaccatcaccaaccctataaatggcaagagcttcagcctcggagatatttattttaagctgttcagagcctctggggacatgaggaccaatggggacaactacctgtatgagatccaactttcctccatcacaagctccagaaacccggcgtgctctggagccaacatatgccaggtgaagcccaacgatcagcacttcagtcggaaagttggaacctctgacaagaccaagtactaccttcaagacggcgatctcgatgtcgtgtttgcctcttcctctaagtgcggaaaggataagaccaagtctgtttcttccaccatcttcttccactgtgaccctctggtggaggacgggatccccgagttcagtcacgagactgccgactgccagtacctcttctcttggtacacctcagccgtgtgtcctctgggggtgggctttgacagcgagaatcccggggacgacgggcagatgcacaaggggctgtcagaacggagccaggcagtcggcgcggtgctcagcctgctgctggtggcgctcacctgctgcctgctggccctgttgctctacaagaaggagaggagggaaacagtgataagtaagctgaccacttgctgtaggagaagttccaacgtgtcctacaaatactcaaaggtgaataaggaagaagagacagatgagaatgaaacagagtggctgatggaagagatccagctgcctcctccacggcagggaaaggaagggcaggagaacggccatattaccaccaagtcagtgaaagccctcagctccctgcatggggatgaccaggacagtgaggatgaggttctgaccatcccagaggtgaaagttcactcgggcaggggagctggggcagagagctcccacccagtgagaaacgcacagagcaatgcccttcaggagcgtgaggacgatagggtggggctggtcaggggtgagaaggcgaggaaagggaagtccagctctgcacagcagaagacagtgagctccaccaagctggtgtccttccatgacgacagcgacgaggacctcttacacatctgactccgcagtgcctgcaggggagcacggagccgcgggacagccaagcacctccaaccaaataagacttccactcgatgatgcttctataattttgcctttaacagaaactttcaaaagggaagagtttttgtgatgggggagagggtgaaggaggtcaggccccactccttcctgattgtttacagtcattggaataaggcatggctcagatcggccacagggcggtaccttgtgcccagggttttgccccaagtcctcatttaaaagcataaggccggacgcatctcaaaacagagggctgcattcgaagaaacccttgctgctttagtcccgatagggtatttgaccccgatatattttagcattttaattctctccccctatttattgactttgacaattactcaggtttgagaaaaaggaaaaaaaaacagccaccgtttcttcctgccagcaggggtgtgatgtaccagtttgtccatcttgagatggtgaggctgtcagtgtatggggcagcttccggcgggatgttgaactggtcattaatgtgtcccctgagttggagctcattctgtctcttttctcttttgctttctgtttcttaagggcacacacacgtgcgtgcgagcacacacacacatacgtgcacagggtccccgagtgcctaggttttggagagtttgcctgttctatgcctttagtcaggaatggctgcacctttttgcatgatatcttcaagcctgggcgtacagagcacatttgtcagtatttttgccggctggtgaattcaaacaacctgcccaaagattgatttgtgtgtttgtgtgtgtgtgtgtgtgtgtgtgtgtgtgtgtgagtggagttgaggtgtcagagaaaatgaattttttccagatttggggtataggtctcatctcttcaggttctcatgataccacctttactgtgcttatttttttaagaaaaaagtgttgatcaaccattcgacctataagaagccttaatttgcacagtgtgtgacttacagaaactgcatgaaaaatcatgggccagagcctcggccctagcattgcacttggcctcatgctggagggaggctgggcgggtacagcgcggaggaggagggaggccaggcgggcatggcgtggaggaggagggaggccgggcggtcacagcatggaggaggagggaggcgctgctggtgttcttattctggcggcagcgcctttcctgccatgtttagtgaatgacttttctcgcattgtagaattgtatatagactctggtgttctattgctgagaagcaaaccgccctgcagcatccctcagcctgtaccggtttggctggcttgtttgatttcaacatgagtgtattttttaaaattgatttttctcttcatttttttttcaatcaactttactgtaatataaagtattcaacaatttcaataaaagataaattattaattgggtgttaccattttttccttgatagtgagacgttcccgagcgagttacccatctgcctgcctgtcttttctttctgttaagtgactgaatttgggttttaactctggtgttctcgttgaccctttatgaggcagcactttcatttttctccagagtctcctggtcgtaggtgttaactttgggtccaatctgccttcccttggctctttctagatccgatttctttaccttctccaggccaacctcggggtgtggtcctgttcatcaaaacaatgaacatggagtttagagtccagtgagtcaataaagcttttttttgtgcaacctgatctaacatggagatgttttctcttgagtaaactcactgagttttccatcttaaattactcagcagtgactgagagctacctgcatggaagcaggaagttactccagtgttataaacaaacttcttagactcaacatcctattctccatccctttttttttcctgtagagtccaaaaacctcaaccgtctcatttttaaattatccaattggagttacctttttaaaaaagttattcttaaggactttccaatacctctcctgaggaagacatgtcaggtcttctaaaagtttacattatgaccaaagaaagatgctggtcctcaggcattctacccagggggctgttctccaggccattcccacctcctgctaagaccatggggagccctctctgtaaggaggggcatatgcagggacctgcccatccccttggtaagctggatggcaaaaaggcatgttgtctgcaccactggctgcctgctaatgtcgctgtcagtggggaaggagaagtgacaacacgtttgagtgcatttgctttgactcttagaaacccaagcctctgaaaaaagagtaactacttgccagctgttgttacagatgatatttttaggaaaacatcccgtgacagcaaatcagaattggactctttttcagagaaatgattttattgatggagtacaacctgggtatttagcttcctttcaacaaaattttttgtgcccctttcttgagactgtccatgaatgacagagacatagaataagaactggggtgctaaagatggaataggcaaaccccacaccaaggaaatccacagtgaagtggaaatctggttcttatgaacattttaagagcatctgaagcctgtacttcaccaaccctaaaataatacgtaacacgagatgattcctcaggaaggaacatatagacatacagacaggagacaacatatagacattagaacttacaggacaaagaactctttttccctgaatcatttgagatgaagtttcttcccatcaccaggcattcctacaaacaaggaccttcacacgactaagatgccacctggtgattaaagaacactttgggctggtccgatccattgtacaagttaaagcactgatgggtacacaggtcttacccctgttggcgatcgggtcacaaggagccagtgtgtgtgtcaccaggaggttgtatggacgagactggatttctggaaatatcctttactgactctgaagaatcccatggctcagggaggtacactcatgtcctttcttacttctccggttccactctgttgactagtagttggcctcttgagccatacttgctgtcagttctggacattgttctgtgagaatggggtcaacgggcagtcgtggtgcaggtgagcttgtgtgcaaggcggcaagatagccacattgagttggggacagtatggcctgggggtgttggataggtaaggcagaagcaagcccagaacttggagcctgttgtgactgtcacagtaaggagtttgaagtcctgaaagcagttgagagctgtaggagggccagattgggcttttgagcaagatagtctagatgaaagtaaagagatggagacgcttcagcaaccagatgggaggttgggcatgggagctgtggctgtgctgagctgagaagcctcagactgcctgcgaggctctctctgggaggaagtcaggtctttctttccttcgtttccttcctttcattcctttcctttccttcctttttcctctttctttctttccttttctctctctctctttttctttctctctttctttcgagatggagtctcgctctgttgccaggctggagtgcagtggcatgatctcggctcactgcaatctctgcctcccgggttcaagggattctcctgcctcagcctccctagtagctgggattaaaggcacgcactgccacgcccggctaatttttgtatttttaatagcgacagggtttcaccgtgttggccaggatggtctcgatctcctgacctcatgatccacctgcctcggcctccgaaagtgctgggattacaggcgtgagccaccgtgcccagccaggtctttttcttaaagagggacagactgaaggtaggctgtgaatggtcagttatttgtatttctttaccttttatgctatcttgtagtttgaccagtttgcaaaacaaattgaataaaaagtaattgataatgttgttttgatgctcagtgtttgagggaaacacaatctagtgaatggggttattggttgtcacacctgggagagtgaaaatgaggggctcacaacccaggtgaggtcatctggtgccactcagccccatcccagagaaagcagccttgggatgctggcctcggtgacaaccaagaagtgatggtgggttgctagagacagggtggagcacagagccctggaaggaagcaggaagtcaggttcaagaaaggacttgtgacctcacccttggcttcagggttttatttttctttcttttaaaacattttgagacaacatgtagacattcaaacttacagaacaaagaactattttttccctgaatcatttgagactaagttccctcctatcaccagacatttctacaaatgaggaccttcacaggactaaggtgccaccatcagaaccacaatatgtggggacggtactgccagctaagccttagtgctgtttcggtgttgacagctgtcacaatgatgcccttttcagtagaggagcctgtgatggtcacgtgttgcaggtgatcattgtgccatttggtttacttctgtctggaaagtttctcctttctgtaacctccatgaccttgacacatgaggtcactcttctcacccgccccacctctgggagggtgcctgatttgccctgccccacccagcggctttaggactcagctcttcaggaacaattagggagagggcccttgggtctaactgcaaaatcatacttgaactagaaaatcccgttggcataggtatggattgtcatatagaaacatttttcgcagtgtgccccgtggaacacttgttctgtatgttgttaacagatgttttgcaaaaaatgaaaaggacctgagctctaataagtttgggaaatgctgaattgaagtgaaacagcttttcttggtgtgagacctttcagagtctttaaaggagagttgctgaccacacgtgaaatcacaatagaaaatggccagcaggcctccaggtaggcagcaattcctagacatttgcctgtgttccctgggggagctggtggcctgtgaccatccactgggaaattcccttctgtggcgaggttctgttgttttccagaggctcccacggagcatgctgggtgggtggtctgtatgagaccacaccgttgatgagcagtgaggcccaaacaggtatatcaaaaaatgctcagcatcgctgatcatcagggaaatgcacatcataaacacagtgagacgttgcctcacacctgccagaatggctactgtcagacgaaagacaacaagtgtgggtgaggatgtggagaaaagcgaacacttgtccacctttggtgagaatgtaaattggtatagccattatggaaaacaggaagttcctgaaaaaattaagaacagctaccaggaatcccacatctgggtgtatatccaaaagaaatgaagtcagtaccttgaagagatctctgcagcccctgttcattgcagcattattcacaatagccaagatagggaaaaagcctcagtgtctactgacaaataaagatggatcaagaaaatgcatgtatgtatacacacacacagtggaataccaagtcttgcagaagaaggaaatcctgtcatttgtgacaacatggatgagctgagagaacattatgctaagtgaaataagccagacacagaaagaaaaataccagatgatctcacttatatgtggaatctaaaaaggttggactcagaagcagagagtggaatggtggttaccaaaggccagagggtgcaggaagtgagcagatgttggtgaaagggtgcagaggttcagctatgcaacatgaatgaattctggagatccactgtgcagcatggtgactatgatactgctttgtgtatttaaaattttcagagagtagatcttgtgttctttcccctctccaaataaaaggaaattatttgaggtgatggatatgtttaactagcttgactggggcaatgattttgtaatgataagtatctcaaaacatcatgttgtacaacataagtatacaattgacccttgaacaatacaggtttgaactctgtgggtccacttacatgcggttttttttttctgtaaaagttacacccgatgcgtcagccccttcttctacctcttccacctctggcacccttggcacagcaagaccaaccccccacttcctcctcctcctcctcagcctactcagggtaaagacaaggatgaagacctttatgatgatccacttccacttaatatataataaatatattttctcctcatgattttcttaaaactttttctgtattttattgtaagaatacagtatataatacatacaacatcgaaaa

SEQ ID NO: 143046 - DNA, 758 bp, Homo sapiens
  Payload ID: 8261
  Gene Symbol: IGF2R
  Gene Name: insulin-like growth factor 2 receptor
  ENST ID: ENST00000475834
  CDS Start-End: 1-556
ttgcagaaggaccacaactggtgacgtccaggtcctgggactcgttcacacgcagaagctgggtgtcataggtgacaaagttgttgtcacgtactccaaaggttatccgtgtggtggaaataagaccgcatcctccgtgatagaattgacctgtacaaagacggtgggcagacctgcattcaagaggtttgatatcgacagctgcacttactacttcagctgggactcccgggctgcctgcgccgtgaagcctcaggaggtgcagatggtgaatgggaccatcaccaaccctataaatggcaagagcttcagcctcggagatatttattttaagctgttcagagcctctggggacatgaggaccaatggggacaactacctgtatgagatccaactttcctccatcacaagctccagaaacccggcgtgctctggagccaacatatgccaggtgaagcccaacgatcagcacttcagtcggaaagttggaacctctgacaagaccaagtactaccttcaaggtaatccgtggcttcccacaaagttccacatttaacttcctccaaggaaggggattaaaattttcaactaactcccttcagttgaaatctcggaccacttttaaaacaaaaaccttggtctaattctttactttgttatgaatttcttgacagtggattgagcgatacgtgtcagaactaagcatttcactgtaggcaaattgtgtcttagttatcaagtaaatgtacaaaaaaact

SEQ ID NO: 143047 - DNA, 1653 bp, Homo sapiens
  Payload ID: 8262
  Gene Symbol: IGFBP1
  Gene Name: insulin-like growth factor binding protein 1
  Uniprot ID: P08833
  ENST ID: ENST00000275525
  CDS Start-End: 297-1076
ttgggtgcactagcaaaacaaacttattttgaacactcagctcctagcgtgcggcgctgccaatcattaacctcctggtgcaagtggcgcggcctgtgccctttataaggtgcgcgctgtgtccagcgagcatcggccaccgccatcccatccagcgagcatctgccgccgcgccgccgccaccctcccagagagcactggccaccgctccaccatcacttgcccagagtttgggccaccgcccgccgccaccagcccagagagcatcggcccctgtctgctgctcgcgcctggagatgtcagaggtccccgttgctcgcgtctggctggtactgctcctgctgactgtccaggtcggcgtgacagccggcgctccgtggcagtgcgcgccctgctccgccgagaagctcgcgctctgcccgccggtgtccgcctcgtgctcggaggtcacccggtccgccggctgcggctgttgcccgatgtgcgccctgcctctgggcgccgcgtgcggcgtggcgactgcacgctgcgcccggggactcagttgccgcgcgctgccgggggagcagcaacctctgcacgccctcacccgcggccaaggcgcctgcgtgcaggagtctgacgcctccgctccccatgctgcagaggcagggagccctgaaagcccagagagcacggagataactgaggaggagctcctggataatttccatctgatggccccttctgaagaggatcattccatcctttgggacgccatcagtacctatgatggctcgaaggctctccatgtcaccaacatcaaaaaatggaaggagccctgccgaatagaactctacagagtcgtagagagtttagccaaggcacaggagacatcaggagaagaaatttccaaattttacctgccaaactgcaacaagaatggattttatcacagcagacagtgtgagacatccatggatggagaggcgggactctgctggtgcgtctacccttggaatgggaagaggatccctgggtctccagagatcaggggagaccccaactgccagatatattttaatgtacaaaactgaaaccagatgaaataatgttctgtcacgtgaaatatttaagtatatagtatatttatactctagaacatgcacatttatatatatatgtatatgtatatatatatagtaactactttttatactccatacataacttgatatagaaagctgtttatttattcactgtaagtttattttttctacacagtaaaaacttgtactatgttaataacttgtcctatgtcaatttgtatatcatgaaacacttctcatcatattgtatgtaagtaattgcatttctgctcttccaaagctcctgcgtctgtttttaaagagcatggaaaaatactgcctagaaaatgcaaaatgaaataagagagagtagtttttcagctagtttgaaggaggacggttaacttgtatattccaccattcacatttgatgtacatgtgtagggaaagttaaaagtgttgattacataatcaaagctacctgtggtgatgttgccacctgttaaaatgtacactggatatgttgttaaacacgtgtctataatggaaacatttacaataaatattctgcatggaaatactgtta

SEQ ID NO: 143048 - DNA, 1601 bp, Homo sapiens
  Payload ID: 8262
  Gene Symbol: IGFBP1
  Gene Name: insulin-like growth factor binding protein 1
  ENST ID: ENST00000457280
  CDS Start-End: 294-1067
ggtgcactagcaaaacaaacttattttgaacactcagctcctagcgtgcggcgctgccaatcattaacctcctggtgcaagtggcgcggcctgtgccctttataaggtgcgcgctgtgtccagcgagcatcggccaccgccatcccatccagcgagcatctgccgccgcgccgccgccaccctcccagagagcactggccaccgctccaccatcacttgcccagagtttgggccaccgcccgccgccaccagcccagagagcatcggcccctgtctgctgctcgcgcctggagatgtcagaggtccccgttgctcgcgtctggctggtactgctcctgctgactgtccaggtcggcgtgacagccggcgctccgtggcagtgcgcgccctgctccgccgagaagctcgcgctctgcccgccggtgtccgcctcgtgctcggaggtcacccggtccgccggctgcggctgttgcccgatgtgcgccctgcctctgggcgccgcgtgcggcgtggcgactgcacgctgcgcccggggactcagttgccgcgcgctgccgggggagcagcaacctctgcacgccctcacccgcggccaaggcgcctgcgtgcaggagtctgacgcctccgctccccatgctgcagaggcagggagccctgaaagcccagagagcacggagataactgaggaggagctcctggataatttccatctgatggccccttctgaagaggatcattccatcctttgggacgccatcagtacctatgatggctcgaaggctctccatgtcaccaacatcaaaaaatggaaggagccctgccgaatagaactctacagagtcgtagagagtttagccaaggcacaggagacatcaggagaagaaatttccaaattttacctgccaaactgcaacaagaatggattttatcacagcagacagacatccatggatggagaggcgggactctgctggtgcgtctacccttggaatgggaagaggatccctgggtctccagagatcaggggagaccccaactgccagatatattttaatgtacaaaactgaaaccagatgaaataatgttctgtcacgtgaaatatttaagtatatagtatatttatactctagaacatgcacatttatatatatatgtatatgtatatatatatagtaactactttttatactccatacataacttgatatagaaagctgtttatttattcactgtaagtttattttttctacacagtaaaaacttgtactatgttaataacttgtcctatgtcaatttgtatatcatgaaacacttctcatcatattgtatgtaagtaattgcatttctgctcttccaaagctcctgcgtctgtttttaaagagcatggaaaaatactgcctagaaaatgcaaaatgaaataagagagagtagtttttcagctagtttgaaggaggacggttaacttgtatattccaccattcacatttgatgtacatgtgtagggaaagttaaaagtgttgattacataatcaaagctacctgtggtgatgttgccacctgttaaaatgtacactggatatgttgttaaacacgtgtctata

SEQ ID NO: 143049 - DNA, 1369 bp, Homo sapiens
  Payload ID: 8262
  Gene Symbol: IGFBP1
  Gene Name: insulin-like growth factor binding protein 1
  ENST ID: ENST00000468955
  CDS Start-End: 157-807
cgccatcccatccagcgagcatctgccgccgcgccgccgccaccctcccagagagcactggccaccgctccaccatcacttgcccagagtttgggccaccgcccgccgccaccagcccagagagcatcggcccctgtctgctgctcgcgcctggagatgtcagaggtccccgttgctcgcgtctggctggtactgctcctgctgactgtccaggtcggcgtgacagccggcgctccgtggcagtgcgcgccctgctccgccgagaagctcgcgctctgcccgccggtgtccgcctcgtgctcggaggtcacccggtccgccggctgcggctgttgcccgatgtgcgccctgcctctgggcgccgcgtgcggcgtggcgactgcacgctgcgcccggggactcagttgccgcgcgctgccgggggagcagcaacctctgcacgccctcacccgcggccaaggcgcctgcgtgcaggagtctgacgcctccgctccccatgctgcagaggcagggagccctgaaagcccagagagcacggagataactgaggaggagctcctggataatttccatctgatggccccttctgaagaggatcattccatcctttgggacgccatcagtacctatgatggctcgaaggctctccatgtcaccaacatcaaaaaatggaagtgtgagacatccatggatggagaggcgggactctgctggtgcgtctacccttggaatgggaagaggatccctgggtctccagagatcaggggagaccccaactgccagatatattttaatgtacaaaactgaaaccagatgaaataatgttctgtcacgtgaaatatttaagtatatagtatatttatactctagaacatgcacatttatatatatatgtatatgtatatatatatagtaactactttttatactccatacataacttgatatagaaagctgtttatttattcactgtaagtttattttttctacacagtaaaaacttgtactatgttaataacttgtcctatgtcaatttgtatatcatgaaacacttctcatcatattgtatgtaagtaattgcatttctgctcttccaaagctcctgcgtctgtttttaaagagcatggaaaaatactgcctagaaaatgcaaaatgaaataagagagagtagtttttcagctagtttgaaggaggacggttaacttgtatattccaccattcacatttgatgtacatgtgtagggaaagttaaaagtgttgattacataatcaaagctacctgtggtgatgttgccacctgttaaaatgtacactggatatgttgttaaacacgtgtctataatggaaacatttacaataaatattctgc

SEQ ID NO: 143050 - DNA, 1439 bp, Homo sapiens
  Payload ID: 8263
  Gene Symbol: IGFBP2
  Gene Name: insulin-like growth factor binding protein 2, 36kDa
  Uniprot ID: P18065
  ENST ID: ENST00000233809
  CDS Start-End: 130-1107
ggacccggctgcggcggcgagggaggaggaagaagcggaggaggcggctcccgcgctcgcagggccgtgccacctgcccgcccgcccgctcgctcgctcgcccgccgcgccgcgctgccgaccgccagcatgctgccgagagtgggctgccccgcgctgccgctgccgccgccgccgctgctgccgctgctgctgctgctactgggcgcgagtggcggcggcggcggggcgcgcgcggaggtgctgttccgctgcccgccctgcacacccgagcgcctggccgcctgcgggcccccgccggttgcgccgcccgccgcggtggccgcagtggccggaggcgcccgcatgccatgcgcggagctcgtccgggagccgggctgcggctgctgctcggtgtgcgcccggctggagggcgaggcgtgcggcgtctacaccccgcgctgcggccaggggctgcgctgctatccccacccgggctccgagctgcccctgcaggcgctggtcatgggcgagggcacttgtgagaagcgccgggacgccgagtatggcgccagcccggagcaggttgcagacaatggcgatgaccactcagaaggaggcctggtggagaaccacgtggacagcaccatgaacatgttgggcgggggaggcagtgctggccggaagcccctcaagtcgggtatgaaggagctggccgtgttccgggagaaggtcactgagcagcaccggcagatgggcaagggtggcaagcatcaccttggcctggaggagcccaagaagctgcgaccaccccctgccaggactccctgccaacaggaactggaccaggtcctggagcggatctccaccatgcgccttccggatgagcggggccctctggagcacctctactccctgcacatccccaactgtgacaagcatggcctgtacaacctcaaacagtgcaagatgtctctgaacgggcagcgtggggagtgctggtgtgtgaaccccaacaccgggaagctgatccagggagcccccaccatccggggggaccccgagtgtcatctcttctacaatgagcagcaggaggctcgcggggtgcacacccagcggatgcagtagaccgcagccagccggtgcctggcgcccctgccccccgcccctctccaaacaccggcagaaaacggagagtgcttgggtggtgggtgctggaggattttccagttctgacacacgtatttatatttggaaagagaccagcaccgagctcggcacctccccggcctctctcttcccagctgcagatgccacacctgctccttcttgctttccccgggggaggaagggggttgtggtcggggagctggggtacaggtttggggagggggaagagaaatttttatttttgaacccctgtgtcccttttgcataagattaaaggaaggaaaagtaaa

SEQ ID NO: 143051 - DNA, 846 bp, Homo sapiens
  Payload ID: 8263
  Gene Symbol: IGFBP2
  Gene Name: insulin-like growth factor binding protein 2, 36kDa
  ENST ID: ENST00000456764
  CDS Start-End: 120-665
gactgtggcaggctggagctgttttcaaggcctccttcacctaggctgtgcatacaaaaggttgaagaaagtataaggagacttaatggacgcttgttggacagacatcacgaagcttcatgccctgcaacaatggcgatgaccactcagaaggaggcctggtggagaaccacgtggacagcaccatgaacatgttgggcgggggaggcagtgctggccggaagcccctcaagtcgggtatgaaggagctggccgtgttccgggagaaggtcactgagcagcaccggcagatgggcaagggtggcaagcatcaccttggcctggaggagcccaagaagctgcgaccaccccctgccaggactccctgccaacaggaactggaccaggtcctggagcggatctccaccatgcgccttccggatgagcggggccctctggagcacctctactccctgcacatccccaactgtgacaagcatggcctgtacaacctcaaacagtgcaagatgtctctgaacgggcagcgtggggagtgctggtgtgtgaaccccaacaccgggaagctgatccagggagcccccaccatccggggggaccccgagtgtcatctcttctacaatgagcagcaggaggctcgcggggtgcacacccagcggatgcagtagaccgcagccagccggtgcctggcgcccctgccccccgcccctctccaaacaccggcagaaaacggagagtgcttgggtggtgggtgctggaggattttccagttctgacacacgtatttatatttggaaagagaccagcaccgagctcggcacctccccggcctctctcttcccagctgca

SEQ ID NO: 143052 - DNA, 751 bp, Homo sapiens
  Payload ID: 8263
  Gene Symbol: IGFBP2
  Gene Name: insulin-like growth factor binding protein 2, 36kDa
  ENST ID: ENST00000436812
  CDS Start-End: 1-297
aagcatcaccttggcctggaggagcccaagaagctgcgaccaccccctgccaggcagcttctcgctgagcttgcgtctggcgcgtgcttcgtgggcctgctgtcctcactccgggcgtcccctgctgtctgtgcgtgcagactccctgccaacaggaactggaccaggtcctggagcggatctccaccatgcgccttccggatgagcggggccctctggagcacctctactccctgcacatccccaactgtgacaagcatggcctgtacaacctcaaacagtgcaagatgtctctgaacgggcagcgtggggagtgctggtgtgtgaaccccaacaccgggaagctgatccagggagcccccaccatccggggggaccccgagtgtcatctcttctacaatgagcagcaggaggctcgcggggtgcacacccagcggatgcagtagaccgcagccagccggtgcctggcgcccctgccccccgcccctctccaaacaccggcagaaaacggagagtgcttgggtggtgggtgctggaggattttccagttctgacacacgtatttatatttggaaagagaccagcaccgagctcggcacctccccggcctctctcttcccagctgcagatgccacacctgctccttcttgctttccccgggggaggaagggggttgtggtcggggagctggggtacaggtttggggagggggaagagaaatttttatttttgaacccctgtgtcccttttg

SEQ ID NO: 143053 - DNA, 477 bp, Homo sapiens
  Payload ID: 8263
  Gene Symbol: IGFBP2
  Gene Name: insulin-like growth factor binding protein 2, 36kDa
  ENST ID: ENST00000434997
  CDS Start-End: 244-477
caggtttggaaaactgcaatagtcactaagaccattcggggctgtttgggtctagcttggtctagacgggtctgaaactccgcaggacccacccaacaagaagtcattgttccaagccacgtgtcagtggtgggtgataccccaggatggaaggagttggtatgagccgactgaaatctacttgaagacaatggcgatgaccactcagaaggaggcctggtggagaaccacgtggacagcaccatgaacatgttgggcgggggaggcagtgctggccggaagcccctcaagtcgggtatgaaggagctggccgtgttccgggagaaggtcactgagcagcaccggcagatgggcaagggtggcaagcatcaccttggcctggaggagcccaagaagctgcgaccaccccctgccaggactccctgccaacaggaactggaccaggtcctggagcggatctccaccatgcgccttccg

SEQ ID NO: 143054 - DNA, 2262 bp, Homo sapiens
  Payload ID: 8264
  Gene Symbol: IGFBP3
  Gene Name: insulin-like growth factor binding protein 3
  Uniprot ID: P17936
  ENST ID: ENST00000275521
  CDS Start-End: 135-1010
ccagatgcgagcactgcggctgggcgctgaggatcagccgcttcctgcctggattccacagcttcgcgccgtgtactgtcgccccatccctgcgcgcccagcctgccaagcagcgtgccccggttgcaggcgtcatgcagcgggcgcgacccacgctctgggccgctgcgctgactctgctggtgctgctccgcgggccgccggtggcgcgggctggcgcgagctcggcgggcttgggtcccgtggtgcgctgcgagccgtgcgacgcgcgtgcactggcccagtgcgcgcctccgcccgccgtgtgcgcggagctggtgcgcgagccgggctgcggctgctgcctgacgtgcgcactgagcgagggccagccgtgcggcatctacaccgagcgctgtggctccggccttcgctgccagccgtcgcccgacgaggcgcgaccgctgcaggcgctgctggacggccgcgggctctgcgtcaacgctagtgccgtcagccgcctgcgcgcctacctgctgccagcgccgccagctccaggaaatgctagtgagtcggaggaagaccgcagcgccggcagtgtggagagcccgtccgtctccagcacgcaccgggtgtctgatcccaagttccaccccctccattcaaagataatcatcatcaagaaagggcatgctaaagacagccagcgctacaaagttgactacgagtctcagagcacagatacccagaacttctcctccgagtccaagcgggagacagaatatggtccctgccgtagagaaatggaagacacactgaatcacctgaagttcctcaatgtgctgagtcccaggggtgtacacattcccaactgtgacaagaagggattttataagaaaaagcagtgtcgcccttccaaaggcaggaagcggggcttctgctggtgtgtggataagtatgggcagcctctcccaggctacaccaccaaggggaaggaggacgtgcactgctacagcatgcagagcaagtagacgcctgccgcaaggttaatgtggagctcaaatatgccttattttgcacaaaagactgccaaggacatgaccagcagctggctacagcctcgatttatatttctgtttgtggtgaactgattttttttaaaccaaagtttagaaagaggtttttgaaatgcctatggtttctttgaatggtaaacttgagcatcttttcactttccagtagtcagcaaagagcagtttgaattttcttgtcgcttcctatcaaaatattcagagactcgagcacagcacccagacttcatgcgcccgtggaatgctcaccacatgttggtcgaagcggccgaccactgactttgtgacttaggcggctgtgttgcctatgtagagaacacgcttcacccccactccccgtacagtgcgcacaggctttatcgagaataggaaaacctttaaaccccggtcatccggacatcccaacgcatgctcctggagctcacagccttctgtggtgtcatttctgaaacaagggcgtggatccctcaaccaagaagaatgtttatgtcttcaagtgacctgtactgcttggggactattggagaaaataaggtggagtcctacttgtttaaaaaatatgtatctaagaatgttctagggcactctgggaacctataaaggcaggtatttcgggccctcctcttcaggaatcttcctgaagacatggcccagtcgaaggcccaggatggcttttgctgcggccccgtggggtaggagggacagagagacagggagagtcagcctccacattcagaggcatcacaagtaatggcacaattcttcggatgactgcagaaaatagtgttttgtagttcaacaactcaagacgaagcttatttctgaggataagctctttaaaggcaaagctttattttcatctctcatcttttgtcctccttagcacaatgtaaaaaagaatagtaatatcagaacaggaaggaggaatggcttgctggggagcccatccaggacactgggagcacatagagattcacccatgtttgttgaacttagagtcattctcatgcttttctttataattcacacatatatgcagagaagatatgttcttgttaacattgtatacaacatagccccaaatatagtaagatctatactagataatcctagatgaaatgttagagatgctatatgatacaactgtggccatgactgaggaaaggagctcacgcccagagactgggctgct

SEQ ID NO: 143055 - DNA, 1050 bp, Homo sapiens
  Payload ID: 8264
  Gene Symbol: IGFBP3
  Gene Name: insulin-like growth factor binding protein 3
  Uniprot ID: P17936
  ENST ID: ENST00000381083
  CDS Start-End: 112-1005
gcgctgaggatcagccgcttcctgcctggattccacagcttcgcgccgtgtactgtcgccccatccctgcgcgcccagcctgccaagcagcgtgccccggttgcaggcgtcatgcagcgggcgcgacccacgctctgggccgctgcgctgactctgctggtgctgctccgcgggccgccggtggcgcgggctggcgcgagctcggcgggcttgggtcccgtggtgcgctgcgagccgtgcgacgcgcgtgcactggcccagtgcgcgcctccgcccgccgtgtgcgcggagctggtgcgcgagccgggctgcggctgctgcctgacgtgcgcactgagcgagggccagccgtgcggcatctacaccgagcgctgtggctccggccttcgctgccagccgtcgcccgacgaggcgcgaccgctgcaggcgctgctggacggccgcgggctctgcgtcaacgctagtgccgtcagccgcctgcgcgcctacctgctgccagcgccgccagctccaggtgagccgcccgcgccaggaaatgctagtgagtcggaggaagaccgcagcgccggcagtgtggagagcccgtccgtctccagcacgcaccgggtgtctgatcccaagttccaccccctccattcaaagataatcatcatcaagaaagggcatgctaaagacagccagcgctacaaagttgactacgagtctcagagcacagatacccagaacttctcctccgagtccaagcgggagacagaatatggtccctgccgtagagaaatggaagacacactgaatcacctgaagttcctcaatgtgctgagtcccaggggtgtacacattcccaactgtgacaagaagggattttataagaaaaagcagtgtcgcccttccaaaggcaggaagcggggcttctgctggtgtgtggataagtatgggcagcctctcccaggctacaccaccaaggggaaggaggacgtgcactgctacagcatgcagagcaagtagacgcctgccgcaaggttaatgtggagctcaaatatgccttatttt

SEQ ID NO: 143056 - DNA, 2322 bp, Homo sapiens
  Payload ID: 8264
  Gene Symbol: IGFBP3
  Gene Name: insulin-like growth factor binding protein 3
  ENST ID: ENST00000381086
  CDS Start-End: 133-717
agatgcgagcactgcggctgggcgctgaggatcagccgcttcctgcctggattccacagcttcgcgccgtgtactgtcgccccatccctgcgcgcccagcctgccaagcagcgtgccccggttgcaggcgtcatgcagcgggcgcgaccgctgcaggcgctgctggacggccgcgggctctgcgtcaacgctagtgccgtcagccgcctgcgcgcctacctgctgccagcgccgccagctccaggaaatgctagtgagtcggaggaagaccgcagcgccggcagtgtggagagcccgtccgtctccagcacgcaccgggtgtctgatcccaagttccaccccctccattcaaagataatcatcatcaagaaagggcatgctaaagacagccagcgctacaaagttgactacgagtctcagagcacagatacccagaacttctcctccgagtccaagcgggagacagaatatggtccctgccgtagagaaatggaagacacactgaatcacctgaagttcctcaatgtgctgagtcccaggggtgtacacattcccaactgtgacaagaagggattttataagaaaaagcagtgtcgcccttccaaaggcaggaagcggggcttctgctggtgtgtggataagtatgggcagcctctcccaggctacaccaccaaggggaaggaggacgtgcactgctacagcatgcagagcaagtagacgcctgccgcaaggttaatgtggagctcaaatatgccttattttgcacaaaagactgccaaggacatgaccagcagctggctacagcctcgatttatatttctgtttgtggtgaactgattttttttaaaccaaagtttagaaagaggtttttgaaatgcctatggtttctttgaatggtaaacttgagcatcttttcactttccagtagtcagcaaagagcagtttgaattttcttgtcgcttcctatcaaaatattcagagactcgagcacagcacccagacttcatgcgcccgtggaatgctcaccacatgttggtcgaagcggccgaccactgactttgtgacttaggcggctgtgttgcctatgtagagaacacgcttcacccccactccccgtacagtgcgcacaggctttatcgagaataggaaaacctttaaaccccggtcatccggacatcccaacgcatgctcctggagctcacagccttctgtggtgtcatttctgaaacaagggcgtggatccctcaaccaagaagaatgtttatgtcttcaagtgacctgtactgcttggggactattggagaaaataaggtggagtcctacttgtttaaaaaatatgtatctaagaatgttctagggcactctgggaacctataaaggcaggtatttcgggccctcctcttcaggaatcttcctgaagacatggcccagtcgaaggcccaggatggcttttgctgcggccccgtggggtaggagggacagagagacagggagagtcagcctccacattcagaggcatcacaagtaatggcacaattcttcggatgactgcagaaaatagtgttttgtagttcaacaactcaagacgaagcttatttctgaggataagctctttaaaggcaaagctttattttcatctctcatcttttgtcctccttagcacaatgtaaaaaagaatagtaatatcagaacaggaaggaggaatggcttgctggggagcccatccaggacactgggagcacatagagattcacccatgtttgttgaacttagagtcattctcatgcttttctttataattcacacatatatgcagagaagatatgttcttgttaacattgtatacaacatagccccaaatatagtaagatctatactagataatcctagatgaaatgttagagatgctatatgatacaactgtggccatgactgaggaaaggagctcacgcccagagactgggctgctctcccggaggccaaacccaagaaggtctggcaaagtcaggctcagggagactctgccctgctgcagacctcggtgtggacacacgctgcatagagctctccttgaaaacagaggggtctcaagacattctgcctacctattagcttttctttatttttttaactttttggggggaaaagtatttttgagaagtttgtcttgcaatgtatttataaatagtaaataaagtttttaccattaaaaaaatatctttccctttgttattgaccatctctgggctttgtatcactaattattttattttattatataataattattttattataataaaatcctgaaaggggaaaata

SEQ ID NO: 143057 - DNA, 571 bp, Homo sapiens
  Payload ID: 8264
  Gene Symbol: IGFBP3
  Gene Name: insulin-like growth factor binding protein 3
  ENST ID: ENST00000448817
  CDS Start-End: 176-571
gggcgcatcttcagatgcgtatttgtgggcccctggggatataaacagcccagcgggtgtaaattaaaccccgcagtgccttggctccctgagacccaaatgtaagtcagaaatgtcccaagacttcgcctgccaacggaattaaattttagaaagctccacgaggtacacacgaatgcggagcgctgtatgccagtttccccgacaccggctcgccgcagggagacctcaccccgagagcggaaggggaaatgctagtgagtcggaggaagaccgcagcgccggcagtgtggagagcccgtccgtctccagcacgcaccgggtgtctgatcccaagttccaccccctccattcaaagataatcatcatcaagaaagggcatgctaaagacagccagcgctacaaagttgactacgagtctcagagcacagatacccagaacttctcctccgagtccaagcgggagacagaatatggtccctgccgtagagaaatggaagacacactgaatcacctgaagttcctcaatgtgctgagtcccaggggtgtacacattcccaactgtgacaag

SEQ ID NO: 143058 - DNA, 894 bp, Homo sapiens
  Payload ID: 8264
  Gene Symbol: IGFBP3
  Gene Name: insulin-like growth factor binding protein 3
  ENST ID: ENST00000428530
  CDS Start-End: 1-431
tggagagcccgtccgtctccagcacgcaccgggtgtctgatcccaagttccaccccctccattcaaagataatcatcatcaagaaagggcatgctaaagacagccagcgctacaaagttgactacgagtctcagagcacagatacccagaacttctcctccgagtccaagcgggagacagaatatggtccctgccgtagagaaatggaagacacactgaatcacctgaagttcctcaatgtgctgagtcccaggggtgtacacattcccaactgtgacaagaagggattttataagaaaaagcagtgtcgcccttccaaaggcaggaagcggggcttctgctggtgtgtggataagtatgggcagcctctcccaggctacaccaccaaggggaaggaggacgtgcactgctacagcatgcagagcaagtagacgcctgccgcaaggatacctcacagcacctaagctatcattcatccacacacaaagtgaagattttcaaagttaggctttacccgtgaggtctggaggtccatttatcttcacagagaaaccgttttaatccgcaagaacctgctaaagatacatgtttctaaattaaagatgtgaatgtgagacagctgaaatagctcagttgggagagcatcagtttgaagatgcagctttttttttctgtaaaatatataatgaatattctgttagtctgtggctaatataattttaataaagttaatttaaatctgatagaaaaatgaaattttaaacgataattttagagaatgctattatatccagtcttcttttttcttttaataaatgagggaactattgggggaaaggaataaatacattttctttcattttattaagacaaatttagtaagcagaagaaatt

SEQ ID NO: 143059 - DNA, 810 bp, Homo sapiens
  Payload ID: 8264
  Gene Symbol: IGFBP3
  Gene Name: insulin-like growth factor binding protein 3
  ENST ID: ENST00000417621
  CDS Start-End: 1-460
gtcggaggaagaccgcagcgccggcagtgtggagagcccgtccgtctccagcacgcaccgggtgtctgatcccaagttccaccccctccattcaaagataatcatcatcaagaaagggcatgctaaagacagccagcgctacaaagttgactacgagtctcagagcacagatacccagaacttctcctccgagtccaagcgggagacagaatatggtccctgccgtagagaaatggaagacacactgaatcacctgaagttcctcaatgtgctgagtcccaggggtgtacacattcccaactgtgacaagaagggattttataagaaaaagcagtgtcgcccttccaaaggcaggaagcggggcttctgctggtgtgtggataagtatgggcagcctctcccaggctacaccaccaaggggaaggaggacgtgcactgctacagcatgcagagcaagtagacgcctgccgcaagggtgagtactcaggaggggcagcctggggctccagggcctcactgtccttggaccagcctcaggggctgggcgtggccactggcccttccccaggcttacagacccaggagctgcagctcagggccagaaagagcaaagcaaataggacagagccctcagaagggtgcagggagagggagaccccatcaacccaaccaaacaagtgtggggaaggaggccggccagtgcacctcagggacactctgctttatctcagatacctcacagcacctaagctatcattcatccacacacaaagtgaagattttcaaagttaggctttacccgtgaggtct

SEQ ID NO: 143060 - DNA, 2412 bp, Homo sapiens
  Payload ID: 8264
  Gene Symbol: IGFBP3
  Gene Name: insulin-like growth factor binding protein 3
  ENST ID: ENST00000613132
  CDS Start-End: 1-813
atgcagcgggcgcgacccacgctctgggccgctgcgctgactctgctggtgcgctgcgagccgtgcgacgcgcgtgcactggcccagtgcgcgcctccgcccgccgtgtgcgcggagctggtgcgcgagccgggctgcggctgctgcctgacgtgcgcactgagcgagggccagccgtgcggcatctacaccgagcgctgtggctccggccttcgctgccagccgtcgcccgacgaggcgcgaccgctgcaggcgctgctggacggccgcgggctctgcgtcaacgctagtgccgtcagccgcctgcgcgcctacctgctgccagcgccgccagctccaggaaatgctagtgagtcggaggaagaccgcagcgccggcagtgtggagagcccgtccgtctccagcacgcaccgggtgtctgatcccaagttccaccccctccattcaaagataatcatcatcaagaaagggcatgctaaagacagccagcgctacaaagttgactacgagtctcagagcacagatacccagaacttctcctccgagtccaagcgggagacagaatatggtccctgccgtagagaaatggaagacacactgaatcacctgaagttcctcaatgtgctgagtcccaggggtgtacacattcccaactgtgacaagaagggattttataagaaaaagcagtgtcgcccttccaaaggcaggaagcggggcttctgctggtgtgtggataagtatgggcagcctctcccaggctacaccaccaaggggaaggaggacgtgcactgctacagcatgcagagcaagtagacgcctgccgcaaggttaatgtggagctcaaatatgccttattttgcacaaaagactgccaaggacatgaccagcagctggctacagcctcgatttatatttctgtttgtggtgaactgattttttttaaaccaaagtttagaaagaggtttttgaaatgcctatggtttctttgaatggtaaacttgagcatcttttcactttccagtagtcagcaaagagcagtttgaattttcttgtcgcttcctatcaaaatattcagagactcgagcacagcacccagacttcatgcgcccgtggaatgctcaccacatgttggtcgaagcggccgaccactgactttgtgacttaggcggctgtgttgcctatgtagagaacacgcttcacccccactccccgtacagtgcgcacaggctttatcgagaataggaaaacctttaaaccccggtcatccggacatcccaacgcatgctcctggagctcacagccttctgtggtgtcatttctgaaacaagggcgtggatccctcaaccaagaagaatgtttatgtcttcaagtgacctgtactgcttggggactattggagaaaataaggtggagtcctacttgtttaaaaaatatgtatctaagaatgttctagggcactctgggaacctataaaggcaggtatttcgggccctcctcttcaggaatcttcctgaagacatggcccagtcgaaggcccaggatggcttttgctgcggccccgtggggtaggagggacagagagacagggagagtcagcctccacattcagaggcatcacaagtaatggcacaattcttcggatgactgcagaaaatagtgttttgtagttcaacaactcaagacgaagcttatttctgaggataagctctttaaaggcaaagctttattttcatctctcatcttttgtcctccttagcacaatgtaaaaaagaatagtaatatcagaacaggaaggaggaatggcttgctggggagcccatccaggacactgggagcacatagagattcacccatgtttgttgaacttagagtcattctcatgcttttctttataattcacacatatatgcagagaagatatgttcttgttaacattgtatacaacatagccccaaatatagtaagatctatactagataatcctagatgaaatgttagagatgctatatgatacaactgtggccatgactgaggaaaggagctcacgcccagagactgggctgctctcccggaggccaaacccaagaaggtctggcaaagtcaggctcagggagactctgccctgctgcagacctcggtgtggacacacgctgcatagagctctccttgaaaacagaggggtctcaagacattctgcctacctattagcttttctttatttttttaactttttggggggaaaagtatttttgagaagtttgtcttgcaatgtatttataaatagtaaataaagtttttaccattaaaaaaatatctttccctttgttattgaccatctctgggctttgtatcactaattattttattttattatataataattattttattataataaaatcctgaaagggg

SEQ ID NO: 143061 - DNA, 792 bp, Homo sapiens
  Payload ID: 8264
  Gene Symbol: IGFBP3
  Gene Name: insulin-like growth factor binding protein 3
  ENST ID: ENST00000615754
  CDS Start-End: 1-792
atgcagcgggcgcgacccacgctctgggccgcttgcgagccgtgcgacgcgcgtgcactggcccagtgcgcgcctccgcccgccgtgtgcgcggagctggtgcgcgagccgggctgcggctgctgcctgacgtgcgcactgagcgagggccagccgtgcggcatctacaccgagcgctgtggctccggccttcgctgccagccgtcgcccgacgaggcgcgaccgctgcaggcgctgctggacggccgcgggctctgcgtcaacgctagtgccgtcagccgcctgcgcgcctacctgctgccagcgccgccagctccaggaaatgctagtgagtcggaggaagaccgcagcgccggcagtgtggagagcccgtccgtctccagcacgcaccgggtgtctgatcccaagttccaccccctccattcaaagataatcatcatcaagaaagggcatgctaaagacagccagcgctacaaagttgactacgagtctcagagcacagatacccagaacttctcctccgagtccaagcgggagacagaatatggtccctgccgtagagaaatggaagacacactgaatcacctgaagttcctcaatgtgctgagtcccaggggtgtacacattcccaactgtgacaagaagggattttataagaaaaagcagtgtcgcccttccaaaggcaggaagcggggcttctgctggtgtgtggataagtatgggcagcctctcccaggctacaccaccaaggggaaggaggacgtgcactgctacagcatgcagagcaagtag

SEQ ID NO: 143062 - DNA, 2200 bp, Homo sapiens
  Payload ID: 8265
  Gene Symbol: IGFBP4
  Gene Name: insulin-like growth factor binding protein 4
  Uniprot ID: P22692
  ENST ID: ENST00000269593
  CDS Start-End: 276-1052
cccctgcccctcgccgcccgccgcctgcctgggccgggccgaggatgcggcgcagcgcctcggcggccaggcttgctcccctccggcacgcctgctaacttcccccgctacgtccccgttcgcccgccgggccgccccgtctccccgcgccctccgggtcgggtcctccaggagcgccaggcgctgccgccgtgtgccctccgccgctcgcccgcgcgcccgcgctccccgcctgcgcccagcgccccgcgcccgcgcccagtcctcgggcggtcatgctgcccctctgcctcgtggccgccctgctgctggccgccgggcccgggccgagcctgggcgacgaagccatccactgcccgccctgctccgaggagaagctggcgcgctgccgcccccccgtgggctgcgaggagctggtgcgagagccgggctgcggctgttgcgccacttgcgccctgggcttggggatgccctgcggggtgtacaccccccgttgcggctcgggcctgcgctgctacccgccccgaggggtggagaagcccctgcacacactgatgcacgggcaaggcgtgtgcatggagctggcggagatcgaggccatccaggaaagcctgcagccctctgacaaggacgagggtgaccaccccaacaacagcttcagcccctgtagcgcccatgaccgcaggtgcctgcagaagcacttcgccaaaattcgagaccggagcaccagtgggggcaagatgaaggtcaatggggcgccccgggaggatgcccggcctgtgccccagggctcctgccagagcgagctgcaccgggcgctggagcggctggccgcttcacagagccgcacccacgaggacctctacatcatccccatccccaactgcgaccgcaacggcaacttccaccccaagcagtgtcacccagctctggatgggcagcgtggcaagtgctggtgtgtggaccggaagacgggggtgaagcttccggggggcctggagccaaagggggagctggactgccaccagctggctgacagctttcgagagtgaggcctgccagcaggccagggactcagcgtcccctgctactcctgtgctctggaggctgcagagctgacccagagtggagtctgagtctgagtcctgtctctgcctgcggcccagaagtttccctcaaatgcgcgtgtgcacgtgtgcgtgtgcgtgcgtgtgtgtgtgtttgtgagcatgggtgtgcccttggggtaagccagagcctggggtgttctctttggtgttacacagcccaagaggactgagactggcacttagcccaagaggtctgagccctggtgtgtttccagatcgatcctggattcactcactcactcattccttcactcatccagccacctaaaaacatttactgaccatgtactacgtgccagctctagttttcagccttgggaggttttattctgacttcctctgattttggcatgtggagacactcctataaggagagttcaagcctgtgggagtagaaaaatctcattcccagagtcagaggagaagagacatgtaccttgaccatcgtccttcctctcaagctagccagagggtgggagcctaaggaagcgtggggtagcagatggagtaatggtcacgaggtccagacccactcccaaagctcagacttgccaggctccctttctcttcttccccaggtccttcctttaggtctggttgttgcaccatctgcttggttggctggcagctgagagccctgctgtgggagagcgaagggggtcaaaggaagacttgaagcacagagggctagggaggtggggtacatttctctgagcagtcagggtgggaagaaagaatgcaagagtggactgaatgtgcctaatggagaagacccacgtgctaggggatgaggggcttcctgggtcctgttccctaccccatttgtggtcacagccatgaagtcaccgggatgaacctatccttccagtggctcgctccctgtagctctgcctccctctccatatctccttcccctacacctccctccccacacctccctactcccctgggcatcttctggcttgactggatggaaggagacttaggaacctaccagttggccatgatgtcttttcttctttttcttttttttaacaaaacagaacaaaaccaaaaaatgtccagatgat

SEQ ID NO: 143063 - DNA, 6215 bp, Homo sapiens
  Payload ID: 8266
  Gene Symbol: IGFBP5
  Gene Name: insulin-like growth factor binding protein 5
  Uniprot ID: P24593
  ENST ID: ENST00000233813
  CDS Start-End: 751-1569
ggggaaaagagctaggaaagagctgcaaagcagtgtgggctttttcccttttttgctccttttcattacccctcctccgttttcacccttctccggacttcgcgtagaacctgcgaatttcgaagaggaggtggcaaagtgggagaaaagaggtgttagggtttggggtttttttgtttttgtttttgttttttaatttcttgatttcaacattttctcccaccctctcggctgcagccaacgcctcttacctgttctgcggcgccgcgcaccgctggcagctgagggttagaaagcggggtgtattttagattttaagcaaaaattttaaagataaatccatttttctctcccacccccaacgccatctccactgcatccgatctcattatttcggtggttgcttgggggtgaacaattttgtggctttttttcccctataattctgacccgctcaggcttgagggtttctccggcctccgctcactgcgtgcacctggcgctgccctgcttcccccaacctgttgcaaggctttaattcttgcaactgggacctgctcgcaggcaccccagccctccacctctctctacatttttgcaagtgtctgggggagggcacctgctctacctgccagaaattttaaaacaaaaacaaaaacaaaaaaatctccgggggccctcttggcccctttatccctgcactctcgctctcctgccccaccccgaggtaaagggggcgactaagagaagatggtgttgctcaccgcggtcctcctgctgctggccgcctatgcggggccggcccagagcctgggctccttcgtgcactgcgagccctgcgacgagaaagccctctccatgtgcccccccagccccctgggctgcgagctggtcaaggagccgggctgcggctgctgcatgacctgcgccctggccgaggggcagtcgtgcggcgtctacaccgagcgctgcgcccaggggctgcgctgcctcccccggcaggacgaggagaagccgctgcacgccctgctgcacggccgcggggtttgcctcaacgaaaagagctaccgcgagcaagtcaagatcgagagagactcccgtgagcacgaggagcccaccacctctgagatggccgaggagacctactcccccaagatcttccggcccaaacacacccgcatctccgagctgaaggctgaagcagtgaagaaggaccgcagaaagaagctgacccagtccaagtttgtcgggggagccgagaacactgcccacccccggatcatctctgcacctgagatgagacaggagtctgagcagggcccctgccgcagacacatggaggcttccctgcaggagctcaaagccagcccacgcatggtgccccgtgctgtgtacctgcccaattgtgaccgcaaaggattctacaagagaaagcagtgcaaaccttcccgtggccgcaaacgtggcatctgctggtgcgtggacaagtacgggatgaagctgccaggcatggagtacgttgacggggactttcagtgccacaccttcgacagcagcaacgttgagtgatgcgtccccccccaacctttccctcaccccctcccacccccagccccgactccagccagcgcctccctccaccccaggacgccactcatttcatctcatttaagggaaaaatatatatctatctatttgaggaaactgaggacctcggaatctctagcaagggctcaacttcgaaaatggcaacaacagagatgcaaaaagctaaaaagacaccccccccctttaaatggttttctttttgaggcaagttggatgaacagagaagggaagagaggaagaacgagaggaagagaagggaaggaagtgtttgtgtagaagagagagaaagacgaatagagttaggaaaaggaagacaagcaggtgggcaggaaggacatgcaccgagaccaggcaggggcccaactttcacgtccagccctggcctggggtcgggagaggtgggcgctagaagatgcagcccaggatgtggcaatcaatgacactattggggtttcccaggatggattggtcagggggagaaaggaaaaggcaaaacactccaggacctctcccggatctgtctcctcctctagccagcagtatggacagctggacccctgaacttcctctcctcttacctgggcagagtgttgtctctccccaaatttataaaaactaaaatgcattccattcctctgaaagcaaaacaaattcataattgagtgatattaaatagagaggttttcggaagcagatctgtgaatatgaaatacatgtgcatatttcattccccaggcagacattttttagaaatcaatacatgccccaatattggaaagacttgttcttccacggtgactacagtacatgctgaagcgtgccgtttcagccctcatttaattcaatttgtaagtagcgcagcagcctctgtgggggaggataggctgaaaaaaaaaagtgggctcgtatttatctacaggactccatatagtcatatataggcatataaatctattctttttctttgtttttttctttcttcctttctttcaaaggtttgcattaacttttcaaagtagttcctataggggcattgaggagcttcctcattctgggaaaactgagaaaacccatattctcctaatacaacccgtaatagcatttttgcctgcctcgaggcagagtttcccgtgagcaataaactcagcttttttgtggggcacagtactggatttgacagtgattccccacgtgtgttcatctgcacccaccgagccaggcagaggccagccctccgtggtgcacacagcacgcgcctcagtccatcccattttagtctttaaaccctcaggaagtcacagtctccggacaccacaccacatgagcccaacaggtccacgatggatccaccagtcccaccccagccttttcctttcatctgaacagaatgtgcatttttggaagcctccctcactctccatgctggcagagcaggagggagactgaagtaagagatggcagagggagatggtggcaaaaaggtttagatgcaggagaacagtaagatggatggttccggccagagtcgatgtggggaggaacagagggctgaagggagagggggctgactgttccattctagctttggcacaaagcagcagaaagggggaaaagccaatagaaatttccttagcttccccaccatatgtattttctaggatttgagaggaaagagaggaaaatgggggaatgggttgcaaaatagaaatgagcttaatccaggccgcagagccagggaaggtgagtaactttaggagggtgctagactttagaagccagataggaagaatcagtctaaactggccatgctttggaagggacaagactatgtgctccgctgcccaccttcagcctgcaatgagggactgaggcccacgagtctttccagctcttcctccattctggccagtccctgcatcctccctggggtggaggatggaaggaaagctgggacaagcagggaacgcatgattcagggatgctgtcactcggcagccagattccgaaactcccattctccaatgacttcctcaaccaatgggtggccttgtgactgttctttaaggctgaagatatccaggaaagggggcttggacactggccaaggagaccccttcgtgctgtggacacagctctcttcactctttgctcatggcatgacacagcggagaccgcctccaacaacgaatttggggctacgaagaggaatagcgaaaaagcaaatctgtttcaactgatgggaaccctatagctatagaacttgggggctatctcctatgcccctggacaggacagttggctggggacaggagaagtgctcaatcttcatgagacaaaggggcccgatagggccagcagccacaaggccttgacctgccgagtcagcatgccccatctctctgcacagctgtcccctaaacccaactcacgtttctgtatgtcttaggccagtatcccaaacctcttccacgtcactgttctttccacccattctccctttgcatcttgagcagttatccaactaggatctgccaagtggatactggggtgccactcccctgagaaaagactgagccaggaactacaagctccccccacattcctcccagcctggacctaattcttgagaggggctctctcttcacggactgtgtctggactttgagcaggcttctgccccttgcgttggctctttgctgccagccatcaggtgggggattagagcctggtgtaagtgcgccagactcttccggtttccaaagttcgtgcctgcgaacccaaacctgtgagtctcttctgcatgcaggagtttctcctgggcagctggtcactccccagagaagctgggccttcatggacacatggaactaagcctcccaaatgggagttctggctgagcccagggtggggagatcctgggaagggaggcactggaggaagacggcacctcttcccccatggcagggtgtgagggaggcaggtttggaatggtgcgagtatggcaatctaagcaggggtctggtctctttgactccaggctggcctttggccgactgtctgctcacccagagaccttggactccggactatccatggctccgaatctaagtgctgcccactcccatgctcacacccacagaaggtcttcccatcccctttagattcgtgcctcactccaccagtgaggaagatgcctctgtctttcccacgactgccaggagatagggaagcccagccaggactgaccctccttcctccagcctgccctgacccacctggcaaagcagggcacatggggaggaagagactggaacctttctttgacagccaggcctagacagacaggcctggggacactggccccatgaggggaggaaggcaggcgcacgaggtccagggaggcccttttctgatcatgccccttctctcccaccccatctccccaccaccacctctgtggcctccatggtacccccacagggctggcctcccctagagggtgggcctcaaccacctgctcccgccacgcaccggttagtgagacagggctgccacggcaaccgccaagcccccctcaaggtgggacagtaccccggacccatccactcactcctgagagggctccggcccagaatgggaacctcagagaagagctctaaggagaagaaaccccatagcgtcagagaggatatgtctggcttccaagagaaaggaggctccgttttgcaaagtggaggagggacgagggacaggggtttcaccagccagcaacctgggccttgtactgtctgtgtttttaaaaccactaaagtgcaagaattacattgcactgtttctccactttttattttctcttaggcttttgtttctatttcaaacatactttcttggttttctaatggagtatatagtttagtcatttcacagactctggcctcctctcctgaaatccttttggatggggaaagggaaggtggggagggtccgaggggaaggggaccccagcttccctgtgcccgctcaccccactccaccagtccccggtcgccagccggagtctcctctctaccgccactgtcacaccgtagcccacatggatagcacagttgtcagacaagattccttcagattccgagttgcctaccggttgttttcgttgttgttgttgttgtttttctttttctttttttttttgaagacagcaataaccacagtacatattactgtagttctctatagttttacatacattcataccataactctgttctctcctcttttttgttttcaactttaaaaacaaaaataaacgatgataatctttactggtgaaaaggatggaaaaataaatcaacaaatgcaaccagtttgtgagaaaaaaaaaaaaaagccgaaaaaaaaaaaaaaaacacctgaatgcggaagagctcggctcccgtttagcattttgtacttaaggaaataaaaaaccaacaaaggatctcacattttcttaaaaagtgaagattgctgtatactatttattcaacttataatttatgttactccttgatctttgtcttttgtcatgacaaagcatttatttaataaagttatgcattcagtta

SEQ ID NO: 143064 - DNA, 718 bp, Homo sapiens
  Payload ID: 8266
  Gene Symbol: IGFBP5
  Gene Name: insulin-like growth factor binding protein 5
  ENST ID: ENST00000449583
  CDS Start-End: 20-718
agggggcgactaagagaagatggtgttgctcaccgcggtcctcctgctgctggccgcctatgcggggccggcccagagcctgggctccttcgtgcactgcgagccctgcgacgagaaagccctctccatgtgcccccccagccccctgggctgcgagctggtcaaggagccgggctgcggctgctgcatgacctgcgccctggccgaggggcagtcgtgcggcgtctacaccgagcgctgcgcccaggggctgcgctgcctcccccggcaggacgaggagaagccgctgcacgccctgctgcacggccgcggggtttgcctcaacgaaaagagctaccgcgagcaagtcaagatcgggtgtgctccaggagggcagagacacatctgcttcagcctttattactcccctcaccccaaactgcccagccctgggctctggccgtgtgcaccttggcccacgggggctgaccctccggctccttctcctgcagagagagactcccgtgagcacgaggagcccaccacctctgagatggccgaggagacctactcccccaagatcttccggcccaaacacacccgcatctccgagctgaaggctgaagcagtgaagaaggaccgcagaaagaagctgacccagtccaagtttgtcgggggagccgagaacactgcccacccccggatcatctctgcacctgagatgagacaggagtctgag

SEQ ID NO: 143065 - DNA, 1169 bp, Homo sapiens
  Payload ID: 8267
  Gene Symbol: IGFBP6
  Gene Name: insulin-like growth factor binding protein 6
  Uniprot ID: P24592
  ENST ID: ENST00000301464
  CDS Start-End: 274-996
gggaacaaagcaagaaaaatcagagcaatttgggaagtaaacagaaactggaaagggagagggaaagaagagtggggaggacccaggttgggggggccctctccagtcccacccagtttagggaatgcccctgccctctcccccaccccccttcacctggctcttaaagggcccggcccctggccggcggctacttaagacagaggggcggcggcgggcagcagctgcgctgcgactgctctggaaggagaggacggggcacaaaccctgaccatgaccccccacaggctgctgccaccgctgctgctgctgctagctctgctgctcgctgccagcccaggaggcgccttggcgcggtgcccaggctgcgggcaaggggtgcaggcgggttgtccagggggctgcgtggaggaggaggatggggggtcgccagccgagggctgcgcggaagctgagggctgtctcaggagggaggggcaggagtgcggggtctacacccctaactgcgccccaggactgcagtgccatccgcccaaggacgacgaggcgcctttgcgggcgctgctgctcggccgaggccgctgccttccggcccgcgcgcctgctgttgcagaggagaatcctaaggagagtaaaccccaagcaggcactgcccgcccacaggatgtgaaccgcagagaccaacagaggaatccaggcacctctaccacgccctcccagcccaattctgcgggtgtccaagacactgagatgggcccatgccgtagacatctggactcagtgctgcagcaactccagactgaggtctaccgaggggctcaaacactctacgtgcccaattgtgaccatcgaggcttctaccggaagcggcagtgccgctcctcccaggggcagcgccgaggtccctgctggtgtgtggatcggatgggcaagtccctgccagggtctccagatggcaatggaagctcctcctgccccactgggagtagcggctaaagctgggggatagaggggctgcagggccactggaaggaacatggagctgtcatcactcaacaaaaaaccgaggccctcaatccaccttcaggccccgccccatgggcccctcaccgctggttggaaagagtgttggtgttggctggggtgtcaataaagctgtgcttggggtc

SEQ ID NO: 143066 - DNA, 1177 bp, Homo sapiens
  Payload ID: 8267
  Gene Symbol: IGFBP6
  Gene Name: insulin-like growth factor binding protein 6
  ENST ID: ENST00000548547
  CDS Start-End: 283-999
gagattcccgggaacaaagcaagaaaaatcagagcaatttgggaagtaaacagaaactggaaagggagagggaaagaagagtggggaggacccaggttgggggggccctctccagtcccacccagtttagggaatgcccctgccctctcccccaccccccttcacctggctcttaaagggcccggcccctggccggcggctacttaagacagaggggcggcggcgggcagcagctgcgctgcgactgctctggaaggagaggacggggcacaaaccctgaccatgaccccccacaggctgctgccaccgctgctgctgctgctagctctgctgctcgctgccagcccaggaggcgccttggcgcggtgcccaggctgcgggcaaggggtgcaggcgggttgtccagggggctgcgtggaggaggaggatggggggtcgccagccgagggctgcgcggaagctgagggctgtctcaggagggaggggcaggagtgcggggtctacacccctaactgcgccccaggactgcagtgccatccgcccaaggacgacgaggcgcctttgcgggcgctgctgctcggccgaggccgctgccttccggcccgcgcgcctgctgaggagaatcctaaggagagtaaaccccaagcaggcactgcccgcccacaggatgtgaaccgcagagaccaacagaggaatccaggcacctctaccacgccctcccagcccaattctgcgggtgtccaagacactgagatgggcccatgccgtagacatctggactcagtgctgcagcaactccagactgaggtctaccgaggggctcaaacactctacgtgcccaattgtgaccatcgaggcttctaccggaagcggcagtgccgctcctcccaggggcagcgccgaggtccctgctggtgtgtggatcggatgggcaagtccctgccagggtctccagatggcaatggaagctcctcctgccccactgggagtagcggctaaagctgggggatagaggggctgcagggccactggaaggaacatggagctgtcatcactcaacaaaaaaccgaggccctcaatccaccttcaggccccgccccatgggcccctcaccgctggttggaaagagtgttggtgttggctggggtgtcaataaagctgtgcttggggtcgctgg

SEQ ID NO: 143067 - DNA, 712 bp, Homo sapiens
  Payload ID: 8267
  Gene Symbol: IGFBP6
  Gene Name: insulin-like growth factor binding protein 6
  ENST ID: ENST00000548176
  CDS Start-End: 52-462
agctgcgctgcgactgctctggaaggagaggacggggcacaaaccctgaccatgaccccccacaggctgctgccaccgctgctgctgctgctagctctgctgctcgctgccagcccaggaggcgccttggcgcggtgcccaggctgcgggcaaggggtgcaggcgggttgtccagggggctgcgtggaggaggaggatggggggtcgccagccgagggctgcgcggaagctgagggctgtctcaggagggaggggcaggagtgcggggtctacacccctaactgcgccccaggactgcagtgccatccgcccaaggacgacgaggcgcctttgcgggcgctgctgctcggccgaggccgctgccttccggcccgcgcgcctgctgtcctgagctctccccggaccctccggaaactttctccagagccaggagcaacctgcagttgcagaggagaatcctaaggagagtaaaccccaagcaggcactgcccgcccacaggatgtgaaccgcagagaccaacagaggaatccaggcacctctaccacgccctcccagcccaattctgcgggtgtccaagacactgagatgggcccatgccgtagacatctggactcagtgctgcagcaactccagactgaggtctaccgaggggctcaaacactctacgtgcccaattgtgaccatcgaggcttctaccggaagcggcaggtg

SEQ ID NO: 143068 - DNA, 1427 bp, Homo sapiens
  Payload ID: 8268
  Gene Symbol: IGFBP7
  Gene Name: insulin-like growth factor binding protein 7
  Uniprot ID: Q16270
  ENST ID: ENST00000295666
  CDS Start-End: 35-883
actcgcgcccttgccgctgccaccgcaccccgccatggagcggccgtcgctgcgcgccctgctcctcggcgccgctgggctgctgctcctgctcctgcccctctcctcttcctcctcttcggacacctgcggcccctgcgagccggcctcctgcccgcccctgcccccgctgggctgcctgctgggcgagacccgcgacgcgtgcggctgctgccctatgtgcgcccgcggcgagggcgagccgtgcgggggtggcggcgccggcagggggtactgcgcgccgggcatggagtgcgtgaagagccgcaagaggcggaagggtaaagccggggcagcagccggcggtccgggtgtaagcggcgtgtgcgtgtgcaagagccgctacccggtgtgcggcagcgacggcaccacctacccgagcggctgccagctgcgcgccgccagccagagggccgagagccgcggggagaaggccatcacccaggtcagcaagggcacctgcgagcaaggtccttccatagtgacgccccccaaggacatctggaatgtcactggtgcccaggtgtacttgagctgtgaggtcatcggaatcccgacacctgtcctcatctggaacaaggtaaaaaggggtcactatggagttcaaaggacagaactcctgcctggtgaccgggacaacctggccattcagacccggggtggcccagaaaagcatgaagtaactggctgggtgctggtatctcctctaagtaaggaagatgctggagaatatgagtgccatgcatccaattcccaaggacaggcttcagcatcagcaaaaattacagtggttgatgccttacatgaaataccagtgaaaaaaggtgaaggtgccgagctataaacctccagaatattattagtctgcatggttaaaagtagtcatggataactacattacctgttcttgcctaataagtttcttttaatccaatccactaacactttagttatattcactggttttacacagagaaatacaaaataaagatcacacatcaagactatctacaaaaatttattatatatttacagaagaaaagcatgcatatcattaaacaaataaaatactttttatcacaacacagtacatatttgtcatttttaaaaagccacacaatagaaacaagacaccaagatatttaattatcttgttgactcctgtaaaatagctaaacactcatcattcgcggtgcaatactcatagacataagttcctgaaacaatagtttgcatgcgtaaggcattcgcaccaaagaaatctgaaaagaaaaaacaaatggtaattagcagaattgtattgaagtgaccccacttctctaccccagaaaaagacaaagatctggtactgtagataatgaataaatgagtggagctgagaacacaca

SEQ ID NO: 143069 - DNA, 1251 bp, Homo sapiens
  Payload ID: 8268
  Gene Symbol: IGFBP7
  Gene Name: insulin-like growth factor binding protein 7
  Uniprot ID: Q16270
  ENST ID: ENST00000514062
  CDS Start-End: 35-874
actcgcgcccttgccgctgccaccgcaccccgccatggagcggccgtcgctgcgcgccctgctcctcggcgccgctgggctgctgctcctgctcctgcccctctcctcttcctcctcttcggacacctgcggcccctgcgagccggcctcctgcccgcccctgcccccgctgggctgcctgctgggcgagacccgcgacgcgtgcggctgctgccctatgtgcgcccgcggcgagggcgagccgtgcgggggtggcggcgccggcagggggtactgcgcgccgggcatggagtgcgtgaagagccgcaagaggcggaagggtaaagccggggcagcagccggcggtccgggtgtaagcggcgtgtgcgtgtgcaagagccgctacccggtgtgcggcagcgacggcaccacctacccgagcggctgccagctgcgcgccgccagccagagggccgagagccgcggggagaaggccatcacccaggtcagcaagggcacctgcgagcaaggtccttccatagtgacgccccccaaggacatctggaatgtcactggtgcccaggtgtacttgagctgtgaggtcatcggaatcccgacacctgtcctcatctggaacaaggtaaaaaggggtcactatggagttcaaaggacagaactcctgcctggtgaccgggacaacctggccattcagacccggggtggcccagaaaagcatgaagtaactggctgggtgctggtatctcctctaagtaaggaagatgctggagaatatgagtgccatgcatccaattcccaaggacaggcttcagcatcagcaaaaattacagtggttgatgccttacatgaaataccagtgaaaaaaggtacacaataaatctcacagccatttaaaaatgactagtacatttgctttaaaaagaacagaactaagtatgaaagtatcagacgtagctattgatgaaattctgtagttagcaacccataagggcattaagtatgccattaaaatgtacagcatgagactccaaaagattatctggatgggtgactgaacatcgttattatgacttagatgcttttaccttatctaacatgtaagagtcaaaatcaaacttgcctggaatggcttctatttcccatagctttctacctatctacttggcattttccctttgtgttgtgactattaaattcctatttaaaagaaaatgattgtgggcaattctcgcccttcacttttgcttttaaaag

SEQ ID NO: 143070 - DNA, 2116 bp, Homo sapiens
  Payload ID: 8269
  Gene Symbol: IGFALS
  Gene Name: insulin-like growth factor binding protein, acid labile subunit
  Uniprot ID: P35858
  ENST ID: ENST00000215539
  CDS Start-End: 112-1929
aggtgacaggcgcgggctgccccgcagtggggaaatccagagggcaggggtggccggcacagcagacgtaccctccctcgctgcctgcctgcagcctgccctgcatgcaggatggccctgaggaaaggaggcctggccctggcgctgctgctgctgtcctgggtggcactgggcccccgcagcctggagggagcagaccccggaacgccgggggaagccgagggcccagcgtgcccggccgcctgtgtctgcagctacgatgacgacgcggatgagctcagcgtcttctgcagctccaggaacctcacgcgcctgcctgatggagtcccgggcggcacccaagccctgtggctggacggcaacaacctctcgtccgtccccccggcagccttccagaacctctccagcctgggcttcctcaacctgcagggcggccagctgggcagcctggagccacaggcgctgctgggcctagagaacctgtgccacctgcacctggagcggaaccagctgcgcagcctggcactcggcacgtttgcacacacgcccgcgctggcctcgctcggcctcagcaacaaccgtctgagcaggctggaggacgggctcttcgagggcctcggcagcctctgggacctcaacctcggctggaatagcctggcggtgctccccgatgcggcgttccgcggcctgggcagcctgcgcgagctggtgctggcgggcaacaggctggcctacctgcagcccgcgctcttcagcggcctggccgagctccgggagctggacctgagcaggaacgcgctgcgggccatcaaggcaaacgtgttcgtgcagctgccccggctccagaaactctacctggaccgcaacctcatcgctgccgtggccccgggcgccttcctgggcctgaaggcgctgcgatggctggacctgtcccacaaccgcgtggctggcctcctggaggacacgttccccggtctgctgggcctgcgtgtgctgcggctgtcccacaacgccatcgccagcctgcggccccgcaccttcaaggacctgcacttcctggaggagctgcagctgggccacaaccgcatccggcagctggctgagcgcagctttgagggcctggggcagcttgaggtgctcacgctagaccacaaccagctccaggaggtcaaggcgggcgctttcctcggcctcaccaacgtggcggtcatgaacctctctgggaactgtctccggaaccttccggagcaggtgttccggggcctgggcaagctgcacagcctgcacctggagggcagctgcctgggacgcatccgcccgcacaccttcaccggcctctcggggctccgccgactcttcctcaaggacaacggcctcgtgggcattgaggagcagagcctgtgggggctggcggagctgctggagctcgacctgacctccaaccagctcacgcacctgccccaccgcctcttccagggcctgggcaagctggagtacctgctgctctcccgcaaccgcctggcagagctgccggcggacgccctgggccccctgcagcgggccttctggctggacgtctcgcacaaccgcctggaggcattgcccaacagcctcttggcaccactggggcggctgcgctacctcagcctcaggaacaactcactgcggaccttcacgccgcagcccccgggcctggagcgcctgtggctggagggtaacccctgggactgtggctgccctctcaaggcgctgcgggacttcgccctgcagaaccccagtgctgtgccccgcttcgtccaggccatctgtgagggggacgattgccagccgcccgcgtacacctacaacaacatcacctgtgccagcccgcccgaggtcgtggggctcgacctgcgggacctcagcgaggcccactttgctccctgctgaccaggtccccggactcaagccccggactcaggcccccacctggctcaccttgtgctggggacaggtcctcagtgtcctcaggggcctgcccagtgcacttgctggaagacgcaagggcctgatggggtggaaggcatggcggcccccccagctgtcatcaattaaaggcaaaggcaatcgaatctaa

SEQ ID NO: 143071 - DNA, 2136 bp, Homo sapiens
  Payload ID: 8269
  Gene Symbol: IGFALS
  Gene Name: insulin-like growth factor binding protein, acid labile subunit
  Uniprot ID: P35858
  ENST ID: ENST00000415638
  CDS Start-End: 81-2012
gaaatccagagggcaggggtggccggcacagcagacgtaccctccctcgctgcctgcctgcagcctgccctgcatgcaggatggccctgaggaaagcgggtgacctcgagcctcagttcacacctgagcgccgcttccggctgtgctggtatcaggctcactcgggcagagccctcctcgggccgcctccccaagcctctccccccgcaggaggcctggccctggcgctgctgctgctgtcctgggtggcactgggcccccgcagcctggagggagcagaccccggaacgccgggggaagccgagggcccagcgtgcccggccgcctgtgtctgcagctacgatgacgacgcggatgagctcagcgtcttctgcagctccaggaacctcacgcgcctgcctgatggagtcccgggcggcacccaagccctgtggctggacggcaacaacctctcgtccgtccccccggcagccttccagaacctctccagcctgggcttcctcaacctgcagggcggccagctgggcagcctggagccacaggcgctgctgggcctagagaacctgtgccacctgcacctggagcggaaccagctgcgcagcctggcactcggcacgtttgcacacacgcccgcgctggcctcgctcggcctcagcaacaaccgtctgagcaggctggaggacgggctcttcgagggcctcggcagcctctgggacctcaacctcggctggaatagcctggcggtgctccccgatgcggcgttccgcggcctgggcagcctgcgcgagctggtgctggcgggcaacaggctggcctacctgcagcccgcgctcttcagcggcctggccgagctccgggagctggacctgagcaggaacgcgctgcgggccatcaaggcaaacgtgttcgtgcagctgccccggctccagaaactctacctggaccgcaacctcatcgctgccgtggccccgggcgccttcctgggcctgaaggcgctgcgatggctggacctgtcccacaaccgcgtggctggcctcctggaggacacgttccccggtctgctgggcctgcgtgtgctgcggctgtcccacaacgccatcgccagcctgcggccccgcaccttcaaggacctgcacttcctggaggagctgcagctgggccacaaccgcatccggcagctggctgagcgcagctttgagggcctggggcagcttgaggtgctcacgctagaccacaaccagctccaggaggtcaaggcgggcgctttcctcggcctcaccaacgtggcggtcatgaacctctctgggaactgtctccggaaccttccggagcaggtgttccggggcctgggcaagctgcacagcctgcacctggagggcagctgcctgggacgcatccgcccgcacaccttcaccggcctctcggggctccgccgactcttcctcaaggacaacggcctcgtgggcattgaggagcagagcctgtgggggctggcggagctgctggagctcgacctgacctccaaccagctcacgcacctgccccaccgcctcttccagggcctgggcaagctggagtacctgctgctctcccgcaaccgcctggcagagctgccggcggacgccctgggccccctgcagcgggccttctggctggacgtctcgcacaaccgcctggaggcattgcccaacagcctcttggcaccactggggcggctgcgctacctcagcctcaggaacaactcactgcggaccttcacgccgcagcccccgggcctggagcgcctgtggctggagggtaacccctgggactgtggctgccctctcaaggcgctgcgggacttcgccctgcagaaccccagtgctgtgccccgcttcgtccaggccatctgtgagggggacgattgccagccgcccgcgtacacctacaacaacatcacctgtgccagcccgcccgaggtcgtggggctcgacctgcgggacctcagcgaggcccactttgctccctgctgaccaggtccccggactcaagccccggactcaggcccccacctggctcaccttgtgctggggacaggtcctcagtgtcctcaggggcctgcccagtgcacttgctggaagacgcaagggcctgatg

SEQ ID NO: 143072 - DNA, 730 bp, Homo sapiens
  Payload ID: 8269
  Gene Symbol: IGFALS
  Gene Name: insulin-like growth factor binding protein, acid labile subunit
  ENST ID: ENST00000568221
  CDS Start-End: 86-481
ctttctccccgtggatctataatttctcagaagaggagccgagacgccacctggaaaatgatcaattctcgataaagggaagacgatgacagtgggccggcggcttcccacagctctgcacggggcctgccaggaggcctggccctggcgctgctgctgctgtcctgggtggcactgggcccccgcagcctggagggagcagaccccggaacgccgggggaagccgagggcccagcgtgcccggccgcctgtgtctgcagctacgatgacgacgcggatgagctcagcgtcttctgcagctccaggaacctcacgcgcctgcctgatggagtcccgggcggcacccaagccctgtggctggacggcaacaacctctcgtccgtccccccggcagccttccagaacctctccagcctgggcttcctcaacctgcagggcggccagctgggcagcctggagccacaggcgctgctgggcctagagaacctgtgccacctgcacctggagcggaaccagctgcgcagcctggcactcggcacgtttgcacacacgcccgcgctggcctcgctcggcctcagcaacaaccgtctgagcaggctggaggacgggctcttcgagggcctcggcagcctctgggacctcaacctcggctggaatagcctggcggtgctccccgatgcggcgttccgcggcctgggcagcctgcgcgagctggtgctggcgggcaaca

SEQ ID NO: 143073 - DNA, 1093 bp, Homo sapiens
  Payload ID: 8270
  Gene Symbol: IGFBPL1
  Gene Name: insulin-like growth factor binding protein-like 1
  Uniprot ID: Q8WX77
  ENST ID: ENST00000377694
  CDS Start-End: 24-860
ccgccgctgtcccggagcaagccatgccgcgcttgtctctgctcttgccgctgctgcttctgctgctgctgccgctgctgccgccgctgtccccgagccttgggatccgcgacgtgggcggccggcgccccaagtgtggtccgtgccggccagagggctgcccggcgcctgcgccctgcccggcgcccgggatctcggcgctcgacgagtgcggctgctgcgcccgctgcctgggagccgagggcgcgagctgcgggggccgcgccggcgggcgctgtggccccggcctggtatgcgcgagccaggccgctggggcagcgcccgagggcaccgggctctgcgtgtgcgcgcagcgcggcaccgtctgcggctccgacggtcgctcgtaccccagcgtctgcgcgctgcgcctgcgcgctcggcacacgccccgcgcgcaccccggtcacctgcacaaggcgcgcgacggcccttgcgagttcgctcctgtggtcgtcgttcctccccgaagtgttcacaacgtcaccggggcgcaggtgggcctgtcctgtgaagtgagggctgtgcctaccccagtcatcacgtggagaaaggtcacgaagtcccctgagggcacccaagcactggaggagctgcctggggaccatgtcaatatagctgtccaagtgcgagggggcccttctgaccatgaggccacggcctggattttgatcaaccccctgcgaaaggaggatgagggtgtgtaccagtgccatgcagccaacatggtgggagaggctgagtcccacagcacagtgacggttctagatctgagtaaatacaggagcttccacttcccagctcccgatgaccgcatgtgatggagaaatggtcttagaaacattgatcatgggatgatggaaaagtcaaataacggatctttgtgcttcatgaagagttggaaaacctgtgtgtgtagatgaccccttttgtgtgtttttaaaaattagatgcaaactagatctgtatgcagatgtagtttttagcagggcaaacagtgagaaacggatttgcatgtggcttttttatacttttgaaatgaattgttccatga

SEQ ID NO: 143074 - DNA, 2829 bp, Homo sapiens
  Payload ID: 8271
  Gene Symbol: INSM1
  Gene Name: insulinoma-associated 1
  Uniprot ID: Q01101
  ENST ID: ENST00000310227
  CDS Start-End: 148-1680
gggcgcagagctgggccgagccgtcgccggcgccacgcgagtcccgcagccgccgcgcccgggcaatgggccgggggcactgagggccgccggggccgagcgcggaggggggaccgagccagtgccgtgccctcgggccgcgccaacatgccccgcggcttcctggtgaagcgcagcaagaagtccacgcccgtttcctaccgggtccgcggcggcgaggacggcgaccgcgcactgctgctctcgcccagctgcgggggcgcccgcgccgagcccccggcgccgagcccggtccccgggccgctgccgccgccgccgcccgcggagcgcgcccatgcagcgctcgccgccgcgcttgcctgcgcgcctgggccgcagccacccccgcagggcccgcgggccgcgcacttcggcaaccccgaggctgcgcaccccgcgccgctctacagtcccacgcggcccgtgagccgcgagcacgagaagcacaagtacttcgaacgcagcttcaacctgggctcgccggtctcggccgagtccttccccacgcccgccgcgctgctcggagggggcggcggcggcggcgcgagcggagctggcggaggcggcacctgcggcggcgacccgctgctcttcgcgcccgccgagctcaagatgggcacggcgttctcggctggcgccgaggcggcccgcggcccgggccccggccccccactgccccctgccgccgccctgcggcccccgggaaagcggcccccgccccctaccgccgcggagccgcccgccaaggcagtcaaggccccgggcgccaagaagcccaaggccatccgcaagctgcacttcgaggacgaggtgaccacgtcgcccgtgctggggctcaagatcaaggagggcccggtggaggcgccgcggggccgcgcggggggcgcggcgcggccgctgggcgagttcatctgccagctgtgcaaggaggagtacgccgacccgttcgcgctggcgcagcacaaatgctcgcgcatcgtgcgtgtggagtaccgctgtcccgagtgcgccaaggtcttcagctgcccggccaacctggcctcgcaccgccgctggcacaaaccgcggcccgcgcccgccgccgcccgcgcgccggagccagaagcagcagccagggctgaggcgcgggaggcacccggcggcggcagcgaccgggacacgccgagccccggcggcgtgtccgagtcgggctccgaggacgggctctacgagtgccatcactgcgccaagaagttccgccgccaggcctacctacgcaagcacctgctggcgcaccaccaggcgctgcaggccaagggcgcgccgctagcgcccccggccgaggacctactggccttgtaccccgggcccgacgagaaggcgccccaggaggcggccggcgacggcgagggggccggcgtgctgggcctgagtgcgtccgccgagtgccacctgtgcccagtgtgcggagagtcgttcgccagcaagggcgctcaggagcgccacctgcgcctgctgcacgccgcccaggtgttcccctgcaagtactgcccggccaccttctacagctcgcccggccttacgcggcacatcaacaagtgccacccatccgaaaacagacaggtgatcctcctgcaggtgcccgtgcgcccggcctgctagagcgcgccctccaccccggcccccgaactgtgccttcgcttggagacccacaaagagagtgcgccctgcactccccgaacccgagtccgcgctgggggagcctcgcccccgcccccaccgggtgaaagtgtcgtctccgcttctctcggtgtggcgtgacggtaaccccatactctccttttgactccttttggaacccccacttttacgttgtgtccctccgcctcccccatggcgcaacaggagtcagtctctttctgtacaagggagaaaagctgtacgcgtttgtctcgtggttggaagcctccccttggcggggagaagctttttttcttgctagtattcgctgtgttcatggtctagaaatgcggtctggtctcgcctcgcctaccaatctctgctctctatgtatgtagcgtacgggttgttttgggtgaatcttgaggaataaatgcctttatatttcacaggctgtaaattgaacttcccacacgattagctttattatggcttgtgaactgctggagtctggctttacctttttgtatgtgaacaaatcaaattgcttaaaaaagagttttctttagtatagccacaaatgccttgaactgttgtctgggattgttttgtggggggagggaagggagtgttccgaagatgctgtagtaactgcctcagtgtttcacgtaagactttttggtttgatcatctttgttgaggtaggactatcagttccctctaaatgtatatgttgatttatgagtaattgttatttattctttatttatttatattaattatgaagattatgatattatttgattgcagatttttttggcgcgctgccccctccccaccctgccactcttgacattccactgtgcgttttagaagagagcctttttctaaagggatctgcttaaagttttaacttttatacctatctgagtgaattacagacaacctatcatttattctgcttcgagggtccccagggcccttgtacaaccgacagctcttacttttaaatgcaatctcttttctacatacattattttcttaattgttagctatttatagaaagcttcaatagaactgtttcaactgtataactatttactattcaaataaaatattttcaaagtcaaa

SEQ ID NO: 143075 - DNA, 3013 bp, Homo sapiens
  Payload ID: 8272
  Gene Symbol: INSM2
  Gene Name: insulinoma-associated 2
  Uniprot ID: Q96T92
  ENST ID: ENST00000307169
  CDS Start-End: 212-1912
cgggagaaagccccgcccccggcgcccgctcccactcctgattggccgggccagcccggggaggcccggcgggaccccggcccgcgtctcagctataaagatagccccggcatgacagccgcggcgaagctcttctagttcatctgctggccggctctcagtccccgtggcgccccctttcctcttgtcccagagcgctctcgactccaccatgccaaggggattcctggtgaagcgaactaaacggacaggcggcttgtaccgagttcgccttgcggagcgtgtcttccctctgctggggccccagggggcgccgcccttcttggaggaggctcccagcgcctccttgcccggcgcggagcgggcgacaccccccacccgagaggaaccaggaaaggggttgacggcggaggcggcccgggaacagtcggggtcgccatgtcgggcggctggggtgagcccggggacgggcgggcgggaaggcgcggagtggcgggcgggtggcagggaaggtcccgggcccagccccagccccagccccagtccagcgaagccggcaggcgcagagctgcgtcgggcgttcctggagcgctgcctcagctcgcccgtctccgccgagtctttccccgggggcgccgccgccgtggccgctttctcctgctccgtggcgccagcagccgcaccgaccccgggggagcagtttctgctgccgcttcgggcgccgttcccagagcccgcgcttcagccggaccctgcgcccctctcggccgcccttcagagtctgaagcgggcggccggcggcgagcgccgcggcaaggcacccacggactgcgcgtctggacccgcggccgcgggaatcaagaagccaaaggccatgaggaagttgagctttgccgatgaggtgaccacatcccctgtcctgggcctgaagatcaaggaggaggagcccggagcgccgtcccggggcttggggggcagccgcacgccactgggggagttcatctgccagctgtgcaaggagcagtacgcagaccccttcgcgctggcccagcaccgctgctcccgcatcgtgcgcgtagagtaccgctgccctgagtgcgacaaggtgttcagctgtcctgcgaacctggcctcccatcgccgctggcataagccgcgtcctgcggctgcaaacgccgccacagtctcctccgccgacgggaagccgccttcttcgtcgtcttcgtcctcccgggactccggggccattgcatcttttctggcggagggaaaggagaacagccgaatagagcggactgcggatcagcacccgcaggccagggacagctccggggcggatcagcacccggacagcgccccgaggcagggcctccaggtgctgacgcatccagagccaccgctgcctcagggcccctacacggagggggtgttggggcgccgggtacctgtgccgggcagtaccagtggtggcaggggatccgagattttcgtgtgcccatattgccacaaaaagtttcgtcgccaagcctatctgcgcaagcacctgagcactcacgaggcgggctcggcccgtgcgctagcgccgggctttggctccgaacgcggtgccccacttgccttcgcttgcccattgtgcggagcgcacttccctacagcagatatcagggagaagcaccggctgtggcatgctgtccgcgaggagctgctcctgcccgctctggcgggggctcctcccgaaacgtcgggccctagcgggccatctgacgggagtgcccagcaaattttctcgtgcaagcactgcccgtccactttttttagctctccagggctgacccggcacatcaataagtgccacccctcagaaagccggcaagtgctgctgctgcagatgccactgcggcctggctgctgagggacgagagaccaggatgatttcgaggttggccttagaggaaacagatcatgggaatttctgtggggctttcttcaacttgcaagtttactttcattccttcctatgttttaatcccctaaaattctccctgtagtcaatgttccaccagaggagcggacagtgaaatgtaatatccctctctagagcaggtatgtatatggtataaaccttgagatcaaagactgtcagctttaaatccttctcactttccccactaaaataggatttttccccttaaaactctggagaccctaacgaatcctatatgatttgtaattcctatggaaagtcgcggtgaatgcgtgcatgtctcaatgtccacaaaggattctggctaccctttggtagccaatgttttttttgtcttgtcatcacaggcgcctatacagcttctgtctcaatagggtcagatattttgcactgtatattctgtgaattaaaagttatgtgattggtgtcaaacttaaggagattcaagacctggcagaaaatgtaagaggatttttgctgcttttggggtgcatggggatctcccctgtaaactttcctttgcccaattatatgtacatgtccattcttaagttggtgtttggaggtggggaggatgctactttactggagttgagacaccccctaaaattctcaccctcagctattttgtgggcagtattcaggaagagctacttcaaacctttctttaaatggctttttggaaatacagaagtcgtttcctcaagtttgactgttttaatggggtttcacccaaattgtttaatgcttctgctgtaaatgtcatactgtgtattcattatgaaaatatgtacagcttaaggaagatgttaacacctgtaatccactaaggaactgaatggcaatttgctcaatattcagtattttcttttcagcggcaacttgtttttgatttttttaaaaaaccatttcagtgtacattgtgtactaattccctactagccagtttgggacattggctgagcactgcctgacagaaagcccgtatttgtaagatgcttaccaccaaataaatgtacatagactgtg

SEQ ID NO: 143076 - DNA, 1641 bp, Homo sapiens
  Payload ID: 8273
  Gene Symbol: ITM2A
  Gene Name: integral membrane protein 2A
  Uniprot ID: O43736
  ENST ID: ENST00000373298
  CDS Start-End: 145-936
ataagtatcccagacctcggcttgcagtagtgttagactgaagataaagtaagtgctgtttgggctaacaggatctcctcttgcagtctgcagcccaggacgctgattccagcagcgccttaccgcgcagcccgaagattcactatggtgaaaatcgccttcaatacccctaccgccgtgcaaaaggaggaggcgcggcaagacgtggaggccctcctgagccgcacggtcagaactcagatactgaccggcaaggagctccgagttgccacccaggaaaaagagggctcctctgggagatgtatgcttactctcttaggcctttcattcatcttggcaggacttattgttggtggagcctgcatttacaagtacttcatgcccaagagcaccatttaccgtggagagatgtgcttttttgattctgaggatcctgcaaattcccttcgtggaggagagcctaacttcctgcctgtgactgaggaggctgacattcgtgaggatgacaacattgcaatcattgatgtgcctgtccccagtttctctgatagtgaccctgcagcaattattcatgactttgaaaagggaatgactgcttacctggacttgttgctggggaactgctatctgatgcccctcaatacttctattgttatgcctccaaaaaatctggtagagctctttggcaaactggcgagtggcagatatctgcctcaaacttatgtggttcgagaagacctagttgctgtggaggaaattcgtgatgttagtaaccttggcatctttatttaccaactttgcaataacagaaagtccttccgccttcgtcgcagagacctcttgctgggtttcaacaaacgtgccattgataaatgctggaagattagacacttccccaacgaatttattgttgagaccaagatctgtcaagagtaagaggcaacagatagagtgtccttggtaataagaagtcagagatttacaatatgactttaacattaaggtttatgggatactcaagatatttactcatgcatttactctattgcttatgctttaaaaaaaggaaaaaaaaaaactactaaccactgcaagctcttgtcaaattttagtttaattggcattgcttgttttttgaaactgaaattacatgagtttcattttttctttgaatttatagggtttagatttctgaaagcagcatgaatatatcacctaacatcctgacaataaattccatccgttgttttttttgtttgtttgttttttcttttcctttaagtaagctctttattcatcttatggtggagcaattttaaaatttgaaatattttaaattgtttttgaactttttgtgtaaaatatatcagatctcaacattgttggtttcttttgtttttcattttgtacaactttcttgaatttagaaattacatctttgcagttctgttaggtgctctgtaattaacctgacttatatgtgaacaattttcatgagacagtcatttttaactaatgcagtgattctttctcactactatctgtattgtggaatgcacaaaattgtgtaggtgctgaatgctgtaaggagtttaggttgtatgaattctacaaccctataataaattttactctatacaa

SEQ ID NO: 143077 - DNA, 1698 bp, Homo sapiens
  Payload ID: 8273
  Gene Symbol: ITM2A
  Gene Name: integral membrane protein 2A
  Uniprot ID: O43736
  ENST ID: ENST00000434584
  CDS Start-End: 338-997
gtgcaggtgaggcacgtttagcctgagccggccacggactccacttcccctgctcttcccccagtggcaaatccgcgccacctcgcaaacccccaactcaggcacttgggccccttttgggccccctctcgctcctccctttaggcacctccctgggcccgcccacggtctccccccagtttgggactgcgtcataagtatcccagacctcggcttgcagtagtgttagactgaagataaagtaagtgctgtttgggctaacaggatctcctcttgcagtctgcagcccaggacgctgattccagcagcgccttaccgcgcagcccgaagattcactatggtgaaaatcgccttcaatacccctaccgccgtgcaaaaggaggaggcgcggcaagacgtggaggccctcctgagccgcacggtcagaactcagatactgaccggcaagagcaccatttaccgtggagagatgtgcttttttgattctgaggatcctgcaaattcccttcgtggaggagagcctaacttcctgcctgtgactgaggaggctgacattcgtgaggatgacaacattgcaatcattgatgtgcctgtccccagtttctctgatagtgaccctgcagcaattattcatgactttgaaaagggaatgactgcttacctggacttgttgctggggaactgctatctgatgcccctcaatacttctattgttatgcctccaaaaaatctggtagagctctttggcaaactggcgagtggcagatatctgcctcaaacttatgtggttcgagaagacctagttgctgtggaggaaattcgtgatgttagtaaccttggcatctttatttaccaactttgcaataacagaaagtccttccgccttcgtcgcagagacctcttgctgggtttcaacaaacgtgccattgataaatgctggaagattagacacttccccaacgaatttattgttgagaccaagatctgtcaagagtaagaggcaacagatagagtgtccttggtaataagaagtcagagatttacaatatgactttaacattaaggtttatgggatactcaagatatttactcatgcatttactctattgcttatgctttaaaaaaaggaaaaaaaaaaactactaaccactgcaagctcttgtcaaattttagtttaattggcattgcttgttttttgaaactgaaattacatgagtttcattttttctttgaatttatagggtttagatttctgaaagcagcatgaatatatcacctaacatcctgacaataaattccatccgttgttttttttgtttgtttgttttttcttttcctttaagtaagctctttattcatcttatggtggagcaattttaaaatttgaaatattttaaattgtttttgaactttttgtgtaaaatatatcagatctcaacattgttggtttcttttgtttttcattttgtacaactttcttgaatttagaaattacatctttgcagttctgttaggtgctctgtaattaacctgacttatatgtgaacaattttcatgagacagtcatttttaactaatgcagtgattctttctcactactatctgtattgtggaatgcacaaaattgtgtaggtgctgaatgctgtaaggagtttaggttgtatgaattctacaaccctataataaattttactctat

SEQ ID NO: 143078 - DNA, 805 bp, Homo sapiens
  Payload ID: 8274
  Gene Symbol: ITM2B
  Gene Name: integral membrane protein 2B
  Uniprot ID: Q9Y287
  ENST ID: ENST00000378549
  CDS Start-End: 159-641
cgcagtagccgcctctgccgccgcggagcttcccgaacctcttcagccgcccggagccgctcccggagcccggccgtagaggctgcaatcgcagccgggagcccgcagcccgcgccccgagcccgccgccgcccttcgagggcgccccaggccgcgccatggtgaaggtgacgttcaactccgctctggcccagaaggaggccaagaaggacgagcccaagagcggcgaggaggcgctcatcatcccccccgacgccgtcgcggtggactgcaaggacccagatgatgtggtaccagttggccaaagaagagcctggtgttggtgcatgtgctttggactagcatttatgcttgcaggtgttattctaggaggagcatacttgtacaaatattttgcacttcaagctggaacctatttgcctcagtcctatctgattcatgagcacatggttattactgatcgcattgaaaacattgatcacctgggtttctttatttatcgactgtgtcatgacaaggaaacttacaaactgcaacgcagagaaactattaaaggtattcagaaacgtgaagccagcaattgtttcgcaattcggcattttgaaaacaaatttgccgtggaaactttaatttgttcttgaacagtcaagaaaaacattattgaggaaaattaatatcacagcataaccccaccctttacattttgtgcagtgattattttttaaagtcttctttcatgtaagtagcaaacagggctttactatcttttcatctcattaattcaattaaaaccattaccttaaaa

SEQ ID NO: 143079 - DNA, 10137 bp, Homo sapiens
  Payload ID: 8274
  Gene Symbol: ITM2B
  Gene Name: integral membrane protein 2B
  Uniprot ID: Q9Y287
  ENST ID: ENST00000378565
  CDS Start-End: 204-1004
agtctccgccctcgcgcgggagctgggaggctgcgagatccctaccgcagtagccgcctctgccgccgcggagcttcccgaacctcttcagccgcccggagccgctcccggagcccggccgtagaggctgcaatcgcagccgggagcccgcagcccgcgccccgagcccgccgccgcccttcgagggcgccccaggccgcgccatggtgaaggtgacgttcaactccgctctggcccagaaggaggccaagaaggacgagcccaagagcggcgaggaggcgctcatcatcccccccgacgccgtcgcggtggactgcaaggacccagatgatgtggtaccagttggccaaagaagagcctggtgttggtgcatgtgctttggactagcatttatgcttgcaggtgttattctaggaggagcatacttgtacaaatattttgcacttcaaccagatgacgtgtactactgtggaataaagtacatcaaagatgatgtcatcttaaatgagccctctgcagatgccccagctgctctctaccagacaattgaagaaaatattaaaatctttgaagaagaagaagttgaatttatcagtgtgcctgtcccagagtttgcagatagtgatcctgccaacattgttcatgactttaacaagaaacttacagcctatttagatcttaacctggataagtgctatgtgatccctctgaacacttccattgttatgccacccagaaacctactggagttacttattaacatcaaggctggaacctatttgcctcagtcctatctgattcatgagcacatggttattactgatcgcattgaaaacattgatcacctgggtttctttatttatcgactgtgtcatgacaaggaaacttacaaactgcaacgcagagaaactattaaaggtattcagaaacgtgaagccagcaattgtttcgcaattcggcattttgaaaacaaatttgccgtggaaactttaatttgttcttgaacagtcaagaaaaacattattgaggaaaattaatatcacagcataaccccaccctttacattttgtgcagtgattattttttaaagtcttctttcatgtaagtagcaaacagggctttactatcttttcatctcattaattcaattaaaaccattaccttaaaatttttttctttcgaagtgtggtgtcttttatatttgaattagtaactgtatgaagtcatagataatagtacatgtcaccttaggtagtaggaagaattacaatttctttaaatcatttatctggatttttatgttttattagcattttcaagaagacggattatctagagaataatcatatatatgcatacgtaaaaatggaccacagtgacttatttgtagttgttagttgccctgctacctagtttgttagtgcatttgagcacacattttaattttcctctaattaaaatgtgcagtattttcagtgtcaaatatatttaactatttagagaatgatttccacctttatgttttaatatcctaggcatctgctgtaataatattttagaaaatgtttggaatttaagaaataacttgtgttactaatttgtataacccatatctgtgcaatggaatataaatatcacaaagttgtttaactagactgcgtgttgtttttcccgtataataaaaccaaagaatagtttggttcttcaaatcttaagagaatccacataaaagaagaaactattttttaaaaattcacttctatatatacaatgagtaaaatcacagattttttctttaaataaaaataagtcattttaataactaaaccagattctttgtggatactattaaagtaacatttaagcctcaaccttgaatgatgttgtttaatataaaatgcttttatttttgatggaaaggcaatcaaagcctaaagtttccaaggaacgtaaaataactgtgcttctctgagaatgcccgcctcacaagtggaacattttgagttaataatgatgatttttatgtttctaaggttgcttcctctctgaaataattcagaatccacccccatttaataaaatacctatgattcatttcacctcaagttcctaagacaaaaaatttcaattctgactttaggaggtcagagtttttaaagcttccaactcttaaaggatttagtctagaaaccaattctaattcaaaaggatattatttactcatggcttttcatttcatttcagtaatattgtcagaactttaagtcagtgagttgggtattcaggaattaacaattttagaagacaatatgtttcaataaaatgagaattggtttttcctactttccaggctctaaaattacatgaattttcagggagctgtgaacatttaggagcacattattcattcagcatcttttatatgcccaacatatgatattgtgttgaagatatatctgcaaagaagaaaaaaagccactgccgtcgtggagactcacaatctaggaaaagagagggacagcaaacaactcattacaatacattgggatcagtagtgtgagggagaaaaacaggtctaggttctttggaaaacatttaggagagtcaatgagactttcagaatgtgaagtgcatgggattaggtcatggaagaagaccatgtatgtcatcttgaggacttcattctgtagaccatgggccactattgaagttttgcattttggaaggagcttattagtttgttttcctgttgattatagtagtaatgcagtatcagggtagctgaactgcaataataatcccaacatctcactggcttcatgcagtaggaatatgctttcatcacagtccagtatggcaggcaacctccagactcccagggacccaaacttacactttactaaatgtaattctttcatttgaatttttaaaggtttttgtataatcatcttagtaaaacatttgataattcttcacaacatttgcaatcattgatttggccagattggtctaacatggtacccatgattttacttcatttccagtactattctgataatttcctttagagtcaattgagtagagagtacccctctcacctaagcttagtcatgtcccaggaattttggaactccaactgagatttcaggctcattattcattctagggctgaatgaataatgtgccctttgaacccttgtgccatgctggaaactgtggtcttggtgtggcatggaaaaaccagagggtgagggatgtggatgagaagatgacagagaatcagacatgcagagaggactgccaggtctcccagtgggttccagggagactcagctatccttccctcttcttgagttctgtcttagtccattcgggctactataacaaaataccatagactgagtggctttaaacaacagaagcttgtttctcacagttccagaagctggaaagttcaagatcaagtcacctgcagattcagtgtctgatgaggtcctccttcctcacagaaagctctcttctctctgtgaccttatatcacagatgactctgggttcctcttacaaggacactagttccattcatgggggttccactctcatgacctaacacctctcaaaggccccatttcctaatactgtcaccttgggggtaaggatttcaacatgaattctggggggacacaaacattcaaaccatagcaagttccataatgcaccccatcatatgtgtgtgtgtgtgtatttatttatttatctaagatagctctagtttgctgctttgcaacacattctgcccctattgcattggtttaaaaaaaaagtacagaagtcaagatgagactatataaatcttgacaagttgttggccgtgattgctcttttgtgatgcaggagtgagaatctggagaatctggcttaagaggtggctgagaattaaaataataggcatgaaaatgcttcatacagctctgtacagttgttgacagtgccttttttgaaacctatcactgctatatgttagcaagcaaacactgatcttgttttgtaatgtgtaattgttcacttctgctttccctgtatccctttttagattccacacccatattagtgagaagcaagaaaaaaaaatgtacacagtgtcctaaatgttgtttatctcgaataatagaagtaggagtgtaaaacttaaaggctgattaataatgcaaatgaaaaggcaaatggattattgaatagaaaaggtctagattctatgtttgaatgtggttatgaattaatatgggcagaatctctaagattctgctaagtgaacatttagtagtttactagacatcttctcttccacctagcaaagagtttgttgcccagagttatataaatcctactctattgcacactaatctttgcatgtttaactctttgggacttaggttcctagataaggacttcatgtgtatctatttagaaaaagaacatttcttcatttccacaaagctacacagccatcagttcgttcaatatcttgtccaaagttattgctagcgttcttctttctgagtctttgtggctaatgcttttttgaggaagaagcatgatttagtctcagctctctattgatcattttaggcttttatcttactgaaaaaattaagcacaatttaagattttttttgaaatatttactgaattttgaggccataaattatttcctgatagcacacatgtatgggttgtagattccacacttttaatcttccagccacctattgcagattggttctgagaagcaggatgagtgggagtgggcttaggggtcaaaattgagacctaagtggtataaaacaagataatcctagcttcctcccacttaaaataatttgatgggacttctgtatctgatttttaagcttgcatttgtgtttatattttcattgtaaaaatatcaaataatacagtttttgaaggtaaaaagtaaatgttcccgcccttctaccatcctccttcctcagtcccattccccaacagtttaacgtgcgatacaataatgtgtgacacaaaatgacctagttcttgccctagtgactaagcagatgcaaacgccttcttctttccaaacagtgtggtcttatccccgtcgcaaatggaggatatttaagaaacccaagccagaaaccccacagtcttcacagtcactgtgtcctccacctcctagcagcttcctgctgttctgctctagtggttctctctgcttccccacacccacccgtaagccacaacaatctttccaaaacacgaacttgatggtttcattgtcacaccccagcttaaaacactttcctggcttcccctggttcttaggataaagaccaaaatacttaatgctgcacagtccagtcccaacccactctccagcttcatcttaatcacacccctctttgctcctagtgtcctaccacattgcctgacttactgtttcttggtaaatgctattcttacttcctgaagattatttccatctcctcacccgacacccttcagttagcttccactcaaccttcagaatttagttcaggtgacccttcctcaagagaagattttcctgaaccattaggaaaggcttctcttgtttctcagtctcatagcatcatctgtctcttttttgtgacttgaatataattaatattttatattttgtccttgttgcttgtttggttaatagatttccaccactagactgctcaatacgttagtagggcacctgacacatagttgcagctcttatttattgaatgaatgaatgattccttcccgtaccaccctagtcttgcccactgtcatttttattctgggtattatatttcccaaccagttgtctgactttctcctcagatctcatccccatgggtctgagtgagttgccttgaatataagattcagtgatggtgtcctgctgcacttaagagaaaatccttttttcaagccctaaaatcctgccctcactagacttctctcaccatttctctgtttgcatcctagccttttagttttggcctcatataagcttgcagccctgcctgaaacagttgtctctgtccccactctaccccctgccctccacaaagaaaagttaactcttactcatctttcagatctcagactaaaagtttcctcagagatgccaccatagctctctatttctcatacctttcatgatacttcatcacctgtcttcatgaagtcctcctctagactattagcaaaatgctcatactgtgtcctcagtatttggcacataataggttttcttgacactgaaggaaggaataaacatctggtaactatagctagaaaaaaaggaaatacggtatctacttcactaaaaccaaagggggtttttttgggcagacaatcttcattattcagatggaaattaatgtttgttgaatgaatgagctacatttcatggattaactccatgaaatggagttcagctagtaagggttatactttgaggctatttcatcttgatgggcttgttgttcaaagttagagcctcattttaagtaaaatgttctgtgggggccatattaagattttcatatgacagaagtgtatatatatccacaaatgtttcaagccaagattatgtcttcttccataatgccaccttcttctaggatagtatttttgggccagatggttttccacatttaaaacataccaacattcttttaaggcccagtgattatcaaaagggattggcactacattttaaaatgtaggggggatttttgattgtcacaggactagaggatgccatttgtatttagtagatgaggccaggcaggatgctaaatgtcttaaaagtccgggagtcctgcacaaaaaattactgcccttcttgatttgccaattatgcccctgctgggaagcatgaaaggagagagaagagctttcagaatgtcagggataaatatatccattaagccttcagactaagatgcaggaatagttttccatttgggtatgaatacggcaagttcttagaacatttcttaaaacataattagccaaatactagtgtaacagctacaacttatctagttttaatcaactccagggaacattacactttatttaacccctaattatctgataacccaagttctgtcagaaacactgctgaggcatccaggaagatgagcctgtgaaatttgagaatccttcatgtctctggaatgagtccctagattctagccctgcagctagctgacactctaaaaaattatgagtgccttcctttagctccccatagaaatgtctttgtataaccatggcatgatattattctcttgacttttgttgaggattgatagaaataaaaatgagccagaaatgtttcttcagcttttgtaaagtgctgttaaaagcattatgtcatatctagtacttcttatctaagtattttaaaatttagtgttaggaaaatttttttcacataggatacatgttaatattaggtagtacatctaaagaattcatttgcttcccttttgccttggttgctgggaaactcagagccaaactcggtgcttagattaattactttcagcctaggtttttctgtatatcaccctttcggtagggcttgaagtaacccttcagtttgctcatattttgttgtgagttttatagatagtttacatgcaacgaaatgcatatatcttaagtgttcaactcagtgagttttgacacttttctttgtccatgttaacaatcatcaaaacattttcattgccccagaaaataccattgtgctcctttccggcaaatattccttccctctgctaaaactactttttcatttctatgaccatagttcagtttttggctattcttgaactttatttgaatggaatcgtacatatataatctttttgtttggcttttaaaactcagtataacgttttgacatttgtccatgttgttgcatgactcagcagttctttcttttcagttgctgtgtagtagtccatttcttttggttttgtgtgtgtgtgtgtgctttttaaatttattttttatttttttttttttgagacagagtctggctctgtcaactcaggctggagtgcagtggcatcatctcggctcactgcaatttctgtctcccaggctcaagccatcctctaacctcagcctcccgagtagctaagactctacaggcgtatgccaccatacctagtttgtttttgttattttttttagtacagatggggttttgccatgttgtccaggctggtctcgaactcctgggctcaaagcaatccaccctcctcggcctcccaaagtgctaggattacaagtgtgaggcactgtgccctgccagtattccattttttgtgtataccacaatttatcatttttttctgtgtaggtattttcattgtttccaagttgggaagtatgaataaagttgctatgaacatgcatgtacaagtctttgtagatagctcatgttttaaaaagtgtttgtttaatgatttcattgcaaaatcatctttattgtaaacatatctttttgagggtagattggtaaaatatacataataaatacatgacaatgcaggagtccaagtattattaggtttacagtcataacaaacaccaagaaccatttataaatttcagtttctcattgttttagaatggaaggtctaaccaaatatgtaatgtatcccttcaagtaaactagtataacttgggtaccttctcatataaattccccttaaggcatacgttgctgtcttttccaaattcccattttgcttgtccaataggcattatcagatacaacatgttcaaaggcaaacttgattttcctcccatggtttcctcatctcagctcctttttttttccagttgcacaggctaaaaataggaagtcattctagattcctctctttttcataaacctcacatcaaatccatcagccaatctggtgtgctctaccttcaagatacggattatccagaattcagccgcttctcactgtctctactgctaacatagtagtcaaagctgctatcatctcttgcttggattggtgcaatggcctcacaactgatcttcctgcttccatacttgacccctagagcctcttctaaacagagtagctagagcgatcttttctaaatctaagccacatcatgtcactcccctgctcaaatcccaacattttattcagaataaaagtcgaacaatgccctacctgtaggtaatctaggcctccaaagctcttcttacatcacctcctgtaactctccccctttctcactcctctacagccacacagctgcctcactttcctttgaacgtaccaagggcaatcctgcttcagagcctttgcacttgctgtttctgggccaggaattccacaccctccttccctcacatgtatcccaaggctcactgccttccttcagttaagtctgctggaatgtcacttcattaggtattgcctgatcaccttttctaaagtgagtctcacctccaccctcaatgctggcaatgtctgtctgtagtgtattcttaacaatacagattagcacaatgcaggccagaccatgaagactgtttcaagttcgaggatgggcaaaaataatgactaggacttggctcaagattcctcaaacagccaataaacaatgcaaagaataaatgagagagtaattggagacaagctttcccttggcttcccttcttttctcacagaggcttttccagaaggtggtcatttccatagcccatgtggaatgagatgtccactagggcagagaagcacagaaccgtgggcactgcttcccttcctttaaccctatcatattgctgcccagtgagcaatatggtcattggtcaagaaggcttatgcccaggtatccctgtggctatgagcattgctccttatctatgcctctgctcttagacttttccattctgccctcttaggggccttcctggccatgaccacactaccttatttttctctatagtacttatcaccatctgacatgtatttatgtttgtatttgtttattgtctgtctctacaaataaaatgtaaattccctaaaaa

SEQ ID NO: 143080 - DNA, 596 bp, Homo sapiens
  Payload ID: 8274
  Gene Symbol: ITM2B
  Gene Name: integral membrane protein 2B
  ENST ID: ENST00000607866
  CDS Start-End: 1-161
catttatgcttgcaggtgttattctaggaggagcatacttgtacaaatattttgcacttcaaagtttctctcttgttgcccagactggagtccaatggcgcgatctcggctcactgcaccctctgtctcccggccagatgacgtgtactactgtggaataaagtacatcaaagatgatgtcatcttaaatgagccctctgcagatgccccagctgctctctaccagacaattgaagaaaatattaaaatctttgaagaagaagaagttgaatttatcagtgtgcctgtcccagagtttgcagatagtgatcctgccaacattgttcatgactttaacaagaaacttacagcctatttagatcttaacctggataagtgctatgtgatccctctgaacacttccattgttatgccacccagaaacctactggagttacttattaacatcaaggctggaacctatttgcctcagtcctatctgattcatgagcacatggttattactgatcgcattgaaaacattgatcacctgggtttctttatttatcgactgtgtcatgacaaggaaacttacaaactgcaacgcagagaaacta

SEQ ID NO: 143081 - DNA, 810 bp, Homo sapiens
  Payload ID: 8274
  Gene Symbol: ITM2B
  Gene Name: integral membrane protein 2B
  ENST ID: ENST00000463839
  CDS Start-End: 1-88
aggtattcagaaacgtgaagccagcaattgtttcgcaattcggcattttgaaaacaaatttgccgtggaaactttaatttgttcttgaacagtcaagaaaaacattattgaggaaaattaatatcacagcataaccccaccctttacattttgtgcagtgattattttttaaagtcttctttcatgctctaaaattacatgaattttcagggagctgtgaacatttaggagcacattattcattcagcatcttttatatgcccaacatatgatattgtgttgaagatatatctgcaaagaagaaaaaaagccactgccgtcgtggagactcacaatctaggaaaagagagggacagcaaacaactcattacaatacattgggatcagtagtgtgagggagaaaaacaggtctaggttctttggaaaacatttaggagagtcaatgagactttcagaatgtgaagtgcatgggattaggtcatggaagaagaccatgtatgtcatcttgaggacttcattctgtagaccatgggccactattgaagttttgcattttggaaggagcttattagtttgttttcctgttgattatagtagtaatgcagtatcagggtagctgaactgcaataataatcccaacatctcactggcttcatgcagtaggaatatgctttcatcacagtccagtatggcaggcaacctccagactcccagggacccaaacttacactttactaaatgtaattctttcatttgaatttttaaaggtttttgtataatcatcttagtaaaacatttgataattcttca

SEQ ID NO: 143082 - DNA, 1888 bp, Homo sapiens
  Payload ID: 8275
  Gene Symbol: ITM2C
  Gene Name: integral membrane protein 2C
  Uniprot ID: Q9NQX7
  ENST ID: ENST00000326407
  CDS Start-End: 47-739
ctgcaccggcagaggctgcggggcggacgcgcgggccggcgcagccatggtgaagattagcttccagcccgccgtggctggcatcaagggcgacaaggctgacaaggcgtcggcgtcggcccctgcgccggcctcggccaccgagatcctgctgacgccggctagggaggagcagcccccacaacatcgatccaagagggggggctcagtgggcggcgtgtgctacctgtcgatgggcatggtcgtgctgctcatgggcctcgtgttcgcctctgtctacatctacagatacttcttccttgcgcagctggcccgagataacttcttccgctgtggtgtgctgtatgaggactccctgtcctcccaggtccggactcagatggagctggaagaggatgtgaaaatctacctcgacgagaactacgagcgcatcaacgtgcctgtgccccagtttggcggcggtgaccctgcagacatcatccatgacttccagcggagggggacctacctgccgcagacgtacatcatccaggaggagatggtggtcacggagcatgtcagtgacaaggaggccctggggtccttcatctaccacctgtgcaacgggaaagacacctaccggctccggcgccgggcaacgcggaggcggatcaacaagcgtggggccaagaactgcaatgccatccgccacttcgagaacaccttcgtggtggagacgctcatctgcggggtggtgtgaggccctcctcccccagaaccccctgccgtgttcctcttttcttctttccggctgctctctggccctcctccttccccctgcttagcttgtactttggacgcgtttctatagaggtgacatgtctctccattcctctccaaccctgcccacctccctgtaccagagctgtgatctctcggtggggggcccatctctgctgacctgggtgtggcggagggagaggcgatgctgcaaagtgttttctgtgtcccactgtcttgaagctgggcctgccaaagcctgggcccacagctgcaccggcagcccaaggggaaggaccggttgggggagccgggcatgtgaggccctgggcaaggggatggggctgtgggggcggggcggcatgggcttcagaagtatctgcacaattagaaaagtcctcagaagctttttcttggagggtacactttcttcactgtccctattcctagacctggggcttgagctgaggatgggacgatgtgcccagggagggacccaccagagcacaagagaaggtggctacctgggggtgtcccagggactctgtcagtgccttcagcccaccagcaggagcttggagtttggggagtggggatgagtccgtcaagcacaactgttctctgagtggaaccaaagaagcaaggagctaggacccccagtcctgccccccaggagcacaagcagggtcccctcagtcaaggcagtgggatgggcggctgaggaacggggcaggcaaggtcactgctcagtcacgtccacgggggacgagccgtgggttctgctgagtaggtggagctcattgctttctccaagcttggaactgttttgaaagataacacagagggaaagggagagccacctggtacttgtccaccctgcctcctctgttctgaaattccatccccctcagcttaggggaatgcacctttttccctttccttctcacttttgcatgtttttactgatcattcgatatgctaaccgttctcagccctgagccttggagaggagggctgtaacgccttcagtcagtctctggggatgaaactcttaaatgctttgtatattttctcaattagatctcttttcagaagtgtctatagaacaataaaaatcttttacttctga

SEQ ID NO: 143083 - DNA, 2078 bp, Homo sapiens
  Payload ID: 8275
  Gene Symbol: ITM2C
  Gene Name: integral membrane protein 2C
  Uniprot ID: Q9NQX7
  ENST ID: ENST00000326427
  CDS Start-End: 127-930
ggggttagagagagggacgcgagcgggatccaaacttccggtgcctgcagagctcggagcggcggaggcagagaccgaggctgcaccggcagaggctgcggggcggacgcgcgggccggcgcagccatggtgaagattagcttccagcccgccgtggctggcatcaagggcgacaaggctgacaaggcgtcggcgtcggcccctgcgccggcctcggccaccgagatcctgctgacgccggctagggaggagcagcccccacaacatcgatccaagagggggggctcagtgggcggcgtgtgctacctgtcgatgggcatggtcgtgctgctcatgggcctcgtgttcgcctctgtctacatctacagatacttcttccttgcgcagctggcccgagataacttcttccgctgtggtgtgctgtatgaggactccctgtcctcccaggtccggactcagatggagctggaagaggatgtgaaaatctacctcgacgagaactacgagcgcatcaacgtgcctgtgccccagtttggcggcggtgaccctgcagacatcatccatgacttccagcggggtctgactgcgtaccatgatatctccctggacaagtgctatgtcatcgaactcaacaccaccattgtgctgccccctcgcaacttctgggagctcctcatgaacgtgaagagggggacctacctgccgcagacgtacatcatccaggaggagatggtggtcacggagcatgtcagtgacaaggaggccctggggtccttcatctaccacctgtgcaacgggaaagacacctaccggctccggcgccgggcaacgcggaggcggatcaacaagcgtggggccaagaactgcaatgccatccgccacttcgagaacaccttcgtggtggagacgctcatctgcggggtggtgtgaggccctcctcccccagaaccccctgccgtgttcctcttttcttctttccggctgctctctggccctcctccttccccctgcttagcttgtactttggacgcgtttctatagaggtgacatgtctctccattcctctccaaccctgcccacctccctgtaccagagctgtgatctctcggtggggggcccatctctgctgacctgggtgtggcggagggagaggcgatgctgcaaagtgttttctgtgtcccactgtcttgaagctgggcctgccaaagcctgggcccacagctgcaccggcagcccaaggggaaggaccggttgggggagccgggcatgtgaggccctgggcaaggggatggggctgtgggggcggggcggcatgggcttcagaagtatctgcacaattagaaaagtcctcagaagctttttcttggagggtacactttcttcactgtccctattcctagacctggggcttgagctgaggatgggacgatgtgcccagggagggacccaccagagcacaagagaaggtggctacctgggggtgtcccagggactctgtcagtgccttcagcccaccagcaggagcttggagtttggggagtggggatgagtccgtcaagcacaactgttctctgagtggaaccaaagaagcaaggagctaggacccccagtcctgccccccaggagcacaagcagggtcccctcagtcaaggcagtgggatgggcggctgaggaacggggcaggcaaggtcactgctcagtcacgtccacgggggacgagccgtgggttctgctgagtaggtggagctcattgctttctccaagcttggaactgttttgaaagataacacagagggaaagggagagccacctggtacttgtccaccctgcctcctctgttctgaaattccatccccctcagcttaggggaatgcacctttttccctttccttctcacttttgcatgtttttactgatcattcgatatgctaaccgttctcagccctgagccttggagaggagggctgtaacgccttcagtcagtctctggggatgaaactcttaaatgctttgtatattttctcaattagatctcttttcagaagtgtctatagaacaataaaaatcttttacttctg

SEQ ID NO: 143084 - DNA, 1889 bp, Homo sapiens
  Payload ID: 8275
  Gene Symbol: ITM2C
  Gene Name: integral membrane protein 2C
  Uniprot ID: Q9NQX7
  ENST ID: ENST00000335005
  CDS Start-End: 79-741
agagctcggagcggcggaggcagagaccgaggctgcaccggcagaggctgcggggcggacgcgcgggccggcgcagccatggtgaagattagcttccagcccgccgtggctggcatcaagggcgacaaggctgacaaggcgtcggcgtcggcccctgcgccggcctcggccaccgagatcctgctgacgccggctaggctggcccgagataacttcttccgctgtggtgtgctgtatgaggactccctgtcctcccaggtccggactcagatggagctggaagaggatgtgaaaatctacctcgacgagaactacgagcgcatcaacgtgcctgtgccccagtttggcggcggtgaccctgcagacatcatccatgacttccagcggggtctgactgcgtaccatgatatctccctggacaagtgctatgtcatcgaactcaacaccaccattgtgctgccccctcgcaacttctgggagctcctcatgaacgtgaagagggggacctacctgccgcagacgtacatcatccaggaggagatggtggtcacggagcatgtcagtgacaaggaggccctggggtccttcatctaccacctgtgcaacgggaaagacacctaccggctccggcgccgggcaacgcggaggcggatcaacaagcgtggggccaagaactgcaatgccatccgccacttcgagaacaccttcgtggtggagacgctcatctgcggggtggtgtgaggccctcctcccccagaaccccctgccgtgttcctcttttcttctttccggctgctctctggccctcctccttccccctgcttagcttgtactttggacgcgtttctatagaggtgacatgtctctccattcctctccaaccctgcccacctccctgtaccagagctgtgatctctcggtggggggcccatctctgctgacctgggtgtggcggagggagaggcgatgctgcaaagtgttttctgtgtcccactgtcttgaagctgggcctgccaaagcctgggcccacagctgcaccggcagcccaaggggaaggaccggttgggggagccgggcatgtgaggccctgggcaaggggatggggctgtgggggcggggcggcatgggcttcagaagtatctgcacaattagaaaagtcctcagaagctttttcttggagggtacactttcttcactgtccctattcctagacctggggcttgagctgaggatgggacgatgtgcccagggagggacccaccagagcacaagagaaggtggctacctgggggtgtcccagggactctgtcagtgccttcagcccaccagcaggagcttggagtttggggagtggggatgagtccgtcaagcacaactgttctctgagtggaaccaaagaagcaaggagctaggacccccagtcctgccccccaggagcacaagcagggtcccctcagtcaaggcagtgggatgggcggctgaggaacggggcaggcaaggtcactgctcagtcacgtccacgggggacgagccgtgggttctgctgagtaggtggagctcattgctttctccaagcttggaactgttttgaaagataacacagagggaaagggagagccacctggtacttgtccaccctgcctcctctgttctgaaattccatccccctcagcttaggggaatgcacctttttccctttccttctcacttttgcatgtttttactgatcattcgatatgctaaccgttctcagccctgagccttggagaggagggctgtaacgccttcagtcagtctctggggatgaaactcttaaatgctttgtatattttctcaattagatctcttttcagaagtgtctatagaacaataaaaatcttttacttctg

SEQ ID NO: 143085 - DNA, 1106 bp, Homo sapiens
  Payload ID: 8275
  Gene Symbol: ITM2C
  Gene Name: integral membrane protein 2C
  ENST ID: ENST00000409704
  CDS Start-End: 203-820
gttgggaagtctcgaatggttgcttatcccagaatgaggagggggcttaagtcccgtactaaagcggcagccaaaagctgaagtccgaagagtgggaggcgtctggttctggtcttcaggtggagaagtgctcgaggaggagcagcccccacaacatcgatccaagagggggggctcagtgggcggcgtgtgctacctgtcgatgggcatggtcgtgctgctcatgggcctcgtgttcgcctctgtctacatctacagatacttcttccttgcgcagctggcccgagataacttcttccgctgtggtgtgctgtatgaggactccctgtcctcccaggtccggactcagatggagctggaagaggatgtgaaaatctacctcgacgagaactacgagcgcatcaacgtgcctgtgccccagtttggcggcggtgaccctgcagacatcatccatgacttccagcggggtctgactgcgtaccatgatatctccctggacaagtgctatgtcatcgaactcaacaccaccattgtgctgccccctcgcaacttctgggagctcctcatgaacgtgaagagggggacctacctgccgcagacgtacatcatccaggaggagatggtggtcacggagcatgtcagtgacaaggaggccctggggtccttcatctaccacctgtgcaacgggaaagacacctaccggctccggcgccgggcaacgcggaggcggatcaacaagcgtggggccaagaactgcaatgccatccgccacttcgagaacaccttcgtggtggagacgctcatctgcggggtggtgtgaggccctcctcccccagaaccccctgccgtgttcctcttttcttctttccggctgctctctggccctcctccttccccctgcttagcttgtactttggacgcgtttctatagaggtgacatgtctctccattcctctccaaccctgcccacctccctgtaccagagctgtgatctctcggtggggggcccatctctgctgacctgggtgtggcggagggagaggcgatgctgcaaagtgttttctgtgtcccactgtcttgaagctgggcctgccaaagcctgggcc

SEQ ID NO: 143086 - DNA, 763 bp, Homo sapiens
  Payload ID: 8275
  Gene Symbol: ITM2C
  Gene Name: integral membrane protein 2C
  ENST ID: ENST00000457215
  CDS Start-End: 223-763
agggaatgcgaagggattatgctacggagaacggatccgagcgtgacggctgaatgaatgagtgagcgagtgagtgagtgagtgagtgagcgagcgagtgagtgactgtgcgagcgagcggcagaaggaactccgacccgccccagagctcggagcggcggaggcagagaccgaggctgcaccggcagaggctgcggggcggacgcgcgggccggcgcagccatggtgaagattagcttccagcccgccgtggctggcatcaagggcgacaaggctgacaaggcgtcggcgtcggcccctgcgccggcctcggccaccgagatcctgctgacgccggctagggaggagcagcccccacaacatcgatccaagagggggggctcagtgggcggcgtgtgctacctgtcgatgggcatggtcgtgctgctcatgggcctcgtgttcgcctctgtctacatctacagatacttcttccttgcgcagctggcccgagataacttcttccgctgtggtgtgctgtatgaggactccctgtcctcccaggtccggactcagatggagctggaagaggatgtgaaaatctacctcgacgagaactacgagcgcatcaacgtgcctgtgccccagtttggcggcggtgaccctgcagacatcatccatgacttccagcggggtctgactgcgtaccatgatatctccctggacaagtgctatgtcatcgaactcaacaccaccattgtgctgccccctcgcaacttctggg

SEQ ID NO: 143087 - DNA, 563 bp, Homo sapiens
  Payload ID: 8275
  Gene Symbol: ITM2C
  Gene Name: integral membrane protein 2C
  ENST ID: ENST00000418408
  CDS Start-End: 189-563
gaaattgggggctgcgagggacagaggatgtgctgctggcctgcaccggaattgacagaccagaaagtgatgaaatggaaatcagccagaaccgacggcgctgcggcctctggacgtcgggggaggagcagcccccacaacatcgatccaagagggggggctcagtgggcggcgtgtgctacctgtcgatgggcatggtcgtgctgctcatgggcctcgtgttcgcctctgtctacatctacagatacttcttccttgcgcagctggcccgagataacttcttccgctgtggtgtgctgtatgaggactccctgtcctcccaggtccggactcagatggagctggaagaggatgtgaaaatctacctcgacgagaactacgagcgcatcaacgtgcctgtgccccagtttggcggcggtgaccctgcagacatcatccatgacttccagcggggtctgactgcgtaccatgatatctccctggacaagtgctatgtcatcgaactcaacaccaccattgtgctgccccctcgcaacttctgggagctcctcatgaacgtgaag

SEQ ID NO: 143088 - DNA, 572 bp, Homo sapiens
  Payload ID: 8275
  Gene Symbol: ITM2C
  Gene Name: integral membrane protein 2C
  ENST ID: ENST00000541852
  CDS Start-End: 198-572
attatgctacggagaacggatccgagcgtgacggctgaatgaatgagtgagcgagtgagtgagtgagtgagtgagcgagcgagtgagtgactgtgcgagcgagcggcagaaggaactccgacccgccccaggaggagcagcccccacaacatcgatccaagagggggggctcagtgggcggcgtgtgctacctgtcgatgggcatggtcgtgctgctcatgggcctcgtgttcgcctctgtctacatctacagatacttcttccttgcgcagctggcccgagataacttcttccgctgtggtgtgctgtatgaggactccctgtcctcccaggtccggactcagatggagctggaagaggatgtgaaaatctacctcgacgagaactacgagcgcatcaacgtgcctgtgccccagtttggcggcggtgaccctgcagacatcatccatgacttccagcggggtctgactgcgtaccatgatatctccctggacaagtgctatgtcatcgaactcaacaccaccattgtgctgccccctcgcaacttctgggagctcctcatgaacgtgaag

SEQ ID NO: 143089 - DNA, 573 bp, Homo sapiens
  Payload ID: 8275
  Gene Symbol: ITM2C
  Gene Name: integral membrane protein 2C
  ENST ID: ENST00000543957
  CDS Start-End: 206-573
agagcccggggtggagcagggttgggaagtctcgaatggttgcttatcccagaatgaggagggggcttaagtcccgtactaaagcggcagccaaaagctgaagtccgaagagtgggaggcgtctggttctggtcttcaggaggagcagcccccacaacatcgatccaagagggggggctcagtgggcggcgtgtgctacctgtcgatgggcatggtcgtgctgctcatgggcctcgtgttcgcctctgtctacatctacagatacttcttccttgcgcagctggcccgagataacttcttccgctgtggtgtgctgtatgaggactccctgtcctcccaggtccggactcagatggagctggaagaggatgtgaaaatctacctcgacgagaactacgagcgcatcaacgtgcctgtgccccagtttggcggcggtgaccctgcagacatcatccatgacttccagcggggtctgactgcgtaccatgatatctccctggacaagtgctatgtcatcgaactcaacaccaccattgtgctgccccctcgcaacttctgggagctcctcatgaa

SEQ ID NO: 143090 - DNA, 501 bp, Homo sapiens
  Payload ID: 8275
  Gene Symbol: ITM2C
  Gene Name: integral membrane protein 2C
  ENST ID: ENST00000620962
  CDS Start-End: 1-501
atgtctctccattcctctccaaccctgcccacctccctgtaccagagctgtgatctctcggtggggggcccatctctgctgacctgggtgtggcggagggagaggcgatgctgcaaagtgttttctgtgtcccactgtcttgaagctgggcctgccaaagcctgggcccacagctgcaccggcagcccaaggggaaggaccggttgggggagccgggcatgtgaggccctgggcaaggggatggggctgtgggggcggggcggcatgggcttcagaagtatctgcacaattagaaaagtcctcagaagctttttcttggagggtacactttcttcactgtccctattcctagacctggggcttgagctgaggatgggacgatgtgcccagggagggacccaccagagcacaagagaaggtggctacctgggggtgtcccagggactctgtcagtgccttcagcccaccagcaggagcttggagtttggggagtggggatga

SEQ ID NO: 143091 - DNA, 6959 bp, Homo sapiens
  Payload ID: 8276
  Gene Symbol: INTS1
  Gene Name: integrator complex subunit 1
  Uniprot ID: Q8N201
  ENST ID: ENST00000404767
  CDS Start-End: 87-6659
gtggccgggtggcggcggcggcgctccggtcgcgatgggccagaggtgacgccgcagccgccgggagccgcgagggacggggcaggatgaaccgggccaagcccaccacggtgcgccggcccagcgccgcggccaaaccctcagggcaccctcccccaggagacttcattgctctgggctcaaagggtcaggccaatgaatcgaaaacggcgtccaccctgctgaagccagccccttccggcctgccttctgagcgcaagcgggatgcggcggccgcgttgtccagtgcctcggccctcaccggtctcaccaaacgccccaaactctcctccacaccccctctgagtgccctggggcgcctggctgaggctgcagtggcagaaaaacgagccatttctccgtcgattaaagagccatctgtggtgccaattgaagtgctgcccacggtgctgctggatgagatcgaggcggccgagctggagggcaacgatgacaggatcgagggcgtgctgtgcggggccgtgaagcagctgaaggtcacccgcgccaagcctgacagcaccctctacctgagcctcatgtacctggccaagatcaagcccaacatcttcgccactgagggcgtcattgaggctctgtgtagcctcctgcggcgggacgcctccatcaacttcaaggccaaggggaacagcctggtgtctgtgctggcctgtaacctcctcatggccgcctacgaggaggacgagaactggcccgagatctttgtcaaggtgtacatcgaggactccctgggggagcggatctgggtggacagccctcactgtaagacgtttgtggacaacatccagacggccttcaacaccagaatgccccccaggagcgtgctgctgcagggggaggcgggccgcgttgcgggcgacctgggtgcagggagcagcccacacccctccctcacggaggaggaggacagccagacggagttgctgatcgcggaggagaagctgagccccgagcaggagggccagctcatgcccaggtacgaagagctcgcggagagcgtggaggagtatgtcctggacatgctgcgggaccagctgaaccggcgccagcccatcgacaacgtctccaggaacctcctgcggctcctcacctccacctgcggctataaggaggtgcggctgctggcggtgcagaagctggagatgtggctgcagaaccccaagctgacccggccggcccaggacctgctgatgtccgtctgcatgaactgcaacacgcacggttccgaagacatggacgtcatctcacacctgatcaagatccgcctcaagcccaaggtcctcctcaaccacttcatgctgtgcatcagggagctgctgagcgcgcacaaggacaacctgggcaccaccatcaagttggtgatcttcaatgagctctccagcgcccggaacccgaacaacatgcaggtcctctataccgcactgcagcacagctcagagctggcgcccaagttcctggccatggtgttccaggacctgctgaccaacaaggacgactacctgcgggcctcgcgggccctgctgcgggagatcatcaagcagaccaagcacgagatcaacttccaggccttctgcctggggctcatgcaggagcgcaaggagccgcagtacctggagatggagttcaaggagcgcttcgtggtgcacatcaccgacgtcctggccgtgtccatgatgctgggcatcacagcgcaggtgaaggaggccggcatcgcctgggacaaaggagaaaagaggaacctggaagtgctccgctcattccagaaccagattgccgccatccagcgggatgccgtctggtggctccacactgtggtcccctccatcagcaagctcgcccctaaggactacgtgcactgcctgcacaaggtgctgttcacagagcagccggagacctactacaagtgggacaactggccacccgagagtgaccgcaacttcttcctgcgtctgtgctccgaggtgcccattttggaggacacgctgatgcgcatcctggtcatcgggctgtcccgggagctcccgctcgggcctgcggacgccatggagcttgctgaccacctggtgaagcgggcggctgccgtgcaggcggatgatgtggaggtgctgaaggtggggaggacccagctgatcgacgccgttctgaatctgtgcacctaccatcaccctgaaaacatccagctcccaccggggtaccagcctccgaacctcgccatctctaccctctactggaaggcctggcccctcctgctggtcgtcgccgcattcaacccagagaacatcggcctggctgcgtgggaggagtacccgaccctgaagatgctcatggagatggtgatgaccaacaactactcctacccaccgtgcaccctgacggatgaggagacccggacggagatgctgaaccgtgagctgcagaccgcccagcgggagaagcaggagatcctggccttcgaggggcacctggcggccgcgtccaccaagcagaccatcactgagagcagcagcctcctcctgtcgcagctcaccagcctggacccccaggggcccccccggaggcctccccctcacatcctggatcaagtgaaaagcctcaaccagtccctccgcctcgggcacctcttgtgccgcagccgaaaccctgactttctcctccacatcatccagcggcaggcctcctcgcagtccatgccctggctggcggacctggtacagtccagcgagggctccctggacgtgctgcccgtgcagtgtctgtgcgagttcctgctgcacgatgctgtggacgatgctgcttccggggaggaggacgacgagggcgagagcaaggagcagaaggccaagaagcggcagaggcaacagaagcagcggcagctgctgggccgcctgcaggacctgctactgggcccgaaggctgatgagcagaccacgtgtgaggtgctggactacttcttgcggcgcctcggctcctcccaggtggcctcccgcgtgctggccatgaagggtttgtcgctggtgctttcggagggcagcctgcgggacggggaggagaaggagccccccatggaggaggatgtgggggacacagatgtgctgcagggctatcagtggctgctgcgggacctgcctcgcctgcctctgttcgacagcgtcaggagcaccacagccctggccctgcagcaggcaatccacatggagactgatccccagaccatcagcgcctacctgatctacttgtcccagcacacgcctgtggaggagcaggcccagcacagcgacctggccctggacgtggcccggctggtcgtggagcgctccaccatcatgtcccacctcttctcgaagctctccccgagtgccgcgtcggacgccgtgctgagcgctctgttgtccatcttctcacgctacgtgaggcgcatgcggcagagcaaggagggcgaggaggtctacagctggtcggagtctcaggaccaggtcttcctacgctggagcagcggggagacagccaccatgcacatcctcgtggtccatgccatggtgatcctgctgacgctgggcccgcctcgagccgacgacagcgagttccaggcgctgctggacatctggtttccggaggagaagccactgcccaccgccttcctggtggacacatcggaggaggcgctgctgcttcctgactggctgaagctgcgcatgatccgttctgaggtgctccgcctggtggacgccgccctgcaggacctggagccgcagcagctgctgctgttcgtgcagtcgtttggcatccccgtgtccagcatgagcaaactcctccagttcctggaccaggcagtggcccacgacccccagactctggagcagaacatcatggacaagaattacatggcccacctggtggaggtccagcatgagcgcggcgcctccggaggccagactttccactccttgctcacagcctccctgccgccccgccgagacagcacagaggcacccaaaccaaagagcagcccagagcagcccataggccagggccggattcgggtggggacccagctccgggtgctgggccctgaggacgacctggctggcatgttcctccagattttcccgctcagcccggaccctcggtggcagagctccagtccccgccccgtggccctcgccctgcagcaggccctgggccaggagctggcccgcgtcgtccagggcagccccgaggtgccgggcatcacggtgcgtgtcctgcaggccctcgccaccctgctcagctccccacacggcggtgccctggtgatgtccatgcaccgtagccacttcctggcctgcccgctgctgcgccagctctgccagtaccagcgctgtgtgccacaggacaccggcttctcctcgctcttcctgaaggtgctcctgcagatgctgcagtggctggacagccctggcgtggagggcgggcccctgcgggcacagctcaggatgcttgccagccaggcctcagccgggcgcaggctcagtgatgtgcgaggggggctcctgcgcctggccgaggccctggccttccgtcaggacctggaggtggtcagctccaccgtccgtgccgtcatcgccaccctgaggtctggggagcagtgcagcgtggagccggacctgatcagcaaagtcctccaggggctgatcgaggtgaggtccccccacctggaggagctgctgactgcattcttctctgccactgcggatgctgcctccccgtttccagcctgtaagcccgttgtggtggtgagctccctgctgctgcaggaggaggagcccctggctggggggaagccgggtgcggacggtggcagcctggaggccgtgcggctggggccctcgtcaggcctcctagtggactggctggaaatgctggaccccgaggtggtcagcagctgccccgacctgcagctcaggctgctcttctcccggaggaagggcaaaggtcaggcccaggtgccctcgttccgtccctacctcctgaccctcttcacgcatcagtccagctggcccacactgcaccagtgcatccgagtcctgctgggcaagagccgggaacagaggttcgacccctctgcctctctggacttcctctgggcctgcatccatgttcctcgcatctggcaggggcgggaccagcgcaccccgcagaagcggcgggaggagctggtgctgcgggtccagggcccggagctcatcagcctggtggagctgatcctggccgaggcggagacgcggagccaggacggggacacagccgcctgcagcctcatccaggcccggctgcccctgctgctcagctgctgctgtggggacgatgagagtgtcaggaaggtgacggagcacctgtcaggctgcatccagcagtggggagacagcgtgctgggcaggcgctgccgagaccttctcctgcagctctacctacagcggccggagctgcgggtgcccgtgcctgaggtcctactgcacagcgaaggggctgccagcagcagcgtctgcaagctggacggactcatccaccgcttcatcacgctccttgcggacaccagcgactcccgggcgttggagaaccgaggggcggatgccagcatggcctgccggaagctggcggtggcgcacccgctgctgctgctcaggcacctgcccatgatcgcggcgctcctgcacggccgcacccacctcaacttccaggagttccggcagcagaaccacctgagctgcttcctgcacgtgctgggcctgctggagctgctgcagccgcacgtgttccgcagcgagcaccagggggcgctgtgggactgccttctgtccttcatccgcctgctgctgaattacaggaagtcctcccgccatctggctgccttcatcaacaagtttgtgcagttcatccataagtacattacctacaatgccccagcagccatctccttcctgcagaagcacgccgacccgctccacgacctgtccttcgacaacagtgacctggtgatgctgaaatccctccttgcagggctcagcctgcccagcagggacgacaggaccgaccgaggcctggacgaagagggcgaggaggagagctcagccggctccttgcccctggtcagcgtctccctgttcacccctctgaccgcggccgagatggccccctacatgaaacggctttcccggggccaaacggtggaggatctgctggaggttctgagtgacatagacgagatgtcccggcggagacccgagatcctgagcttcttctcgaccaacctgcagcggctgatgagctcggccgaggagtgttgccgcaacctcgccttcagcctggccctgcgctccatgcagaacagccccagcattgcagccgctttcctgcccacgttcatgtactgcctgggcagccaggactttgaggtggtgcagacggccctccggaacctgcctgagtacgctctcctgtgccaagagcacgcggctgtgctgctccaccgggccttcctggtgggcatgtacggccagatggaccccagcgcgcagatctccgaggccctgaggatcctgcatatggaggccgtgatgtgagcctgtggcagccgacccccctccaagccccggcccgtcccgtccccggggatcctcgaggcaaagcccaggaagcgtgggcgttgctggtctgtccgaggaggtgagggcgccgagccctgaggccaggcaggcccaggagcaatactccgagccctggggtggctccgggccggccgctggcatcaggggccgtccagcaagccctcattcaccttctgggccacagccctgccgcggagcggcggatccccccgggcatggcctgggctggttttgaatgaaacgacctgaactgtc

SEQ ID NO: 143092 - DNA, 386 bp, Homo sapiens
  Payload ID: 8276
  Gene Symbol: INTS1
  Gene Name: integrator complex subunit 1
  ENST ID: ENST00000483196
  CDS Start-End: 1-386
ctgaaatccctccttgcagggctcagcctgcccagcagggacgacaggaccgaccgaggcctggacgaagagggcgaggaggagagctcagccggctccttgcccctggtcagcgtctccctgttcacccctctgaccgcggccgagatggccccctacatgaaacggctttcccggggccaaacggtggagggtgagtcaggccctgcttcacccacgccagatctgctggaggttctgagtgacatagacgagatgtcccggcggagacccgagatcctgagcttcttctcgaccaacctgcagcggctgatgagctcggccgaggagtgttgccgcaacctcgccttcagcctggccctgcgctccatgcagaacagccccag

SEQ ID NO: 143093 - DNA, 2804 bp, Homo sapiens
  Payload ID: 8277
  Gene Symbol: INTS10
  Gene Name: integrator complex subunit 10
  Uniprot ID: Q9NVR2
  ENST ID: ENST00000397977
  CDS Start-End: 399-2531
aaactgagcaatacccagagaggatggaaatggcgaagaggcctggcgcctgcccgctcccgcgcatgctccctgacttcaccaaggtcacgctgcagcccgcaggaatgaaaatccacttctccgcattttcgaggtgacctggaagcggttcaactgctctggcttctcagaagaggaggggaccgggcggtaacgaggagccaaggggaggagactgctcgcaaaacccggaaaagctttcccgatccactctgccagcctccgtgcgcctccagacatgcgcagtagcctcccccgcggtggcggcggcggcggcggtggctgccgtggcggctgagagtccagagccggacgttccggccgcttcgggctggcggctggagagcgctcgggtcatgtctgcccagggggactgcgagttcctggtgcagcgagcccgggagttggtgccgcaagacctgtgggcagccaaggcgtggctgatcacggcccgcagcctctacccggcagactttaacatccagtatgagatgtacaccatcgagcggaatgcagagcggaccgccaccgccgggaggctgctgtacgacatgtttgtgaatttcccagaccagccggtggtgtggagagaaatcagcattattacatcagcattaaggaacgattcacaggacaaacaaacccaatttttaagaagtttatttgaaactcttcctggtcgggtccagtgtgaaatgttactaaaggtcacggaacaatgcttcaacacgttagaacgatcagaaatgttgcttctacttttgaggcgcttccctgaaacggtggtgcagcatggggttggccttggggaggcactattagaggctgaaactattgaagaacaagaatctccagtgaactgctttagaaaattatttgtttgtgatgtccttcctctaataattaacaaccatgatgttcgattacctgccaatttattgtataagtacttgaacaaagcagctgaattttatatcaattatgtcactaggtctactcaaatagaaaatcagcatcaaggcgcccaggatacatctgatttaatgtcacctagcaaacgtagctctcagaagtacataatagaagggctgacggaaaaatcatcccagatcgtggacccttgggagaggttgtttaagattttgaatgttgttggaatgagatgtgaatggcagatggataaaggaagacgaagctatggagatattttgcatagaatgaaggatctctgcagatacatgaacaactttgatagtgaagcacatgcaaaatataaaaaccaagtggtgtattccaccatgctggtcttctttaagaatgcattccagtatgtcaacagcatacagccatctctcttccaaggtcctaatgccccgagccaagttccactggttcttcttgaagatgtatcgaatgtgtatggtgatgtagaaattgatcgtaataaacacatccataaaaagaggaaactagctgaaggaagagaaaaaaccatgagttcagacgatgaagactgttcggcgaaaggaagaaatcgtcacattgtagtcaataaagccgaacttgctaactccactgaagtgttagaaagctttaaattggccagggagagctgggagttgctctattccctagaattccttgacaaagaatttacaaggatttgcttggcctggaagacggatacttggctttggttaagaatcttcctcactgatatgatcatctatcagggtcaatataaaaaggcgatagccagcctgcatcacttagcagctctccagggatccatttctcagccacagatcacagggcaggggaccctggagcatcagagggcgctcatccagctggcgacgtgccactttgcgctaggggagtacagaatgacatgtgaaaaagtccttgatttgatgtgctacatggtactccccattcaagatggaggcaaatcccaggaggaaccctcgaaagtaaagcccaaatttagaaaaggttcggatctgaagctcctgccttgtaccagcaaggctatcatgccatactgcctccatttaatgttagcctgttttaagcttagagctttcacagacaacagagacgacatggcattggggcatgtgattgtgttgcttcagcaagagtggccacggggcgagaatcttttcctgaaagctgtcaataaaatttgccaacaaggaaatttccaatatgagaattttttcaattacgttacaaatattgatatgctggaggaatttgcctacttgagaactcaggaaggtgggaaaattcatctggaattactacccaatcaaggaatgctgatcaagcaccacactgtaactcgaggcatcaccaaaggcgtgaaggaggactttcgcctggccatggagcgccaggtctcccgctgtggagagaatctgatggtggttctgcacaggttctgcattaatgagaagatcttgctccttcagactctgacctgagtggagacctttccaccagacacagctcgggcctgtgtaattgtaggagaagacactcagcagtgattgccatggcacagagccgtggtcattgttgctgttacaaagaagaaaaccatctgagttctaactccttggttgcttaaaagtagttcccaagagtctgagaagctatttctatttttaagagtcattttttgtaatttttgtaaaacaaaagtaccaatctgttttgtaaataaaaatcatcctaaaatttgaagtttttaaaaa

SEQ ID NO: 143094 - DNA, 528 bp, Homo sapiens
  Payload ID: 8277
  Gene Symbol: INTS10
  Gene Name: integrator complex subunit 10
  ENST ID: ENST00000523869
  CDS Start-End: 1-164
gggagttggtgccgcaagacctgtgggcagccaaggcgtggctgatcacggcccgcagcctctacccggcagactttaacatccagtatgagatgtacaccatcgagcggaatgcagagcggaccgccaccgccgggaggctgctgtacgacatgtttatttgaaactcttcctggtcgggtccagtgtgaaatgttactaaaggtcacggaacaatgcttcaacacgttagaacgatcagaaatgttgcttctacttttgaggcgcttccctgaaacggtggtgcagcatggggttggccttggggaggcactattagaggctgaaactattgaagaacaagaatctccagtgaactgctttagaaaattatttgtttgtgatgtccttcctctaataattaacaaccatgatgttcgattacctgccaatttattgtataagtacttgaacaaagcagctgaattttatatcaattatgtcactaggtctactcaaatagaaaatcagcatcaaggtaagtaggaa

SEQ ID NO: 143095 - DNA, 572 bp, Homo sapiens
  Payload ID: 8277
  Gene Symbol: INTS10
  Gene Name: integrator complex subunit 10
  ENST ID: ENST00000521008
  CDS Start-End: 1-88
gtgctacatggtactccccattcaagatggaggcaaatcccaggaggaaccctcgaaagtaaagcccaaatttagaaaagggtcatgagtttcaaccagaaattttcttttttaatgagatagaattcaataatattttaagacgacatctcagacaagaagagagactgttattccatgcaccttttgttttggatctatcacattatgttcggatctgaagctcctgccttgtaccagcaaggctatcatgccatactgcctccatttaatgttagcctgttttaagcttagagctttcacagacaacagagacgacatggcattggggcatgtgattgtgttgcttcagcaagagtggccacggggcgagaatcttttcctgaaagctgtcaataaaatttgccaacaaggaaatttccaatatgagaattttttcaattacgttacaaatattgatatgctggaggaatttgcctacttgagaactcaggaaggtgggaaaattcatctggaattactacccaatcaaggaatgctgatcaagcaccacactgtaactcgaggcatca

SEQ ID NO: 143096 - DNA, 777 bp, Homo sapiens
  Payload ID: 8277
  Gene Symbol: INTS10
  Gene Name: integrator complex subunit 10
  ENST ID: ENST00000523772
  CDS Start-End: 1-521
gcctccatttaatgttagcctgttttaagcttagagctttcacagacaacagagacgacatggcattggggcatgtgattgtgttgcttcagcaagagtggccacggggcgagaatcttttcctgaaagctgtcaataaaatttgccaacaaggaaatttccaatatgagaattttttcaattacgttacaaatattgatatgctggaggaatttgcctacttgagaactcaggaaggtgggaaaattcatctggaattactacccaatcaaggaatgctgatcaagccttctagccctcccatggggttactgcagcaggaattcttacctgtgcttcagcccagcatacagactgctgacaggcaccacactgtaactcgaggcatcaccaaaggcgtgaaggaggactttcgcctggccatggagcgccaggtctcccgctgtggagagaatctgatggtggttctgcacaggttctgcattaatgagaagatcttgctccttcagactctgacctgagtggagacctttccaccagacacagctcgggcctgtgtaattgtaggagaagacactcagcagtgattgccatggcacagagccgtggtcattgttgctgttacaaagaagaaaaccatctgagttctaactccttggttgcttaaaagtagttcccaagagtctgagaagctatttctatttttaagagtcattttttgtaatttttgtaaaacaaaagtaccaatctgttttgtaaataaaaatcatcctaaaa

SEQ ID NO: 143097 - DNA, 631 bp, Homo sapiens
  Payload ID: 8277
  Gene Symbol: INTS10
  Gene Name: integrator complex subunit 10
  ENST ID: ENST00000520827
  CDS Start-End: 1-125
tgttgcttcagcaagagtggccacggggcgagaatcttttcctgaaagctgtcaataaaatttgccaacaaggaaatttccaatatgagaattttttcaattacgttacaacctgcagatattgatatgctggaggaatttgcctacttgagaactcaggaaggtgggaaaattcatctggaattactacccaatcaaggaatgctgatcaagcaccacactgtaactcgaggcatcaccaaaggcgtgaaggaggactttcgcctggccatggagcgccaggtctcccgctgtggagagaatctgatggtggttctgcacaggttctgcattaatgagaagatcttgctccttcagactctgacctgagtggagacctttccaccagacacagctcgggcctgtgtaattgtaggagaagacactcagcagtgattgccatggcacagagccgtggtcattgttgctgttacaaagaagaaaaccatctgagttctaactccttggttgcttaaaagtagttcccaagagtctgagaagctatttctatttttaagagtcattttttgtaatttttgtaaaacaaaagtaccaatctgttttgtaaataaaaatcatcctaaaatttgaa

SEQ ID NO: 143098 - DNA, 556 bp, Homo sapiens
  Payload ID: 8277
  Gene Symbol: INTS10
  Gene Name: integrator complex subunit 10
  ENST ID: ENST00000518424
  CDS Start-End: 148-348
actctgccagcctccgtgcgcctccagacatgcgcagtagcctcccccgcggtggcggcggcggcggcggtggctgccgtggcggctgagagtccagagccggacgttccggccgcttcgggctggcggctggagagcgctcgggtcatgtctgcccagggggactgcgagttcctggtgcagcgagcccgggagttggtgccgcaagacctgtgggcagccaaggcgtggctgatcacggcccgcagcctctacccggcagactttaacatccagtatgagatgtacaccatcgagcggaatgcagagcggaccgccaccgccgggaggctgctgtacgacatgtgagtgggacgcttgacatcacttttactgcactgaatctctccatgaggttttgtttctctctgcagaagtgggagttgggggaagatcttcaagttcatctatatcttcgatacctaaagcaaacctagtttgtgaatttcccagaccagccggtggtgtggagagaaatcagcattattacatcagcattaaggaacgattcacagga

SEQ ID NO: 143099 - DNA, 623 bp, Homo sapiens
  Payload ID: 8277
  Gene Symbol: INTS10
  Gene Name: integrator complex subunit 10
  ENST ID: ENST00000520670
  CDS Start-End: 1-311
tgacatgtgaaaaagtccttgatttgatgtgctacatggtactccccattcaagatggaggcaaatcccaggaggaaccctcgaaagtaaagcccaaatttagaaaaggttcggatctgaagctcctgccttgtaccagcaaggctatcatgccatactgcctccatttaatgttagcctgttttaaggcaccacactgtaactcgaggcatcaccaaaggcgtgaaggaggactttcgcctggccatggagcgccaggtctcccgctgtggagagaatctgatggtggttctgcacaggttctgcattaatgagaagatcttgctccttcagactctgacctgagtggagacctttccaccagacacagctcgggcctgtgtaattgtaggagaagacactcagcagtgattgccatggcacagagccgtggtcattgttgctgttacaaagaagaaaaccatctgagttctaactccttggttgcttaaaagtagttcccaagagtctgagaagctatttctatttttaagagtcattttttgtaatttttgtaaaacaaaagtaccaatctgttttgtaaataaaaatcatcctaaaatttgaagtttttaaaaatttaa

SEQ ID NO: 143100 - DNA, 457 bp, Homo sapiens
  Payload ID: 8277
  Gene Symbol: INTS10
  Gene Name: integrator complex subunit 10
  ENST ID: ENST00000518799
  CDS Start-End: 1-457
gagctgggagttgctctattccctagaattccttgacaaagaatttacaaggatttgcttggcctggaagacggatacttggctttggttaagaatcttcctcactgatatgatcatctatcagggtcaatataaaaaggcgatagccagcctgcatcacttagcagctctccagggatccatttctcagccacagatcacagggcaggggaccctggagcatcagagggcgctcatccagctggcgacgtgccactttgcgctaggggagtacagaatgacatgtgaaaaagtccttgatttgatgtgctacatggtactccccattcaagatggaggcaaatcccaggaggaaccctcgaaagtaaagcccaaatttagaaaagatattgatatgctggaggaatttgcctacttgagaactcaggaaggtgggaaaattcatctggaattacta

SEQ ID NO: 143101 - DNA, 704 bp, Homo sapiens
  Payload ID: 8277
  Gene Symbol: INTS10
  Gene Name: integrator complex subunit 10
  ENST ID: ENST00000523846
  CDS Start-End: 1-704
aattttatatcaattatgtcactaggtctactcaaatagaaaatcagcatcaaggcgcccaggatacatctgatttaatgtcacctagcaaacgtagctctcagaagtacataatagaagggctgacggaaaaatcatcccagatcgtggacccttgggagagaagctatggagatattttgcatagaatgaaggatctctgcagatacatgaacaactttgatagtgaagcacatgcaaaatataaaaaccaagtggtgtattccaccatgctggtcttctttaagaatgcattccagtatgtcaacagcatacagccatctctcttccaaggtcctaatgccccgagccaagttccactggttcttcttgaagatgtatcgaatgtgtatggtgatgtagaaattgatcgtaataaacacatccataaaaagaggaaactagctgaaggaagagaaaaaaccatgagttcagacgatgaagactgttcggcgaaaggaagaaatcgtcacattgtagtcaataaagccgaacttgctaactccactgaagtgttagaaagctttaaattggccagggagagctgggagttgctctattccctagaattccttgacaaagaatttacaaggatttgcttggcctggaagacggatacttggctttggttaagaatcttcctcactgatatgatcatctatcag

SEQ ID NO: 143102 - DNA, 876 bp, Homo sapiens
  Payload ID: 8277
  Gene Symbol: INTS10
  Gene Name: integrator complex subunit 10
  ENST ID: ENST00000521357
  CDS Start-End: 1-149
tctgcagatacatgaacaactttgatagtgaagcacatgcaaaatataaaaaccaagtggtgtattccaccatgctggtcttctttaagaatgcattccagtatgtcaacagcatacagccatctctcttccaagagttcagacgatgaagactgttcggcgaaaggaagaaatcgtcacattgtagtcaataaagccgaacttgctaactccactgaagtgttagaaagctttaaattggccagggagagctgggagttgctctattccctagaattccttgacaaagaatttacaaggatttgcttggcctggaagacggatacttggctttggttaagaatcttcctcactgatatgatcatctatcagggtcaatataaaaaggcgatagccagcctgcatcacttagcagctctccagggatccatttctcagccacagatcacagggcaggggaccctggagcatcagagggcgctcatccagctggcgacgtgccactttgcgctaggggagtacagaatgacatgtgaaaaagtccttgatttgatgtgctacatggtactccccattcaagatggaggcaaatcccaggaggaaccctcgaaagtaaagcccaaatttagaaaaggttcggatctgaagctcctgccttgtaccagcaaggctatcatgccatactgcctccatttaatgttagcctgttttaagcttagagctttcacagacaacagagacgacatggcattggggcatgtgattgtgttgcttcagcaagagtggccacggggcgagaatcttttcctgaaagctgtcaataaaatttgccaacaaggaaatttccaatatgagaattttttcaattacgttaca

SEQ ID NO: 143103 - DNA, 623 bp, Homo sapiens
  Payload ID: 8277
  Gene Symbol: INTS10
  Gene Name: integrator complex subunit 10
  ENST ID: ENST00000522114
  CDS Start-End: 102-299
ccgcggtggcggcggcggcggcggtggctgccgtggcggctgagagtccagagccggacgttccggccgcttcgggctggcggctggagagcgctcgggtcatgtctgcccagggggactgcgagttcctggtgcagcgagcccgggagttggtgccgcaagacctgtgggcagccaaggcgtggctgatcacggcccgcagcctctacccggcagactttaacatccaggagggccaacgagcgatgctggatgagctgggagccttctgggcaggggtgagtgaccagggtgcctgatgtgtgttgcagtatgagatgtacaccatcgagcggaatgcagagcggaccgccaccgccgggaggctgctgtacgacatgtttgtgaatttcccagaccagccggtggtgtggagagaaatcagcattattacatcagcattaaggaacgattcacaggacaaacaaacccaatttttaagaagtttatttgaaactcttcctggtcgggtccagtgtgaaatgttactaaaggtcacggaacaatgcttcaacacgttagaacgatcagaaatgttgcttctacttttgaggcgcttccctgaaacggtggtgcagcatggg

SEQ ID NO: 143104 - DNA, 1710 bp, Homo sapiens
  Payload ID: 8278
  Gene Symbol: INTS12
  Gene Name: integrator complex subunit 12
  Uniprot ID: Q96CB8
  ENST ID: ENST00000340139
  CDS Start-End: 216-1604
agggaccaccgggaacagacggatcggcagggcggggcggaacggtgaggccatctactgaaacacagaagcaattttaaaagaaaatggaggaagtataactgatctttgcagaaagtggggaagtgagttgaccagagaaggatgagagaattgccaagttgtactgaacgccaagctgagaatggtgattctgaagatagaatgcgtttgcaatggctgctactgtgaacttggaacttgatcccatttttttgaaagcactaggtttcttgcattcaaagagtaaagattctgctgaaaagctaaaagcactgcttgatgaatctttggctcggggcattgattccagttaccgtccatctcaaaaggatgtggagccacccaaaatttcaagcacaaaaaacatttccattaagcaagagcccaaaatatcatccagtcttccttctggtaataataatggcaaggtcctcacaactgaaaaggtaaagaaggaagctgaaaagagacctgctgataaaatgaaatcagacatcactgaaggagttgatattccaaagaaacctagattggagaaaccagaaacacagtcatctcccattactgtccaaagtagcaaggatttacctatggctgacctttccagttttgaggagaccagtgctgatgattttgccatggagatgggattggcctgcgttgtttgtaggcaaatgatggtggcatctggcaatcaattagtagaatgtcaggagtgccataatctctaccaccgagattgtcataaaccccaggtgacagacaaggaagcgaatgaccctcgcctggtgtggtattgtgcccgatgtaccagacaaatgaaaagaatggctcaaaaaactcagaaaccaccgcagaaaccagcccctgcagttgtttctgtaactccagctgtcaaagatccattggttaagaaaccagaaactaaactgaaacaagagacaacttttctagcgtttaagagaacagaagtcaagacatccacagttatttcaggaaattcttctagtgccagcgtttcctcgtcagtaactagtggcttaactggatgggcagcttttgcagccaaaacttcctctgctggtccttcaacagcaaaattgagttcaacaacacaaaacaatactgggaaacctgctacttcgtcagctaaccagaaacctgtgggtttgactggtctggcaacatcatccaaaggtggaataggttccaaaataggttccaataacagcactacgcccactgtacctttaaaaccacctccacctctaaccttgggtaaaactggccttagtcgctcagttagttgtgacaatgtcagcaaagtaggtcttcctagtccaagtagtttagttccaggaagcagcagccaactaagtgggaatggaaatagtggaacatcaggacctagtggaagtactaccagcaaaactacttcagaatccagcagctctccctcagcatcccttaaaggcccaacttcacaagaatcacagctcaatgctatgaagcgattacagatggtcaagaagaaagctgcccaaaagaaactcaagaagtaatgtggccaagtaggtttttgtatcatattagcctaaagatgaaaggcttattattatgatataatctgtaatacactgtaatttaataaaagtcttcataatcaaa

SEQ ID NO: 143105 - DNA, 1927 bp, Homo sapiens
  Payload ID: 8278
  Gene Symbol: INTS12
  Gene Name: integrator complex subunit 12
  Uniprot ID: Q96CB8
  ENST ID: ENST00000394735
  CDS Start-End: 433-1821
attggaaggggttgcaagagcttgcgaagtcatgaagaacaaagttttttagagccattatgaaatggcaacgataatactgcactctatgtgaacagtttctgtttccttcatctggggcacgtgcatatgatcaactttggacttcttttgagattgccaggaactctgccagacaggggttacaacagtaggcaagaccaatccactgcctgccttcatggaacttacattctaatgagaaagaaagattatttacataattaacagtgtgattaatattacaaataagtacagaatgtttttgggctatgtaacagtgaaacttctagttttgttgagggaatgtgcaggaaaaactgaaacttgagaggtgacttaagatggaggtgggggtggcacactttctactgaagtgctaaggcgtttgcaatggctgctactgtgaacttggaacttgatcccatttttttgaaagcactaggtttcttgcattcaaagagtaaagattctgctgaaaagctaaaagcactgcttgatgaatctttggctcggggcattgattccagttaccgtccatctcaaaaggatgtggagccacccaaaatttcaagcacaaaaaacatttccattaagcaagagcccaaaatatcatccagtcttccttctggtaataataatggcaaggtcctcacaactgaaaaggtaaagaaggaagctgaaaagagacctgctgataaaatgaaatcagacatcactgaaggagttgatattccaaagaaacctagattggagaaaccagaaacacagtcatctcccattactgtccaaagtagcaaggatttacctatggctgacctttccagttttgaggagaccagtgctgatgattttgccatggagatgggattggcctgcgttgtttgtaggcaaatgatggtggcatctggcaatcaattagtagaatgtcaggagtgccataatctctaccaccgagattgtcataaaccccaggtgacagacaaggaagcgaatgaccctcgcctggtgtggtattgtgcccgatgtaccagacaaatgaaaagaatggctcaaaaaactcagaaaccaccgcagaaaccagcccctgcagttgtttctgtaactccagctgtcaaagatccattggttaagaaaccagaaactaaactgaaacaagagacaacttttctagcgtttaagagaacagaagtcaagacatccacagttatttcaggaaattcttctagtgccagcgtttcctcgtcagtaactagtggcttaactggatgggcagcttttgcagccaaaacttcctctgctggtccttcaacagcaaaattgagttcaacaacacaaaacaatactgggaaacctgctacttcgtcagctaaccagaaacctgtgggtttgactggtctggcaacatcatccaaaggtggaataggttccaaaataggttccaataacagcactacgcccactgtacctttaaaaccacctccacctctaaccttgggtaaaactggccttagtcgctcagttagttgtgacaatgtcagcaaagtaggtcttcctagtccaagtagtttagttccaggaagcagcagccaactaagtgggaatggaaatagtggaacatcaggacctagtggaagtactaccagcaaaactacttcagaatccagcagctctccctcagcatcccttaaaggcccaacttcacaagaatcacagctcaatgctatgaagcgattacagatggtcaagaagaaagctgcccaaaagaaactcaagaagtaatgtggccaagtaggtttttgtatcatattagcctaaagatgaaaggcttattattatgatataatctgtaatacactgtaatttaataaaagtcttcataatcaaa

SEQ ID NO: 143106 - DNA, 995 bp, Homo sapiens
  Payload ID: 8278
  Gene Symbol: INTS12
  Gene Name: integrator complex subunit 12
  ENST ID: ENST00000416543
  CDS Start-End: 731-995
cggtgagttatgctgagcgactctgctcctggcctcctggaggctcgagacccccgcgccaggagcgaggtgggagagtagctacgtggggtattagtttcctcgctcctcaaggggaatcataatttacgggcggttgcgtgccctagactgactgctctcccctttcagtgaggactgtgcttcctccgagggagttgcgggccgggacatgcggaccgagcatatttctaggtctagggacaagggacttggaatcctgcctcggactttgtcggagggttttagtgacttctctacgtagctccctcattgtctctcatcttttggctcccctgtcaaggaccatcccccattctaggacttcgatgtgtgatgctttgatcaaaggattgacattccttttctaagtgtttgctgtcagctttcagccacttgattggtttggaatcggagccttttctcctgcgattccaggtgtccctaaggtatcagtgttatccagaaccaagaactcagtggaggaatgaaaaaggcagcatctttaaaataatgtttattggaaggggttgcaagagcttgcgaagtcatgaagaacaaagttttttagagccattatgaaatggcaacgataatactgcactctatgtgaacagtttctgtttccttcatctggggcacgtgcatatgatcaactttggacttcttttgagattgccaggcgtttgcaatggctgctactgtgaacttggaacttgatcccatttttttgaaagcactaggtttcttgcattcaaagagtaaagattctgctgaaaagctaaaagcactgcttgatgaatctttggctcggggcattgattccagttaccgtccatctcaaaaggatgtggagccacccaaaatttcaagcacaaaaaacatttccattaagcaagagcccaaaatatcatccagtcttccttctggtaataataatggcaaggtcctcacaa

SEQ ID NO: 143107 - DNA, 562 bp, Homo sapiens
  Payload ID: 8278
  Gene Symbol: INTS12
  Gene Name: integrator complex subunit 12
  ENST ID: ENST00000433009
  CDS Start-End: 300-562
gaagggaccaccgggaacagacggatcggcagggcggggcggaacggtgtccctaaggtatcagtgttatccagaaccaagaactcagtggaggaatgaaaaaggcagcatctttaaaataatgtttattggaaggggttgcaagagcttgcgaagtcatgaagaacaaagttttttagagccattatgaaatggcaacgataatactgcactctatgtgaacagtttctgtttccttcatctggggcacgtgcatatgatcaactttggacttcttttgagattgccaggcgtttgcaatggctgctactgtgaacttggaacttgatcccatttttttgaaagcactaggtttcttgcattcaaagagtaaagattctgctgaaaagctaaaagcactgcttgatgaatctttggctcggggcattgattccagttaccgtccatctcaaaaggatgtggagccacccaaaatttcaagcacaaaaaacatttccattaagcaagagcccaaaatatcatccagtcttccttctggtaataataatggcaaggtcctcac

SEQ ID NO: 143108 - DNA, 726 bp, Homo sapiens
  Payload ID: 8278
  Gene Symbol: INTS12
  Gene Name: integrator complex subunit 12
  ENST ID: ENST00000420368
  CDS Start-End: 332-726
atcggcagggcggggcggaacggtgaggccatctactgaaacacagaagcaattttaaaagaaaatggaggaagtataactgatctttgcagaaagtggggaagtgagttgaccagagaaggatgagagaattgccaagttgtactgaacgccaagctgagaatggtgattctgaagatagaatatcaacacagttacaccaagttgctgacctctttatgactgctgtagaaagtaaacttctttcactatatggatatttgccggtaaggaaggaaaagtaacagagattagagaaggcaacagaaaagggggagtaaaggcgtttgcaatggctgctactgtgaacttggaacttgatcccatttttttgaaagcactaggtttcttgcattcaaagagtaaagattctgctgaaaagctaaaagcactgcttgatgaatctttggctcggggcattgattccagttaccgtccatctcaaaaggatgtggagccacccaaaatttcaagcacaaaaaacatttccattaagcaagagcccaaaatatcatccagtcttccttctggtaataataatggcaaggtcctcacaactgaaaaggtaaagaaggaagctgaaaagagacctgctgataaaatgaaatcagacatcactgaaggagttgatattccaaagaaacctagattggagaaaccagaaacacagtcatctcccattactgt

SEQ ID NO: 143109 - DNA, 1975 bp, Homo sapiens
  Payload ID: 8278
  Gene Symbol: INTS12
  Gene Name: integrator complex subunit 12
  Uniprot ID: Q96CB8
  ENST ID: ENST00000451321
  CDS Start-End: 481-1869
cgcatcctcagccctgcagacccccgaagaaaagaccagttcttagggggtcgcggaggctgagaagccggcggcccgagcgccctctttacctggtcgcagaggcgcggccaggcagggagggtgcgtgagcgtgtcggcgacctgggccgcctgcgccttcccgcccagtccgagctggaattccaaggctgcctctgggagctgctgcccgcagaccactcgcctccacagacgccaggagaaaaacgacagccaccttatgtggaaaatactcgcgccggccgtcattcataatccggcggaccggaaaaagggaagtaacgtcacttcctactgtcgcactgccaaacgtttcccccgcccctactgtgggaacctttgttttcctgctttcggagccggccagtgcgggaaccgtttccgaagggaccaccgggaacagacggatcggcagggcggggcggaacggcgtttgcaatggctgctactgtgaacttggaacttgatcccatttttttgaaagcactaggtttcttgcattcaaagagtaaagattctgctgaaaagctaaaagcactgcttgatgaatctttggctcggggcattgattccagttaccgtccatctcaaaaggatgtggagccacccaaaatttcaagcacaaaaaacatttccattaagcaagagcccaaaatatcatccagtcttccttctggtaataataatggcaaggtcctcacaactgaaaaggtaaagaaggaagctgaaaagagacctgctgataaaatgaaatcagacatcactgaaggagttgatattccaaagaaacctagattggagaaaccagaaacacagtcatctcccattactgtccaaagtagcaaggatttacctatggctgacctttccagttttgaggagaccagtgctgatgattttgccatggagatgggattggcctgcgttgtttgtaggcaaatgatggtggcatctggcaatcaattagtagaatgtcaggagtgccataatctctaccaccgagattgtcataaaccccaggtgacagacaaggaagcgaatgaccctcgcctggtgtggtattgtgcccgatgtaccagacaaatgaaaagaatggctcaaaaaactcagaaaccaccgcagaaaccagcccctgcagttgtttctgtaactccagctgtcaaagatccattggttaagaaaccagaaactaaactgaaacaagagacaacttttctagcgtttaagagaacagaagtcaagacatccacagttatttcaggaaattcttctagtgccagcgtttcctcgtcagtaactagtggcttaactggatgggcagcttttgcagccaaaacttcctctgctggtccttcaacagcaaaattgagttcaacaacacaaaacaatactgggaaacctgctacttcgtcagctaaccagaaacctgtgggtttgactggtctggcaacatcatccaaaggtggaataggttccaaaataggttccaataacagcactacgcccactgtacctttaaaaccacctccacctctaaccttgggtaaaactggccttagtcgctcagttagttgtgacaatgtcagcaaagtaggtcttcctagtccaagtagtttagttccaggaagcagcagccaactaagtgggaatggaaatagtggaacatcaggacctagtggaagtactaccagcaaaactacttcagaatccagcagctctccctcagcatcccttaaaggcccaacttcacaagaatcacagctcaatgctatgaagcgattacagatggtcaagaagaaagctgcccaaaagaaactcaagaagtaatgtggccaagtaggtttttgtatcatattagcctaaagatgaaaggcttattattatgatataatctgtaatacactgtaatttaataaaagtcttcataatcaaa

SEQ ID NO: 143110 - DNA, 569 bp, Homo sapiens
  Payload ID: 8278
  Gene Symbol: INTS12
  Gene Name: integrator complex subunit 12
  ENST ID: ENST00000515819
  CDS Start-End: 515-569
ggcagggcggggcggaacggtgagttatgctgagcgactctgctcctggcctcctggaggctcgagacccccgcgccaggagcgaggtgggagagtagctacgtggggtattagtttcctcgctcctcaaggggaatcataatttacgggcggttgcgtgccctagactgactgctctcccctttcagtgaggactgtgcttcctccgagggagttgcgggccgggacatgcggaccgagcatatttctaggtctagggacaagggacttggaatcctgcctcggactttgtcggagggttttagtgacttctctacgtagctccctcattgtctctcatcttttggctcccctgtcaaggaccatcccccattctaggacttcgatgtgtgatgctttgatcaaaggattgacattccttttctaagtgtttgctgtcagctttcagccacttgattggtttggaatcggagccttttctcctgcgattccaggtgtccctaaggcgtttgcaatggctgctactgtgaacttggaacttgatcccatttttttgaaagcactaggtt

SEQ ID NO: 143111 - DNA, 542 bp, Homo sapiens
  Payload ID: 8278
  Gene Symbol: INTS12
  Gene Name: integrator complex subunit 12
  ENST ID: ENST00000510876
  CDS Start-End: 371-542
agtcctaattcccgagccggggcgagtcgccctcggggggccgcggatggggtcccagactcgcaagggcgcgccctctccgcctcgggcgggcactcggagccgctggaccgctctcctcgcgccacgctgtgcggtggcccaacttctggatggaggagacgcctctctgaccacgaaaccccgcggggaaaagtgacccaagacagaagaagaccctcaccagatgccagccccttgatcttggacttcctagccttcagaaatgcatcaacgaaaggagagaaggaaaatttagaattacatgatttgaagaaacagtgtgcactttgtcctcatggtgtttgtaaattaagattcattttatataatggtaatgtcaaggcaatcgcaatctcaggcgtttgcaatggctgctactgtgaacttggaacttgatcccatttttttgaaagcactaggtttcttgcattcaaagagtaaagattctgctgaaaagctaaaagcactgcttgatgaatctttggctcggggcattgatt

SEQ ID NO: 143112 - DNA, 653 bp, Homo sapiens
  Payload ID: 8278
  Gene Symbol: INTS12
  Gene Name: integrator complex subunit 12
  ENST ID: ENST00000503746
  CDS Start-End: 176-653
agacggatcggcagggcggggcggaacgatcaacacagttacaccaagttgctgacctctttatgactgctgtagaaagtaaacttctttcactatatggatatttgccggtaaggaaggaaaagtaacagagattagagaaggcaacagaaaagggggagtaaaggcgtttgcaatggctgctactgtgaacttggaacttgatcccatttttttgaaagcactaggtttcttgcattcaaagagtaaagattctgctgaaaagctaaaagcactgcttgatgaatctttggctcggggcattgattccagttaccgtccatctcaaaaggatgtggagccacccaaaatttcaagcacaaaaaacatttccattaagcaagagcccaaaatatcatccagtcttccttctggtaataataatggcaaggtcctcacaactgaaaaggtaaagaaggaagctgaaaagagacctgctgataaaatgaaatcagacatcactgaaggagttgatattccaaagaaacctagattggagaaaccagaaacacagtcatctcccattactgtccaaagtagcaaggatttacctatggctgacctttccagttttgaggagaccagtgctgatgattttgccatggagatgggat

SEQ ID NO: 143113 - DNA, 1502 bp, Homo sapiens
  Payload ID: 8278
  Gene Symbol: INTS12
  Gene Name: integrator complex subunit 12
  ENST ID: ENST00000618810
  CDS Start-End: 12-1346
aggcgtttgcaatggctgctactgtgaacttggaacttgatcccatttttttgaaagcactaggtttcttgcattcaaagagtaaagattctgctgaaaagctaaaagcactgcttgatgaatctttggctcggggcattgattccagttaccgtccatctcaaaaggatgtggagccacccaaaatttcaagcacaaaaaacatttccattaagcaagagcccaaaatatcatccagtcttccttctggtaataataatggcaaggtcctcacaactgaaaaggtaaagaaggaagctgaaaagagacctgctgataaaatgaaatcagacatcactgaaggagttgatattccaaagaaacctagattggagaaaccagaaacacagtcatctcccattactgtccaaagtagcaaggatttacctatggctgacctttccagttttgaggagaccagtgctgatgattttgccatggagatgggattggcctgcgttgtttgtaggcaaatgatggtggcatctggcaatcaattagtagaatgtcaggagtgccataatctctaccaccgagattgtcataaaccccaggtgacagacaaggaagcgaatgaccctcgcctggtgtggtattgtgcccgatgtaccagacaaatgaaaagaatggctcaaaaaactcagaaaccaccgcagaaaccagcccctgcagttgtttctgtaactccagctgtcaaagatccattggttaagaaaccagaaactaaactgaaacaagagacaacttttctagcgtttaagagaacagaagtcaagacatccacagttatttcaggaaattcttctagtgccagcgtttcctcgtcagtaactagtggcttaactggatgggcagcttttgcagccaaaacttcctctgctggtccttcaacagcaaaattgagttcaacaacacaaaacaatactgggaaacctgctacttcgtcagctaaccagaaacctgtgggtttgactggtctggcaacatcatccaaaggtggaataggttccaaaataggttccaataacagcactacgcccactgtacctttaaaaccacctccacctctaaccttgggtaaaactggccttagtcgctcagttagttgtgacaatgtcagcaaagtaggtcttcctagtccaagtagtttagttccaggaagcagcagccaactaagtgggaatggaaatagtggaacatcaggacctagtggaagtactaccagcaaaactacttcagaatccagcagctctccctcagcatcccttaaaggcccaacttcacaaaatcacagctcaatgctatgaagcgattacagatggtcaagaagaaagctgcccaaaagaaactcaagaagtaatgtggccaagtaggtttttgtatcatattagcctaaagatgaaaggcttattattatgatataatctgtaatacactgtaatttaataaaagtcttcataatc

SEQ ID NO: 143114 - DNA, 4255 bp, Homo sapiens
  Payload ID: 8279
  Gene Symbol: INTS2
  Gene Name: integrator complex subunit 2
  ENST ID: ENST00000251334
  CDS Start-End: 357-3947
cttcctctcagaccagtacggtggccgacgggagtcagacgctggggatgaatgaaggtgctgggtgcaggttgaaaaagtctcccgcttttccgttcctacagtcccggttctgcctttgtgtggtgcccccatccttcccactttgtatcgacaacccggttggtcccggcgtctgagttcttggtgtccgagtcgactcgaggcacaactagggtttggggttccggatatcgcctaggcccaacatcggaccgcgctctcgatttctgccgcgtcccgcctctaggacgcggagtccgtgtgcggttccgtgaggctggagggtagatcttaaggatcaacaaacagtaataatgactgaatgtacaagtcttcagtttgtcagcccttttgcttttgaggcaatgcagaaggtggatgttgtttgcctggcatctttaagtgatccagaattaagacttcttctgccctgtttggtacggatggcactttgtgcacctgctgaccagagccaaagctgggctcaggataagaaactcatccttcgccttctttctggagtggaagctgtcaactccattgttgcattgttgtccgtggactttcatgctttagaacaagatgccagcaaagaacagcagcttaggcataaacttggaggaggcagtggagagagcatcctggtatcacagcttcagcatggactgacgttagagtttgaacacagtgattcacctcgtcgattgcgtcttgtgcttagtgaactgttggcaattatgaacaaggtgtctgagtccaacggagaattttttttcaagtcttctgaactttttgagagtccagtatatttggaggaagctgcagatgtactttgtattttacaagcagagctcccttccttgctccctatagttgatgtagctgaagctttgctacatgttagaaatggtgcctggttcttgtgtctcttggtggccaatgttcctgatagttttaatgaagtttgtaggggcctgataaaaaatggagaacgacaagatgaagaaagtcttggaggaaggcgcaggacagatgccttacgcttcttgtgtaaaatgaatccttctcaggccctcaaggtccgaggcatggtggtggaagaatgtcacttgccaggccttggtgtggctttgacattggatcatactaaaaatgaagcttgtgaggatggagtgagtgacttggtttgttttgtaagtggtttgcttcttggaacaaatgcgaaagtccggacttggtttggaacttttatccgaaatggacagcagagaaaaagagagaccagcagttctgtcctttggcagatgagaaggcagcttcttctggagttgatgggcattcttcccacagtaagaagcacccgaattgtggaagaagctgatgtggatatggagcccaatgtgtctgtgtattcggggctgaaagaagagcatgttgtgaaagccagtgcactcttacgtctgtactgtgctttgatggggatcgctggactcaaaccaactgaagaagaagctgagcaattactgcagttgatgacgagccgtcctcctgctacgccagctggggttcgctttgtttcactttccttttgtatgctactggccttttctacacttgtcagtacacctgaacaggagcagctgatggtggtgtggctaagttggatgataaaagaagaagcgtattttgagagtacttcaggcgtctctgcttcttttggggagatgttattattggtggctatgtactttcacagcaaccagcttagtgctatcattgacttggtctgttccactttggggatgaagattgtaattaagccaagctccttgagcaggatgaagacaatcttcacacaggaaatttttactgagcaggttgtcacagctcatgcagttcgggtccctgtcaccagcaacctgagtgccaacattactggatttttgcctattcattgtatttaccagcttctcaggagccgttcctttaccaagcacaaagtgtcaataaaagattggatttatagacagctgtgtgaaacctctactccacttcatcctcaattacttcctttgattgatgtgtacataaattctatacttactcctgcgtcgaaatctaatccagaagccacaaatcagccagtcacagaacaggagatactcaatattttccaaggagtcattgggggtgacaacatccgccttaatcagcgtttcagtatcacagcacagcttttggtgctctactatatactgtcttatgaagaggctcttctagcaaacacgaagactttagctgccatgcaaagaaagcccaaatcatattcttcttctttaatggatcagattcctatcaaattccttattcgacaggctcaagggctgcagcaggagttgggagggttgcattcagctttactacgtctccttgctactaactacccacatttatgtattgtggatgactggatttgtgaagaagaaatcacagggactgatgccctgctacggcgaatgctcctgactaataatgctaaaaatcattctcccaaacaactccaagaagcattttcagctgtcccagtaaataacacacaagtgatgcagattatagaacacttgactctactctctgccagtgaacttataccatatgcggaagtgttaacatccaatatgagccagctattgaattcaggggttccacggagaattctgcaaacagtcaataaactatggatggttcttaatactgtgatgcctagaaggctatgggtaatgacggttaatgcacttcagccttcaataaagtttgtacgacaacaaaagtatactcagaatgacctgatgatagatcctctcattgtcctaaggtgtgatcagagggttcacagatgccccccactgatggatattaccctacacatgttgaatggatatcttcttgcatctaaagcctaccttagtgctcatctgaaggaaacagagcaagataggccttcccagaataatacaattggtttagttggacaaactgatgctccggaagttaccagggaagaattgaaaaatgcattactggccgctcaggatagtgcagctgtccagattctcttagagatttgcctacctactgaagaggagaaagcaaatggtgtcaatccagatagcttgttaagaaatgttcaaagtgttattaccaccagcgctccaaataagggaatggaggaaggagaagacaatttgctctgtaaccttcgagaagttcagtgccttatctgttgtctcttgcaccaaatgtacattgcagatcccaacattgctaagcttgttcactttcagggttatccatgtgaacttttgcctctgacggtcgcaggtattccatctatgcacatctgtctagatttcatacctgagcttattgcacagccagaacttgagaaacagatatttgctatccagttgctttctcacttgtgtatacaatatgcattaccaaagtcacttagtgtggctcgtttagctgtcaatgtcatgggaactttgttaacagttttaacacaggctaagcggtatgctttttttatgccaactctgccaagtttggtctctttttgtcgagcatttcctccattgtatgaggatattatgtctttgctgatccaaatagggcaagtttgtgcctctgatgttgccactcagacaagagacattgatccaattattacacgtcttcaacaaataaaggagaaaccaagtggatggtctcaaatctgtaaagattcatcttataaaaatggatccagggacactggaagcatggatcctgatgtacagctctgtcactgtattgaaagaacagtaattgaaataataaatatgagtgttagtggaatttaaaacaaaatttaaaacaacaaaaagttgtttgctgcatatacccaacatgaatctgcatattagtaacaactctaaactgaatgggaacagtaaagtattgtcttggaatcactaaaacaattcaattcaacatgagtatagtttagaactttatgagaattatgcttgcttgtttctgattggcacatctttggatctactttgctgatatgtttctattgtagcagctgagctttttttttttccactgggaacacatgtaagaaactcattattggaaagggaatttggccttgtatttagctttt

SEQ ID NO: 143115 - DNA, 5878 bp, Homo sapiens
  Payload ID: 8279
  Gene Symbol: INTS2
  Gene Name: integrator complex subunit 2
  Uniprot ID: Q9H0H0
  ENST ID: ENST00000444766
  CDS Start-End: 77-3691
ctctgcctttcctctcgcagccacccttcctctcagaccagtacggtggccgacgggagtcagacgctggggatgaatgaaggatcaacaaacagtaataatgactgaatgtacaagtcttcagtttgtcagcccttttgcttttgaggcaatgcagaaggtggatgttgtttgcctggcatctttaagtgatccagaattaagacttcttctgccctgtttggtacggatggcactttgtgcacctgctgaccagagccaaagctgggctcaggataagaaactcatccttcgccttctttctggagtggaagctgtcaactccattgttgcattgttgtccgtggactttcatgctttagaacaagatgccagcaaagaacagcagcttaggcataaacttggaggaggcagtggagagagcatcctggtatcacagcttcagcatggactgacgttagagtttgaacacagtgattcacctcgtcgattgcgtcttgtgcttagtgaactgttggcaattatgaacaaggtgtctgagtccaacggagaattttttttcaagtcttctgaactttttgagagtccagtatatttggaggaagctgcagatgtactttgtattttacaagcagagctcccttccttgctccctatagttgatgtagctgaagctttgctacatgttagaaatggtgcctggttcttgtgtctcttggtggccaatgttcctgatagttttaatgaagtttgtaggggcctgataaaaaatggagaacgacaagatgaagaaagtcttggaggaaggcgcaggacagatgccttacgcttcttgtgtaaaatgaatccttctcaggccctcaaggtccgaggcatggtggtggaagaatgtcacttgccaggccttggtgtggctttgacattggatcatactaaaaatgaagcttgtgaggatggagtgagtgacttggtttgttttgtaagtggtttgcttcttggaacaaatgcgaaagtccggacttggtttggaacttttatccgaaatggacagcagagaaaaagagagaccagcagttctgtcctttggcagatgagaaggcagcttcttctggagttgatgggcattcttcccacagtaagaagcacccgaattgtggaagaagctgatgtggatatggagcccaatgtgtctgtgtattcggggctgaaagaagagcatgttgtgaaagccagtgcactcttacgtctgtactgtgctttgatggggatcgctggactcaaaccaactgaagaagaagctgagcaattactgcagttgatgacgagccgtcctcctgctacgccagctggggttcgctttgtttcactttccttttgtatgctactggccttttctacacttgtcagtacacctgaacaggagcagctgatggtggtgtggctaagttggatgataaaagaagaagcgtattttgagagtacttcaggcgtctctgcttcttttggggagatgttattattggtggctatgtactttcacagcaaccagcttagtgctatcattgacttggtctgttccactttggggatgaagattgtaattaagccaagctccttgagcaggatgaagacaatcttcacacaggaaatttttactgagcaggttgtcacagctcatgcagttcgggtccctgtcaccagcaacctgagtgccaacattactggatttttgcctattcattgtatttaccagcttctcaggagccgttcctttaccaagcacaaagtgtcaataaaagattggatttatagacagctgtgtgaaacctctactccacttcatcctcaattacttcctttgattgatgtgtacataaattctatacttactcctgcgtcgaaatctaatccagaagccacaaatcagccagtcacagaacaggagatactcaatattttccaaggagtcattgggggtgacaacatccgccttaatcagcgtttcagtatcacagcacagcttttggtgctctactatatactgtcttatgaagaggctcttctagcaaacacgaagactttagctgccatgcaaagaaagcccaaatcatattcttcttctttaatggatcagattcctatcaaattccttattcgacaggctcaagggctgcagcaggagttgggagggttgcattcagctttactacgtctccttgctactaactacccacatttatgtattgtggatgactggatttgtgaagaagaaatcacagggactgatgccctgctacggcgaatgctcctgactaataatgctaaaaatcattctcccaaacaactccaagaagcattttcagctgtcccagtaaataacacacaagtgatgcagattatagaacacttgactctactctctgccagtgaacttataccatatgcggaagtgttaacatccaatatgagccagctattgaattcaggggttccacggagaattctgcaaacagtcaataaactatggatggttcttaatactgtgatgcctagaaggctatgggtaatgacggttaatgcacttcagccttcaataaagtttgtacgacaacaaaagtatactcagaatgacctgatgatagatcctctcattgtcctaaggtgtgatcagagggttcacagatgccccccactgatggatattaccctacacatgttgaatggatatcttcttgcatctaaagcctaccttagtgctcatctgaaggaaacagagcaagataggccttcccagaataatacaattggtttagttggacaaactgatgctccggaagttaccagggaagaattgaaaaatgcattactggccgctcaggatagtgcagctgtccagattctcttagagatttgcctacctactgaagaggagaaagcaaatggtgtcaatccagatagcttgttaagaaatgttcaaagtgttattaccaccagcgctccaaataagggaatggaggaaggagaagacaatttgctctgtaaccttcgagaagttcagtgccttatctgttgtctcttgcaccaaatgtacattgcagatcccaacattgctaagcttgttcactttcagggttatccatgtgaacttttgcctctgacggtcgcaggtattccatctatgcacatctgtctagatttcatacctgagcttattgcacagccagaacttgagaaacagatatttgctatccagttgctttctcacttgtgtatacaatatgcattaccaaagtcacttagtgtggctcgtttagctgtcaatgtcatgggaactttgttaacagttttaacacaggctaagcggtatgctttttttatgccaactctgccaagtttggtctctttttgtcgagcatttcctccattgtatgaggatattatgtctttgctgatccaaatagggcaagtttgtgcctctgatgttgccactcagacaagagacattgatccaattattacacgtcttcaacaaataaaggagaaaccaagtggatggtctcaaatctgtaaagattcatcttataaaaatggatccagggacactggaagcatggatcctgatgtacagctctgtcactgtattgaaagaacagtaattgaaataataaatatgagtgttagtggaatttaaaacaaaatttaaaacaacaaaaagttgtttgctgcatatacccaacatgaatctgcatattagtaacaactctaaactgaatgggaacagtaaagtattgtcttggaatcactaaaacaattcaattcaacatgagtatagtttagaactttatgagaattatgcttgcttgtttctgattggcacatctttggatctactttgctgatatgtttctattgtagcagctgagctttttttttttccactgggaacacatgtaagaaactcattattggaaagggaatttggccttgtatttagcttttgaagtgaagactgccatgcctttaatttcttataaaaatgagtctgtgggtagccctagtgtttattttaactgtgagcttgtaacagaatgtgacaaagatgcaaagatgggagaggaaaaaagggtaaagggaaaggagaattaaggaaataataggagttaaaaacacaagtagaaatctcaaagatttgcagtgcaagtaatagtaatgcaagttggaattctagttctcaagaaagagtattgagaagacttttaaaaaggcaagtagcttttgtaaatgatttctgtggaaatacagatgaggatttaaagatttcacatatttgcttcaatttttattaatatatgaagccatatgtttaaagagatacttgaataatttggaattttaagatactggtgtaaaagtgtttacagaaacatctttgttcaaagaagaacctgagagatctcatttagttttatgttttaaatttatttttataatgctttattaacttacctaatgctcagaggggggaaatatgtatcaaattaaatgaaggtagagcaataaaacccactggattaaagagctcttggtttgtcatcaggattataattcatatcttactttgagaagatctttgagtaagaaaatgcagtgtttgaacctgaggaaaagttaaagtgtagaaaatattgtcttgccgaaggattttgcagtcctctgtcagtaacttccattgattaggcagacatattcaggtaaaccctaatcattaaaaaaaaattatcaatgtagaaagtaattcccttttttctctctgagatatacctcaatcacacacttccccacccccacttgaaacagacctcttcacttgtgttttttttttttttttcctgaggtggagtcttcccctgttgcccaggctggagtgcagtgggatgatcttggctcactgcaacttctgccacctgggttcaagggattctcgtgcctcaacctcctgagtagctgggactgcaggcacgcgccacctgtatttttgtatttttagtaaagacgggggtttgccatgttgcccagactggttttgaactcctggcctcaggtgatctgcccaccttggcctcccaaagtgctgggattacaggtgtgagccaccgcacctggccagaccgcttcacttgtaaaagaaattaggctaataagaaggtgtagtttttgagaaatgaaatttaactttagccttttcactagtaaatagtcacatctcattttcttcctttgtaaaatggggttactactggccctacctcatattctatgagaatgagtttgtagctgtttcaaatcatgaagtgcatagtatcacatgtgatagaatatttataactttttattagatgcttaatgttcaattaagtaattttgatgtgaaaaataaaagtaataaaagtatcttaaaaatagcataagaattttcatatttttaaacaaggcagttttgtagtcccttaagattaaatacaactgctccttttttttttaaactgaggccttgcgatattttgtgtgaatagatatgccctaggagttcagaaaaagttaaaagtatgttttctaattaaatgcagtgcacattcctggatcaatattcaaagactggtcataacctgctgtgttaaaataatcacatatgctctttttcatcagatttgttgatgatgtaaataaaatgtgtaaatatattagtaaatgttaatattcatgtattttaagttaaggttataaaatttgtcacaatgtgtttttttattcaagtgaaaacagatgtgtgcagctattttgaatattggtttataaacattcatattctttatcaaac

SEQ ID NO: 143116 - DNA, 411 bp, Homo sapiens
  Payload ID: 8279
  Gene Symbol: INTS2
  Gene Name: integrator complex subunit 2
  ENST ID: ENST00000583076
  CDS Start-End: 175-411
ctgctagtcggtcggccttgagaggggactgctttggctgccagctcactgcctttttgtttactttttgtgccttggatgattcctggagacagagaagtgcgctaatgagacgcgtctttctcacatagcacccacacatctgctttttacccggatcaacaaacagtaataatgactgaatgtacaagtcttcagtttgtcagcccttttgcttttgaggcaatgcagaaggtggatgttgtttgcctggcatctttaagtgatccagaattaagacttcttctgccctgtttggtacggatggcactttgtgcacctgctgaccagagccaaagctgggctcaggataagaaactcatccttcgccttctttctggagtggaagctgtcaactccattgttgcattg

SEQ ID NO: 143117 - DNA, 5805 bp, Homo sapiens
  Payload ID: 8279
  Gene Symbol: INTS2
  Gene Name: integrator complex subunit 2
  Uniprot ID: Q9H0H0
  ENST ID: ENST00000617492
  CDS Start-End: 1-3615
atgaaagatcaacaaacagtaataatgactgaatgtacaagtcttcagtttgtcagcccttttgcttttgaggcaatgcagaaggtggatgttgtttgcctggcatctttaagtgatccagaattaagacttcttctgccctgtttggtacggatggcactttgtgcacctgctgaccagagccaaagctgggctcaggataagaaactcatccttcgccttctttctggagtggaagctgtcaactccattgttgcattgttgtccgtggactttcatgctttagaacaagatgccagcaaagaacagcagcttaggcataaacttggaggaggcagtggagagagcatcctggtatcacagcttcagcatggactgacgttagagtttgaacacagtgattcacctcgtcgattgcgtcttgtgcttagtgaactgttggcaattatgaacaaggtgtctgagtccaacggagaattttttttcaagtcttctgaactttttgagagtccagtatatttggaggaagctgcagatgtactttgtattttacaagcagagctcccttccttgctccctatagttgatgtagctgaagctttgctacatgttagaaatggtgcctggttcttgtgtctcttggtggccaatgttcctgatagttttaatgaagtttgtaggggcctgataaaaaatggagaacgacaagatgaagaaagtcttggaggaaggcgcaggacagatgccttacgcttcttgtgtaaaatgaatccttctcaggccctcaaggtccgaggcatggtggtggaagaatgtcacttgccaggccttggtgtggctttgacattggatcatactaaaaatgaagcttgtgaggatggagtgagtgacttggtttgttttgtaagtggtttgcttcttggaacaaatgcgaaagtccggacttggtttggaacttttatccgaaatggacagcagagaaaaagagagaccagcagttctgtcctttggcagatgagaaggcagcttcttctggagttgatgggcattcttcccacagtaagaagcacccgaattgtggaagaagctgatgtggatatggagcccaatgtgtctgtgtattcggggctgaaagaagagcatgttgtgaaagccagtgcactcttacgtctgtactgtgctttgatggggatcgctggactcaaaccaactgaagaagaagctgagcaattactgcagttgatgacgagccgtcctcctgctacgccagctggggttcgctttgtttcactttccttttgtatgctactggccttttctacacttgtcagtacacctgaacaggagcagctgatggtggtgtggctaagttggatgataaaagaagaagcgtattttgagagtacttcaggcgtctctgcttcttttggggagatgttattattggtggctatgtactttcacagcaaccagcttagtgctatcattgacttggtctgttccactttggggatgaagattgtaattaagccaagctccttgagcaggatgaagacaatcttcacacaggaaatttttactgagcaggttgtcacagctcatgcagttcgggtccctgtcaccagcaacctgagtgccaacattactggatttttgcctattcattgtatttaccagcttctcaggagccgttcctttaccaagcacaaagtgtcaataaaagattggatttatagacagctgtgtgaaacctctactccacttcatcctcaattacttcctttgattgatgtgtacataaattctatacttactcctgcgtcgaaatctaatccagaagccacaaatcagccagtcacagaacaggagatactcaatattttccaaggagtcattgggggtgacaacatccgccttaatcagcgtttcagtatcacagcacagcttttggtgctctactatatactgtcttatgaagaggctcttctagcaaacacgaagactttagctgccatgcaaagaaagcccaaatcatattcttcttctttaatggatcagattcctatcaaattccttattcgacaggctcaagggctgcagcaggagttgggagggttgcattcagctttactacgtctccttgctactaactacccacatttatgtattgtggatgactggatttgtgaagaagaaatcacagggactgatgccctgctacggcgaatgctcctgactaataatgctaaaaatcattctcccaaacaactccaagaagcattttcagctgtcccagtaaataacacacaagtgatgcagattatagaacacttgactctactctctgccagtgaacttataccatatgcggaagtgttaacatccaatatgagccagctattgaattcaggggttccacggagaattctgcaaacagtcaataaactatggatggttcttaatactgtgatgcctagaaggctatgggtaatgacggttaatgcacttcagccttcaataaagtttgtacgacaacaaaagtatactcagaatgacctgatgatagatcctctcattgtcctaaggtgtgatcagagggttcacagatgccccccactgatggatattaccctacacatgttgaatggatatcttcttgcatctaaagcctaccttagtgctcatctgaaggaaacagagcaagataggccttcccagaataatacaattggtttagttggacaaactgatgctccggaagttaccagggaagaattgaaaaatgcattactggccgctcaggatagtgcagctgtccagattctcttagagatttgcctacctactgaagaggagaaagcaaatggtgtcaatccagatagcttgttaagaaatgttcaaagtgttattaccaccagcgctccaaataagggaatggaggaaggagaagacaatttgctctgtaaccttcgagaagttcagtgccttatctgttgtctcttgcaccaaatgtacattgcagatcccaacattgctaagcttgttcactttcagggttatccatgtgaacttttgcctctgacggtcgcaggtattccatctatgcacatctgtctagatttcatacctgagcttattgcacagccagaacttgagaaacagatatttgctatccagttgctttctcacttgtgtatacaatatgcattaccaaagtcacttagtgtggctcgtttagctgtcaatgtcatgggaactttgttaacagttttaacacaggctaagcggtatgctttttttatgccaactctgccaagtttggtctctttttgtcgagcatttcctccattgtatgaggatattatgtctttgctgatccaaatagggcaagtttgtgcctctgatgttgccactcagacaagagacattgatccaattattacacgtcttcaacaaataaaggagaaaccaagtggatggtctcaaatctgtaaagattcatcttataaaaatggatccagggacactggaagcatggatcctgatgtacagctctgtcactgtattgaaagaacagtaattgaaataataaatatgagtgttagtggaatttaaaacaaaatttaaaacaacaaaaagttgtttgctgcatatacccaacatgaatctgcatattagtaacaactctaaactgaatgggaacagtaaagtattgtcttggaatcactaaaacaattcaattcaacatgagtatagtttagaactttatgagaattatgcttgcttgtttctgattggcacatctttggatctactttgctgatatgtttctattgtagcagctgagctttttttttttccactgggaacacatgtaagaaactcattattggaaagggaatttggccttgtatttagcttttgaagtgaagactgccatgcctttaatttcttataaaaatgagtctgtgggtagccctagtgtttattttaactgtgagcttgtaacagaatgtgacaaagatgcaaagatgggagaggaaaaaagggtaaagggaaaggagaattaaggaaataataggagttaaaaacacaagtagaaatctcaaagatttgcagtgcaagtaatagtaatgcaagttggaattctagttctcaagaaagagtattgagaagacttttaaaaaggcaagtagcttttgtaaatgatttctgtggaaatacagatgaggatttaaagatttcacatatttgcttcaatttttattaatatatgaagccatatgtttaaagagatacttgaataatttggaattttaagatactggtgtaaaagtgtttacagaaacatctttgttcaaagaagaacctgagagatctcatttagttttatgttttaaatttatttttataatgctttattaacttacctaatgctcagaggggggaaatatgtatcaaattaaatgaaggtagagcaataaaacccactggattaaagagctcttggtttgtcatcaggattataattcatatcttactttgagaagatctttgagtaagaaaatgcagtgtttgaacctgaggaaaagttaaagtgtagaaaatattgtcttgccgaaggattttgcagtcctctgtcagtaacttccattgattaggcagacatattcaggtaaaccctaatcattaaaaaaaaattatcaatgtagaaagtaattcccttttttctctctgagatatacctcaatcacacacttccccacccccacttgaaacagacctcttcacttgtgttttttttttttttttcctgaggtggagtcttcccctgttgcccaggctggagtgcagtgggatgatcttggctcactgcaacttctgccacctgggttcaagggattctcgtgcctcaacctcctgagtagctgggactgcaggcacgcgccacctgtatttttgtatttttagtaaagacgggggtttgccatgttgcccagactggttttgaactcctggcctcaggtgatctgcccaccttggcctcccaaagtgctgggattacaggtgtgagccaccgcacctggccagaccgcttcacttgtaaaagaaattaggctaataagaaggtgtagtttttgagaaatgaaatttaactttagccttttcactagtaaatagtcacatctcattttcttcctttgtaaaatggggttactactggccctacctcatattctatgagaatgagtttgtagctgtttcaaatcatgaagtgcatagtatcacatgtgatagaatatttataactttttattagatgcttaatgttcaattaagtaattttgatgtgaaaaataaaagtaataaaagtatcttaaaaatagcataagaattttcatatttttaaacaaggcagttttgtagtcccttaagattaaatacaactgctccttttttttttaaactgaggccttgcgatattttgtgtgaatagatatgccctaggagttcagaaaaagttaaaagtatgttttctaattaaatgcagtgcacattcctggatcaatattcaaagactggtcataacctgctgtgttaaaataatcacatatgctctttttcatcagatttgttgatgatgtaaataaaatgtgtaaatatattagtaaatgttaatattcatgtattttaagttaaggttataaaatttgtcacaatgtgtttttttattcaagtgaaaacagatgtgtgcagctattttgaatattggtttataaacattcatattctttatcaaacgaa

SEQ ID NO: 143118 - DNA, 5235 bp, Homo sapiens
  Payload ID: 8280
  Gene Symbol: INTS3
  Gene Name: integrator complex subunit 3
  Uniprot ID: Q68E01
  ENST ID: ENST00000318967
  CDS Start-End: 569-3697
ccttccactatggccgcttctgtgtggtgtggggagacgctggtcctccccgtcctcccatagcgcttattgcctcaccctcaccccctaggggccggatccaaaggcgctgcactccccaagccttggggcatcagccaggaaggtttcctacctcctaattcaggggcaggactcctcttttccccccacggggaaaagaggcagaaacttaggggtttccctcctttcttagggtcagacgctcttagggtccacttcttcaggggcggaagcctctcctacccttcccatagggacacaggcctttaccccactgtacttcggagccaacgcctttccctcagcactgccaccccagagtcaggacccagaggactgtgccttcgcccccaacgcaggcgcggccttttggagaggagggaggagtggagaggacaggggcccttgctctcccctccccaacttgttcctcttgccccccagtccctggcaatccagagatcccgatatctaggactgtccatccatccactccctgaccttttcccggctcctggctgcagccatggagttgcagaagggaaaaggggcggcagcagcagcagctgcttcgggagcagcgggaggtggaggaggaggagcgggagcaggagccccaggaggggggaggctgctactttcaaccagtttggatgccaaggatgagttagaggagagattggaaaggtgtatgagcattgtgacatcgatgactgctggtgtctcggagagagaagccaatgatgccctcaatgcgtatgtgtgcaaaggcctcccccagcatgaagaaatctgcctgggcctgtttactctcatcctcactgaacctgcccaagcccagaagtgttaccgggacttagctctggtgagtcgtgatggcatgaatattgtcctgaataaaatcaaccagatacttatggagaagtacctgaagctgcaggatacctgccgtactcagttggtgtggttggtacgggaactggtgaagagtggggttctgggagccgatggtgtttgtatgacgtttatgaagcagattgcaggtggagatgttacagccaaaaatatctggttggcagaaagtgttctggatatcctgacagagcaaagggagtgggtcctgaagagcagcatcctcattgccatggctgtttacacgtacctccgcctcatcgtggaccaccatgggactgcccagctccaggccctgcgacagaaggaagtagacttctgcatctcactgcttcgggaacggttcatggaatgtctgatgattggtcgggatctcgtaagactacttcagaatgttgctaggataccagaatttgaactgctttggaaagatattatccataatcctcaggccttgagtcctcagttcacaggtatcctacagcttcttcagtcaagaacatcccgaaaattcctagcatgtcgtctaaccccggacatggagactaaactcctcttcatgacatcccgggtgcgatttggtcaacaaaagcgataccaagattggttccagcgccagtacctgtcaactccagatagtcagtctctgcgctgtgacctcattcgctacatctgtggggtagtccacccttctaatgaagtactgagttcagatatcttgccccggtgggccatcattggttggctcctgacaacgtgcacgtcaaatgtcgctgcctccaatgccaagctggctttgttttatgactggctgttctttagtccagacaaggatagcattatgaacatagaaccagccatcctggtcatgcaccactccatgaagccccacccagccatcactgccacactcctggacttcatgtgccgcatcattcccaacttctatccaccattggagggccacgtgcggcagggtgtcttttcctccctcaaccacattgtggagaaacgggtcttggcacacctagctcccctgtttgacaaccctaagttggataaggagctgcgggcaatgctgagagagaagtttcctgagttctgcagctcaccctccccacctgtggaagtcaaaattgaggagccagtttccatggagatggacaaccatatgtcggataaggatgagagttgctatgacaatgcagaggcagccttcagtgacgatgaagaggatctcaacagcaaaggaaagaagagggagtttcgcttccaccctatcaaggagacagttgtggaggagccagttgatatcaccccttaccttgaccagttggatgagtccctgagggacaaagtactccagctacagaaggggagtgatacggaggcccagtgtgaggtcatgcaggaaattgtggaccaggtcctggaggaagactttgactcggagcagctgtctgtccttgcttcctgcctacaggagctcttcaaggcccactttcgaggggaggtcctgcctgaggagattactgaggagtccctggaggagtctgtaggaaagcctctgtacctaatatttaggaacctatgtcagatgcaggaagacaacagcagcttctctctacttctagaccttctctccgagctatatcagaagcagcccaagattggctaccacctgctctactacctgagggccagcaaagccgccgcagggaagatgaacctgtacgagtcatttgcccaggctacccagctgggcgatctgcacacctgcctgatgatggacatgaaggcctgccaggaggacgatgtgcggctcctgtgccacctcacgccctccatctacacagagtttccagatgaaaccttgaggagcggagagctgctgaacatgatcgtggctgttattgactctgcacagctccaggagctggtctgccacgtgatgatgggtaacctggttatgtttcgaaaagactcagttctcaacatactcattcagagcctagactgggagacctttgagcagtattgtgcctggcagctctttctggcccacaatattcccctggagaccataatccccatcctgcagcacctcaaatacaaggagcacccagaggccctgtcctgcctactgcttcaactccgaagagaaaagcccagcgaggagatggtgaagatggtgctgagccggccctgccatcctgacgaccagttcaccaccagcatcctgcggcactggtgcatgaaacatgacgagctgctggccgagcacatcaagtccctgctcatcaagaacaacagcctgcctcgcaagagacagagcctgaggagctctagcagcaagctggcccagctgactctggagcagatcctggagcacttggacaatctgcggctcaacctgaccaacaccaagcagaacttttttagccagacgccaattctccaggcgctgcagcatgtccaagcgagctgtgacgaagcccacaagatgaaattcagtgatctcttctccctggcggaggaatatgaggactcttccaccaagccacccaagagccggcgaaaagcagctctgtccagccctcgaagtcgaaagaatgccacacagccccccaatgccgaagaagagtcgggctccagcagtgcttcagaagaggaagacacgaaaccgaagcctaccaagcggaaacgaaaagggtcctctgcagtgggctctgacagtgactgaggccctgcattccccatcccacccccggctggactgccctctccttcttggtgattcaaaggttaatagaggctgaggagattgcaggggaaacacccttgctgcatccccaagctcccccggtggaaggaggagctttctcctctggctgagtttgagaagctgccatgcagcccctagccccttccctcctcctggggcctccagcccctcacactgctgttcccagtgatatttgggatctgactgaagccagaggctctgtaaaatcagaccatagtggaagtcctcagccccctggccccttccgcaatctcctcccccagtctcccaaagagccatttcaacagagaagggaaatgacaaaggggcagctggccagataagctaggatgagagcagagactcagtgtgtgggtgtcccttcctgcttccccttcaggtcttggtttgttctgaagggacgttttatagtcactatccacatgccagtgtgaaatgggcatctatgacgtggtcagggtgtccattcctaatcatggggcagatgccacaagcattcagaaaggagtctgaaagggtggccacagccccacgtggtgtgccctggaggcttaggttggtctgaggttggcacctcaatctacaccagagcccagggagtcccagaggcaagtttcacagaattgtcaaatgatcccatttccttgagtctgtttttttttttgtttttttttgttttttttttggcagagataatcgtgtcttaaaagttgtttttaaatgacaataaaacaagccagaatgtcttttgtgctggagtgtctgctggcatttgccccgtgcatgtatagcttggtcttgatttgattggcacccctacttgtaaccgcagaacatccccctttcccttcctgttctgcccccacttttgtctagagcagaagggacttggctttggccactacccatccttcctgctgccactggaggtgggagccaggcactgatctgtctatgcagaaccatcccccgtaggatgaggcctgtccttactcatttctcaagaaacaagatgcttccaaaaggtctgtcatcctccagttgaagtctgtgtgcctaccaagaatggccggaggactcgctgcttgacgggagggatgctccagcttggtctccagggacaactgtacctggagataaagtctggataccagggagggacagagatgctcttccttccacagtgtggccacttgctgggccatgtgaaccagcagaggagagttccttggctatgctgttgttcccccgctgtccagggagaatggaggtggactgaggagtgaagtttgggcgaactgcacagagctgctcctcttcaccccgaaaatttgtctttttacagaatccaggttctcccctccctcatcactgctgttgcttcctttgaaagtctaaaccactggaggcttctttttccttcctctctccttccccagtttcctctgtcccaattaaaaccaggatggagagca

SEQ ID NO: 143119 - DNA, 3597 bp, Homo sapiens
  Payload ID: 8280
  Gene Symbol: INTS3
  Gene Name: integrator complex subunit 3
  Uniprot ID: Q68E01
  ENST ID: ENST00000435409
  CDS Start-End: 204-3332
tggtgtggggagacgctggtcctccccgtcctcccatagcgcttattgcctcaccctcaccccctaggggccggatccaaaggcgctgcactccccaagccttggggcatcagccaggaagtccctggcaatccagagatcccgatatctaggactgtccatccatccactccctgaccttttcccggctcctggctgcagccatggagttgcagaagggaaaaggggcggcagcagcagcagctgcttcgggagcagcgggaggtggaggaggaggagcgggagcaggagccccaggaggggggaggctgctactttcaaccagtttggatgccaaggatgagttagaggagagattggaaaggtgtatgagcattgtgacatcgatgactgctggtgtctcggagagagaagccaatgatgccctcaatgcgtatgtgtgcaaaggcctcccccagcatgaagaaatctgcctgggcctgtttactctcatcctcactgaacctgcccaagcccagaagtgttaccgggacttagctctggtgagtcgtgatggcatgaatattgtcctgaataaaatcaaccagatacttatggagaagtacctgaagctgcaggatacctgccgtactcagttggtgtggttggtacgggaactggtgaagagtggggttctgggagccgatggtgtttgtatgacgtttatgaagcagattgcaggtggagatgttacagccaaaaatatctggttggcagaaagtgttctggatatcctgacagagcaaagggagtgggtcctgaagagcagcatcctcattgccatggctgtttacacgtacctccgcctcatcgtggaccaccatgggactgcccagctccaggccctgcgacagaaggaagtagacttctgcatctcactgcttcgggaacggttcatggaatgtctgatgattggtcgggatctcgtaagactacttcagaatgttgctaggataccagaatttgaactgctttggaaagatattatccataatcctcaggccttgagtcctcagttcacaggtatcctacagcttcttcagtcaagaacatcccgaaaattcctagcatgtcgtctaaccccggacatggagactaaactcctcttcatgacatcccgggtgcgatttggtcaacaaaagcgataccaagattggttccagcgccagtacctgtcaactccagatagtcagtctctgcgctgtgacctcattcgctacatctgtggggtagtccacccttctaatgaagtactgagttcagatatcttgccccggtgggccatcattggttggctcctgacaacgtgcacgtcaaatgtcgctgcctccaatgccaagctggctttgttttatgactggctgttctttagtccagacaaggatagcattatgaacatagaaccagccatcctggtcatgcaccactccatgaagccccacccagccatcactgccacactcctggacttcatgtgccgcatcattcccaacttctatccaccattggagggccacgtgcggcagggtgtcttttcctccctcaaccacattgtggagaaacgggtcttggcacacctagctcccctgtttgacaaccctaagttggataaggagctgcgggcaatgctgagagagaagtttcctgagttctgcagctcaccctccccacctgtggaagtcaaaattgaggagccagtttccatggagatggacaaccatatgtcggataaggatgagagttgctatgacaatgcagaggcagccttcagtgacgatgaagaggatctcaacagcaaaggaaagaagagggagtttcgcttccaccctatcaaggagacagttgtggaggagccagttgatatcaccccttaccttgaccagttggatgagtccctgagggacaaagtactccagctacagaaggggagtgatacggaggcccagtgtgaggtcatgcaggaaattgtggaccaggtcctggaggaagactttgactcggagcagctgtctgtccttgcttcctgcctacaggagctcttcaaggcccactttcgaggggaggtcctgcctgaggagattactgaggagtccctggaggagtctgtaggaaagcctctgtacctaatatttaggaacctatgtcagatgcaggaagacaacagcagcttctctctacttctagaccttctctccgagctatatcagaagcagcccaagattggctaccacctgctctactacctgagggccagcaaagccgccgcagggaagatgaacctgtacgagtcatttgcccaggctacccagctgggcgatctgcacacctgcctgatgatggacatgaaggcctgccaggaggacgatgtgcggctcctgtgccacctcacgccctccatctacacagagtttccagatgaaaccttgaggagcggagagctgctgaacatgatcgtggctgttattgactctgcacagctccaggagctggtctgccacgtgatgatgggtaacctggttatgtttcgaaaagactcagttctcaacatactcattcagagcctagactgggagacctttgagcagtattgtgcctggcagctctttctggcccacaatattcccctggagaccataatccccatcctgcagcacctcaaatacaaggagcacccagaggccctgtcctgcctactgcttcaactccgaagagaaaagcccagcgaggagatggtgaagatggtgctgagccggccctgccatcctgacgaccagttcaccaccagcatcctgcggcactggtgcatgaaacatgacgagctgctggccgagcacatcaagtccctgctcatcaagaacaacagcctgcctcgcaagagacagagcctgaggagctctagcagcaagctggcccagctgactctggagcagatcctggagcacttggacaatctgcggctcaacctgaccaacaccaagcagaacttttttagccagacgccaattctccaggcgctgcagcatgtccaagcgagctgtgacgaagcccacaagatgaaattcagtgatctcttctccctggcggaggaatatgaggactcttccaccaagccacccaagagccggcgaaaagcagctctgtccagccctcgaagtcgaaagaatgccacacagccccccaatgccgaagaagagtcgggctccagcagtgcttcagaagaggaagacacgaaaccgaagcctaccaagcggaaacgaaaagggtcctctgcagtgggctctgacagtgactgaggccctgcattccccatcccacccccggctggactgccctctccttcttggtgattcaaaggttaatagaggctgaggagattgcaggggaaacacccttgctgcatccccaagctcccccggtggaaggaggagctttctcctctggctgagtttgagaagctgccatgcagcccctagccccttccctcctcctggggcctccagcccctcacactgctgttcccagtgatatttgggatctgactgaagccagaggctctgt

SEQ ID NO: 143120 - DNA, 1896 bp, Homo sapiens
  Payload ID: 8280
  Gene Symbol: INTS3
  Gene Name: integrator complex subunit 3
  ENST ID: ENST00000503133
  CDS Start-End: 1-148
tagtcagtctctgcgctgtgacctcattcgctacatctgtggggtagtccacccttctaatgaagtactgagttcagatatcttgccccggtgggccatcattggttggctcctgacaacgtgcacgacacctagctcccctgtttgacaaccctaagttggataaggagctgcgggcaatgctgagagagaagtttcctgagttctgcagctcaccctccccacctgtggaagtcaaaattgaggagccagtttccatggagatggacaaccatatgtcggataaggatgagagttgctatgacaatgcagaggcagccttcagtgacgatgaagaggatctcaacagcaaaggaaagaagagggagtttcgcttccaccctatcaaggagacagttgtggaggagccagttgatatcaccccttaccttgaccagttggatgagtccctgagggacaaagtactccagctacagaaggggagtgatacggaggcccagtgtgaggtcatgcaggaaattgtggaccaggtcctggaggaagactttgactcggagcagctgtctgtccttgcttcctgcctacaggagctcttcaaggcccactttcgaggggaggtcctgcctgaggagattactgaggagtccctggaggagtctgtaggaaagcctctgtacctaatatttaggaacctatgtcagatgcaggaagacaacagcagcttctctctacttctagaccttctctccgagctatatcagaagcagcccaagattggctaccacctgctctactacctgagggccagcaaagccgccgcagggaagatgaacctgtacgagtcatttgcccaggctacccagctgggcgatctgcacacctgcctgatgatggacatgaaggcctgccaggaggacgatgtgcggctcctgtgccacctcacgccctccatctacacagagtttccagatgaaaccttgaggagcggagagctgctgaacatgatcgtggctgttattgactctgcacagctccaggagctggtctgccacgtgatgatgggtaacctggttatgtttcgaaaagactcagttctcaacatactcattcagagcctagactgggagacctttgagcagtattgtgcctggcagctctttctggcccacaatattcccctggagaccataatccccatcctgcagcacctcaaatacaaggagcacccagaggccctgtcctgcctactgcttcaactccgaagagaaaagcccagcgaggagatggtgaagatggtgctgagccggccctgccatcctgacgaccagttcaccaccagcatcctgcggcactggtgcatgaaacatgacgagctgctggccgagcacatcaagtccctgctcatcaagaacaacagcctgcctcgcaagagacagagcctgaggagctctagcagcaagctggcccagctgactctggagcagatcctggagcacttggacaatctgcggctcaacctgaccaacaccaagcagaacttttttagccagacgccaattctccaggcgctgcagcatgtccaagcgagctgtgacgaagcccacaagatgaaattcagtgatctcttctccctggcggaggaatatgaggactcttccaccaagccacccaagagccggcgaaaagcagctctgtccagccctcgaagtcgaaagaatgccacacagccccccaatgccgaagaagagtcgggctccagcagtgcttcagaagaggaagacacgaaaccgaagcctaccaagcggaaacgaaaagggtcctctgcagtgggctctgacagtgactgaggccctgcattccccatcccacccccggctggactgccctctccttctt

SEQ ID NO: 143121 - DNA, 3442 bp, Homo sapiens
  Payload ID: 8280
  Gene Symbol: INTS3
  Gene Name: integrator complex subunit 3
  Uniprot ID: Q68E01
  ENST ID: ENST00000512605
  CDS Start-End: 276-2984
atttggcacttatctttataggcacttggaagagaaaattaggaagttgtccgtagcttagccagttgatagtccaagatagatactagcatgagtgagcaagcaaaaaatcaaagcatctactcccagtgtcaaatcatcaattatttctgaggcactgtagccaagcccaagaagcgtgaattgggagggtgaatagttctagacagagcataggagccagtgtgtttcctccctgcagggagtgggtcctgaagagcagcatcctcattgccatggctgtttacacgtacctccgcctcatcgtggaccaccatgggactgcccagctccaggccctgcgacagaaggaagtagacttctgcatctcactgcttcgggaacggttcatggaatgtctgatgattggtcgggatctcgtaagactacttcagaatgttgctaggataccagaatttgaactgctttggaaagatattatccataatcctcaggccttgagtcctcagttcacaggtatcctacagcttcttcagtcaagaacatcccgaaaattcctagcatgtcgtctaaccccggacatggagactaaactcctcttcatgacatcccgggtgcgatttggtcaacaaaagcgataccaagattggttccagcgccagtacctgtcaactccagatagtcagtctctgcgctgtgacctcattcgctacatctgtggggtagtccacccttctaatgaagtactgagttcagatatcttgccccggtgggccatcattggttggctcctgacaacgtgcacgtcaaatgtcgctgcctccaatgccaagctggctttgttttatgactggctgttctttagtccagacaaggatagcattatgaacatagaaccagccatcctggtcatgcaccactccatgaagccccacccagccatcactgccacactcctggacttcatgtgccgcatcattcccaacttctatccaccattggagggccacgtgcggcagggtgtcttttcctccctcaaccacattgtggagaaacgggtcttggcacacctagctcccctgtttgacaaccctaagttggataaggagctgcgggcaatgctgagagagaagtttcctgagttctgcagctcaccctccccacctgtggaagtcaaaattgaggagccagtttccatggagatggacaaccatatgtcggataaggatgagagttgctatgacaatgcagaggcagccttcagtgacgatgaagaggatctcaacagcaaaggaaagaagagggagtttcgcttccaccctatcaaggagacagttgtggaggagccagttgatatcaccccttaccttgaccagttggatgagtccctgagggacaaagtactccagctacagaaggggagtgatacggaggcccagtgtgaggtcatgcaggaaattgtggaccaggtcctggaggaagactttgactcggagcagctgtctgtccttgcttcctgcctacaggagctcttcaaggcccactttcgaggggaggtcctgcctgaggagattactgaggagtccctggaggagtctgtaggaaagcctctgtacctaatatttaggaacctatgtcagatgcaggaagacaacagcagcttctctctacttctagaccttctctccgagctatatcagaagcagcccaagattggctaccacctgctctactacctgagggccagcaaagccgccgcagggaagatgaacctgtacgagtcatttgcccaggctacccagctgggcgatctgcacacctgcctgatgatggacatgaaggcctgccaggaggacgatgtgcggctcctgtgccacctcacgccctccatctacacagagtttccagatgaaaccttgaggagcggagagctgctgaacatgatcgtggctgttattgactctgcacagctccaggagctggtctgccacgtgatgatgggtaacctggttatgtttcgaaaagactcagttctcaacatactcattcagagcctagactgggagacctttgagcagtattgtgcctggcagctctttctggcccacaatattcccctggagaccataatccccatcctgcagcacctcaaatacaaggagcacccagaggccctgtcctgcctactgcttcaactccgaagagaaaagcccagcgaggagatggtgaagatggtgctgagccggccctgccatcctgacgaccagttcaccaccagcatcctgcggcactggtgcatgaaacatgacgagctgctggccgagcacatcaagtccctgctcatcaagaacaacagcctgcctcgcaagagacagagcctgaggagctctagcagcaagctggcccagctgactctggagcagatcctggagcacttggacaatctgcggctcaacctgaccaacaccaagcagaactgtatgccttccaccctcggcgtccagtgtagacggtgctgccctggcccagactatgcctggagccaggctgggggcaggggcaggacacccggggccacaacccacactcgggataaaacaacctgtgcgtgctgtttaataagctcccagacatctgattgtttttccttccctgctctcccttttcttcctctagtttttagccagacgccaattctccaggcgctgcagcatgtccaagcgagctgtgacgaagcccacaagatgaaattcagtgatctcttctccctggcggaggaatatgaggactcttccaccaagccacccaagagccggcgaaaagcagctctgtccagccctcgaagtcgaaagaatgccacacagccccccaatgccgaagaagagtcgggctccagcagtgcttcagaagaggaagacacgaaaccgaagcctaccaagcggaaacgaaaagggtcctctgcagtgggctctgacagtgactgaggccctgcattccccatcccacccccggctggactgccctctccttcttggtgattcaaaggttaatagaggctgaggagattgcaggggaaacacccttgctgcatccccaagctcccccggtggaaggaggagctttctcctctggctgagtttgagaagctgccatgcagcccctagccccttccctcctcctggggcctccagcccctcacactgctgttcccagtgatatttgggatctgactgaagccagaggctctgtaaaatcagaccatagtggaagtcctcagccccctggccccttccgcaatctcctcccccagtctcccaaagagccatttcaacagagaagggaaatgacaaaggggcagctggccagataagctaggatgagagcagagactcagtgtgtgggtgtcccttcctgcttccccttcaggtcttggtttgttctg

SEQ ID NO: 143122 - DNA, 3597 bp, Homo sapiens; identical to SEQ ID NO: 143119
  Payload ID: 8280
  Gene Symbol: INTS3
  Gene Name: integrator complex subunit 3
  Uniprot ID: Q68E01
  ENST ID: ENST00000571768
  CDS Start-End: 204-3332

SEQ ID NO: 143123 - DNA, 1896 bp, Homo sapiens; identical to SEQ ID NO: 143120
  Payload ID: 8280
  Gene Symbol: INTS3
  Gene Name: integrator complex subunit 3
  ENST ID: ENST00000575708
  CDS Start-End: 1-148

SEQ ID NO: 143124 - DNA, 3442 bp, Homo sapiens; identical to SEQ ID NO: 143121
  Payload ID: 8280
  Gene Symbol: INTS3
  Gene Name: integrator complex subunit 3
  Uniprot ID: Q68E01
  ENST ID: ENST00000576422
  CDS Start-End: 276-2984

SEQ ID NO: 143125 - DNA, 5235 bp, Homo sapiens; identical to SEQ ID NO: 143118
  Payload ID: 8280
  Gene Symbol: INTS3
  Gene Name: integrator complex subunit 3
  Uniprot ID: Q68E01
  ENST ID: ENST00000576030
  CDS Start-End: 569-3697

SEQ ID NO: 143126 - DNA, 478 bp, Homo sapiens
  Payload ID: 8280
  Gene Symbol: INTS3
  Gene Name: integrator complex subunit 3
  ENST ID: ENST00000623139
  CDS Start-End: 1-126
acacagccccccaatgccgaagaagagtcgggctccagcagtgcttcagaagaggaagacacgaaaccgaagcctaccaagcggaaacgaaaagggtcctctgcagtgggctctgacagtgactgaggccctgcattccccatcccacccccggctggactgccctctccttcttggtgattcaaagtgtggccacttgctgggccatgtgaaccagcagaggagagttccttggctatgctgttgttcccccgctgtccagggagaatggaggtggactgaggagtgaagtttgggcgaactgcacagagctgctcctcttcaccccgaaaatttgtctttttacagaatccaggttctcccctccctcatcactgctgttgcttcctttgaaagtctaaaccactggaggcttctttttccttcctctctccttccccagtttcctctgtcccaattaaaaccaggatggagagca

SEQ ID NO: 143127 - DNA, 3404 bp, Homo sapiens
  Payload ID: 8280
  Gene Symbol: INTS3
  Gene Name: integrator complex subunit 3
  ENST ID: ENST00000476843
  CDS Start-End: 1-843
gtttacacgtacctccgcctcatcgtggaccaccatgggactgcccagctccaggccctgcgacagaaggaagtagacttctgcatctcactgcttcgggaacggttcatggaatgtctgatgattggtcgggatctcgtaagactacttcagaatgttgctaggataccagaatttgaactgctttggaaagatattatccataatcctcaggccttgagtcctcagttcacaggtatcctacagcttcttcagtcaagaacatcccgaaaattcctagcatgtcgtctaaccccggacatggagactaaactcctcttcatgacatcccgggtgcgatttggtcaacaaaagcgataccaagattggttccagcgccagtacctgtcaactccagatagtcagtctctgcgctgtgacctcattcgctacatctgtggggtagtccacccttctaatgaagtactgagttcagatatcttgccccggtgggccatcattggttggctcctgacaacgtgcacgtcaaatgtcgctgcctccaatgccaagctggctttgttttatgactggctgttctttagtccagacaaggatagcattatgaacatagaaccagccatcctggtcatgcaccactccatgaagccccacccagccatcactgccacactcctggacttcatgtgccgcatcattcccaacttctatccaccattggagggccacgtgcggcagggtgtcttttcctccctcaaccacattgtggagaaacgggtcttggcgtgtaaaaagtattggctctacctcagactgctgggcatatgtcttcttggctcttagaggaatttctctcctgccatcgtattacaaagacacctagctcccctgtttgacaaccctaagttggataaggagctgcgggcaatgctgagagagaagtttcctgagttctgcagctcaccctccccacctgtggaagtcaaaattgaggagccagtttccatggagatggacaaccatatgtcggataaggatgagagttgctatgacaatgcagaggcagccttcagtgacgatgaagaggatctcaacagcaaaggaaagaagagggagtttcgcttccaccctatcaaggagacagttgtggaggagccagttgatatcaccccttaccttgaccagttggatgagtccctgagggacaaagtactccagctacagaaggggagtgatacggaggcccagtgtgaggtcatgcaggaaattgtggaccaggtcctggaggaagactttgactcggagcagctgtctgtccttgcttcctgcctacaggagctcttcaaggcccactttcgaggggaggtcctgcctgaggagattactgaggagtccctggaggagtctgtaggaaagcctctgtacctaatatttaggaacctatgtcagatgcaggaagacaacagcagcttctctctacttctagaccttctctccgagctatatcagaagcagcccaagattggctaccacctgctctactacctgagggccagcaaagccgccgcagggaagatgaacctgtacgagtcatttgcccaggctacccagctgggcgatctgcacacctgcctgatgatggacatgaaggcctgccaggaggacgatgtgcggctcctgtgccacctcacgccctccatctacacagagtttccagatgaaaccttgaggagcggagagctgctgaacatgatcgtggctgttattgactctgcacagctccaggagctggtctgccacgtgatgatgggtaacctggttatgtttcgaaaagactcagttctcaacatactcattcagagcctagactgggagacctttgagcagtattgtgcctggcagctctttctggcccacaatattcccctggagaccataatccccatcctgcagcacctcaaatacaaggagcacccagaggccctgtcctgcctactgcttcaactccgaagagaaaagcccagcgaggagatggtgaagatggtgctgagccggccctgccatcctgacgaccagttcaccaccagcatcctgcggcactggtgcatgaaacatgacgagctgctggccgagcacatcaagtccctgctcatcaagaacaacagcctgcctcgcaagagacagagcctgaggagctctagcagcaagctggcccagctgactctggagcagatcctggagcacttggacaatctgcggctcaacctgaccaacaccaagcagaacttttttagccagacgccaattctccaggcgctgcagcatgtccaagcgagctgtgacgaagcccacaagatgaaattcagtgatctcttctccctggcggaggaatatgaggactcttccaccaagccacccaagagccggcgaaaagcagctctgtccagccctcgaagtcgaaagaatgccacacagccccccaatgccgaagaagagtcgggctccagcagtgcttcagaagaggaagacacgaaaccgaagcctaccaagcggaaacgaaaagggtcctctgcagtgggctctgacagtgactgaggccctgcattccccatcccacccccggctggactgccctctccttcttggtgattcaaaggttaatagaggctgaggagattgcaggggaaacacccttgctgcatccccaagctcccccggtggaaggaggagctttctcctctggctgagtttgagaagctgccatgcagcccctagccccttccctcctcctggggcctccagcccctcacactgctgttcccagtgatatttgggatctgactgaagccagaggctctgtaaaatcagaccatagtggaagtcctcagccccctggccccttccgcaatctcctcccccagtctcccaaagagccatttcaacagagaagggaaatgacaaaggggcagctggccagataagctaggatgagagcagagactcagtgtgtgggtgtcccttcctgcttccccttcaggtcttggtttgttctgaagggacgttttatagtcactatccacatgccagtgtgaaatgggcatctatgacgtggtcagggtgtccattcctaatcatggggcagatgccacaagcattcagaaaggagtctgaaagggtggccacagccccacgtggtgtgccctggaggcttaggttggtctgaggttggcacctcaatctacaccagagcccagggagtcccagaggcaagtttcacagaattgtcaaatgatcccatttccttgagtctgtttttttttttgtttttttttgttttttttttggcagagataatcgtgtcttaaaagttgtttttaaatgacaataaaacaagccagaatgtc

SEQ ID NO: 143128 - DNA, 3404 bp, Homo sapiens; identical to SEQ ID NO: 143127
  Payload ID: 8280
  Gene Symbol: INTS3
  Gene Name: integrator complex subunit 3
  ENST ID: ENST00000575774
  CDS Start-End: 1-843

SEQ ID NO: 143129 - DNA, 478 bp, Homo sapiens; identical to SEQ ID NO: 143126
  Payload ID: 8280
  Gene Symbol: INTS3
  Gene Name: integrator complex subunit 3
  ENST ID: ENST00000624515
  CDS Start-End: 1-126

SEQ ID NO: 143130 - DNA, 3459 bp, Homo sapiens
  Payload ID: 8281
  Gene Symbol: INTS4
  Gene Name: integrator complex subunit 4
  ENST ID: ENST00000433818
  CDS Start-End: 29-427
cggaagctgagagggcccgcgggtaggcatggcggcgcaccttaagaagcgggtttatgaggaattcacgaaagtggttcagccacaggaggaaattgctactaagaaactccgactaacaaaaccaagtaaatctgcagcactccacatagatctgtgtaaagctacctccccagcagatgctttgcaatacttgctccagtttgccaggaagcctgtcgaggcggaaagcgtagagggagtagtcaggattctcttggaacattattacaaggagaatgatccatctgtgagactgaaaattgcatcattgttgggtttattatcaaagacagcaggattttcaccagactgcattatggatgatgccatcaacatcctgcagaatgaaacatctgacagatacgtctcatggtgtaagaaataagtgcctgcagttacttggcaatcttggctctttggagaaaagtgtcacaaaagatgcagaaggcctagctgccagagatgtccagaagattataggggattacttcagtgaccaagacccacgtgtcagaacagcagctataaaagccatgttgcagctccatgaaagaggactgaaattacaccaaacaatttataatcaggcctgtaaattactctctgatgactatgaacaagtgcgcagtgctgcagtccagcttatctgggtcgtcagtcagctctatcctgaaagcattgtcccaattccttcttctaatgaagaaatacgcttagttgatgatgcgtttggcaaaatttgtcacatggtcagtgatggctcttgggtggttcgtgttcaggcagcaaaactgttgggctctatggagcaagtcagttctcatttcttggagcagacccttgacaagaagctgatgtcagatctgaggaggaaacgtactgcacatgagcgtgccaaggaactttacagttcgggggagttttccagtggcagaaagtggggagatgatgctcccaaggaagaagtagataccggggctgtgaacttgattgagtcaggagcttgtggagcttttgttcatgggttggaagatgagatgtatgaggttcgtattgctgctgtggaggccctctgcatgttggcccagtcttcaccctcttttgctgagaagtgccttgatttcctagttgacatgttcaacgatgaaattgaggaagtacgtctgcagtctatacataccatgagaaaaatctctaacaacatcaccctccgagaagatcagcttgacactgtcctggctgtgctagaggattcatccagagatattcgagaggctcttcatgaactcttatgctgtactaatgtttcaaccaaagaagggattcatcttgcattggtggagctgctgaaaaatttaaccaagtaccctactgatagggactccatatggaagtgcttgaagtttctgggaagtcggcatccaaccctggtgcttcccttggtgccagagcttctgagcacccacccattttttgacacagctgaaccagacatggatgatccagcttatattgcagttttggtacttattttcaatgctgctaaaacctgtccaacaatgccagcattgttctcagatcacaccttcaggcactatgcctacctccgagacagtctttctcatcttgttcctgccttgaggttaccaggtagaaaactggtgtcatcagctgtttctcccagcatcatacctcaagaggatccttcccagcagttcctgcagcagagccttgaaagagtgtatagtcttcagcacttggaccctcagggagcccaggagctgctggaattcaccatcagagtcgaggtttcaccatggtggccaggctggtctcaaactcctgagctcaagtgatcctcccgcctcggcctcccaaagtgctggaattacaggcgtgagccactgtgcccggcctaggctcattctttcttctgtcttcatcttctgcatcaagcagcctctgcttaacaattcagatctaactgtgccccctgtattccatcctgtggggaaaaggaaacaggaagagaaaggcatctccttcttgatgtcaaagtccccaggaggcatcgttaactatcgtaacgttacctgccgagcatgagatgggaggaagtgtcatagtccagtggacggttttttccaggctactgtgaaacctgatgtgttatgccggccctgaaacagacagcttcccaagtgactcagaccttaagggatctgcaaagacttggagaacttcaatctgaattggcaggagtagctgatttctctgccacctatcttcgctgtcaactacttctcatcaaggccttgcaggaaaagttgtggaatgtagctgcccctttgtatttgaagcagagtgatttggcctcagcagcagcgaaacagattatggaagagacctacaaaatggaattcatgtacagtggtgtggagaataagcaggtggtgattatacatcacatgaggctgcaggccaaagctttgcaacttatagtaacagcacgaactacacgaggacttgaccccttatttgggatgtgtgaaaaatttttacaggaagtagacttttttcagaggtatttcatcgctgatttgccccacttgcaggacagctttgtggacaaactccttgaccttatgccccgactcatgacatccaaacctgcagaagtggtcaaaattctacagaccatgctgcgacagagtgcctttctgcatctcccgcttccagagcagatccacaaagcctcagccaccatcatcgagccagcgggcgagtcagacaaccctttgcggtttacctctgggttggtggttgccctggatgttgatgcaaccctggagcatgtgcaggatcctcagaacactgttaaggtccaggtcttatatccagatggccaggctcagatgattcaccccaagcctgcagacttccggaatcctggcccagggcggcaccggctcatcactcaggtttatctctcccacaccgcttggacagaggcatgccaggtggaagtgaggctgctgctggcctacaactccagtgctcgcattccaaaatgcccctggatggagggtggtgagatgtcaccacaggtggaaaccagcatcgagggcaccattcccttcagcaagcctgtaaaagtttatataatgcccaaacctgcacggcgctaaggcaaaaacagtcttcccaaccgtggcctagagggcccttcttaggtgtcagaatgagccaagcctgaagcacttcacctggaattgatgtgtaggcttaaggagtatgtgacccttacagtctcatctggtatcaaacacaggataaattgtttcttcattaaaaaataaaaaaccttcaagtctacttacccttctcctgtccacaataaagttgagaaaacaccaa

SEQ ID NO: 143131 - DNA, 1681 bp, Homo sapiens
  Payload ID: 8281
  Gene Symbol: INTS4
  Gene Name: integrator complex subunit 4
  ENST ID: ENST00000534408
  CDS Start-End: 11-301
gcgggtaggcatggcggcgcaccttaagaagcgggtttatgaggaattcacgaaagtggttcagccacaggaggaaattgctactaagaaactccgactaacaaaaccaagtaaatctgcagcactccacatagatctgtgtaaagctacctccccagcagatgctttgcaatacttgctccagtttgccaggaagcctgtcgaggcggaaagcgtagagggagtagtcaggattctcttggaacattattacaagagatggagtctctctgtgttgcccaggctggtcgcgaattcctgagctcaagcaaccctcctgcttggccctcccaaaggattgggattacagacgagaatgatccatctgtgagactgaaaattgcatcattgttgggtttattatcaaagacagcaggattttcaccagactgcattatggatgatgccatcaacatcctgcagaatgaaatctcatcaagtcctagctcaactgctggatactttgcttgcaattggcactaagctaccagagaatcaagctatccaaatgcgattagttgatgtggcctgcaaggtaagagtataaaatctattcagatccatcctaaactggtaactgaggactgctaaggaccattaatggttttaggagctgccttatttttttcatctcttggtgttggattaggaataaagttaagtacacttgttataaagtgtatttcgtcatcctttcaaaacaaatgaaaataattacagtacatagttactgtgtatattgtgcctaataatgcactctgcttgttatggtgctttgtattcagtttttcatttggtcctcacaatccttcaagtaagtaccgttatttctcttttacaaaggtgaaaattaagatttatggagtctgatttgtctaagtttgcacagctaggaggttgcagtaccagggtataaactgtattttttctgaccccaaacttgttttgtttttattatgccttgttgcttcaataaacagaccaactatacacaagtaaatgtatgggaaaagttttgtacgttctttttttctgatttttaaatacatgtattaatacattaattgtgccttttgatttaatttggaggttaattagcctctttgtgtatacacagcaacccctagaaccctgtagaattgattttactttggatctttttgataactttgagaatataaaaaagtcaaatgcatttgaattgtgttagagtattatattcttgaaattagaaagctatctcagagatgcaggaaagattacttgatttatcttaaaacaacaggcatacataaaaccaaaaacactttgacaagtacaatactaaaagcttaaatagggccaggtgcggtggctcacacctataatcccagcactttgggaggcagaggtgggcggatcatttgacatcaggagtttgaaaccagcctgaccaacatggtgaaaccccatctctactaaaaatacaaaaaaaattagccgggcacggtgatgcctgcctgtaatcccagctactagggaggctgaggcaggagaatcgcttgaacctgcaagacggaggttatgtgagtggagattgagccactgcactccagtctgggtgatagagtgagactctgtctttaaaaaaaaaaacaaaaaa

SEQ ID NO: 143132 - DNA, 1845 bp, Homo sapiens
  Payload ID: 8281
  Gene Symbol: INTS4
  Gene Name: integrator complex subunit 4
  Uniprot ID: Q96HW7
  ENST ID: ENST00000529807
  CDS Start-End: 24-1541
gctgagagggcccgcgggtaggcatggcggcgcaccttaagaagcgggtttatgaggaattcacgaaagtggttcagccacaggaggaaattgctactaagaaactccgactaacaaaaccaagtaaatctgcagcactccacatagatctgtgtaaagctacctccccagcagatgctttgcaatacttgctccagtttgccaggaagcctgtcgaggcggaaagcgtagagggagtagtcaggattctcttggaacattattacaaggagaatgatccatctgtgagactgaaaattgcatcattgttgggtttattatcaaagacagcaggattttcaccagactgcattatggatgatgccatcaacatcctgcagaatgaaaagtctcatcaagtcctagctcaactgctggatactttgcttgcaattggcactaagctaccagagaatcaagctatccaaatgcgattagttgatgtggcctgcaagcatctgacagatacgtctcatggtgtaagaaataagtgcctgcagttacttggcaatcttggctctttggagaaaagtgtcacaaaagatgcagaaggcctagctgccagagatgtccagaagattataggggattacttcagtgaccaagacccacgtgtcagaacagcagctataaaagccatgttgcagctccatgaaagaggactgaaattacaccaaacaatttataatcaggcctgtaaattactctctgatgactatgaacaagtgcgcagtgctgcagtccagcttatctgggtcgtcagtcagctctatcctgaaagcattgtcccaattccttcttctaatgaagaaatacgcttagttgatgatgcgtttggcaaaatttgtcacatggtcagtgatggctcttgggtggttcgtgttcaggcagcaaaactgttgggctctatggagcaagtcagttctcatttcttggagcagacccttgacaagaagctgatgtcagatctgaggaggaaacgtactgcacatgagcgtgccaaggaactttacagttcgggggagttttccagtggcagaaagtggggagatgatgctcccaaggaagaagtagataccggggctgtgaacttgattgagtcaggagcttgtggagcttttgttcatgggttggaagatgagatgtatgaggttcgtattgctgctgtggaggccctctgcatgttggcccagtcttcaccctcttttgctgagaagtgccttgatttcctagttgacatgttcaacgatgaaattgaggaagtacgtctgcagtctatacataccatgagaaaaatctctaacaacatcaccctccgagaagatcagcttgacactgtcctggctgtgctagaggattcatccagagatattcgagaggctcttcatgaactcttatgctgtactaatgtttcaaccaaagaagggattcatcttgcattggtggagctgctgaaaaatttaaccaagtaccctactgatagggactccatatggaagtaatgacttttttgcccatttactcactgagtcccataatgtggtaaatgtataatgctgacatttgttccgtccttatagattgaggatagtacggccctgaattttgcctttactttagaaacctgattcaacttaaccgaactctcaggaatctgattcctaagctgagtatcacattttagattacttactaatttgtgcatctatccacctagcaaatattatgtgcctgctgtgtgctgactatgcaccaacccttgtggtagctgttacaagtatagaaataaattaattagatttcctc

SEQ ID NO: 143133 - DNA, 3156 bp, Homo sapiens
  Payload ID: 8281
  Gene Symbol: INTS4
  Gene Name: integrator complex subunit 4
  Uniprot ID: Q96HW7
  ENST ID: ENST00000534064
  CDS Start-End: 36-2927
tagtgtacggaagctgagagggcccgcgggtaggcatggcggcgcaccttaagaagcgggtttatgaggaattcacgaaagtggttcagccacaggaggaaattgctactaagaaactccgactaacaaaaccaagtaaatctgcagcactccacatagatctgtgtaaagctacctccccagcagatgctttgcaatacttgctccagtttgccaggaagcctgtcgaggcggaaagcgtagagggagtagtcaggattctcttggaacattattacaaggagaatgatccatctgtgagactgaaaattgcatcattgttgggtttattatcaaagacagcaggattttcaccagactgcattatggatgatgccatcaacatcctgcagaatgaaaagtctcatcaagtcctagctcaactgctggatactttgcttgcaattggcactaagctaccagagaatcaagctatccaaatgcgattagttgatgtggcctgcaagcatctgacagatacgtctcatggtgtaagaaataagtgcctgcagttacttggcaatcttggctctttggagaaaagtgtcacaaaagatgcagaaggcctagctgccagagatgtccagaagattataggggattacttcagtgaccaagacccacgtgtcagaacagcagctataaaagccatgttgcagctccatgaaagaggactgaaattacaccaaacaatttataatcaggcctgtaaattactctctgatgactatgaacaagtgcgcagtgctgcagtccagcttatctgggtcgtcagtcagctctatcctgaaagcattgtcccaattccttcttctaatgaagaaatacgcttagttgatgatgcgtttggcaaaatttgtcacatggtcagtgatggctcttgggtggttcgtgttcaggcagcaaaactgttgggctctatggagcaagtcagttctcatttcttggagcagacccttgacaagaagctgatgtcagatctgaggaggaaacgtactgcacatgagcgtgccaaggaactttacagttcgggggagttttccagtggcagaaagtggggagatgatgctcccaaggaagaagtagataccggggctgtgaacttgattgagtcaggagcttgtggagcttttgttcatgggttggaagatgagatgtatgaggttcgtattgctgctgtggaggccctctgcatgttggcccagtcttcaccctcttttgctgagaagtgccttgatttcctagttgacatgttcaacgatgaaattgaggaagtacgtctgcagtctatacataccatgagaaaaatctctaacaacatcaccctccgagaagatcagcttgacactgtcctggctgtgctagaggattcatccagagatattcgagaggctcttcatgaactcttatgctgtactaatgtttcaaccaaagaagggattcatcttgcattggtggagctgctgaaaaatttaaccaagtaccctactgatagggactccatatggaagtgcttgaagtttctgggaagtcggcatccaaccctggtgcttcccttggtgccagagcttctgagcacccacccattttttgacacagctgaaccagacatggatgatccagcttatattgcagttttggtacttattttcaatgctgctaaaacctgtccaacaatgccagcattgttctcagatcacaccttcaggcactatgcctacctccgagacagtctttctcatcttgttcctgccttgaggttaccaggtagaaaactggtgtcatcagctgtttctcccagcatcatacctcaagaggatccttcccagcagttcctgcagcagagccttgaaagagtgtatagtcttcagcacttggaccctcagggagcccaggagctgctggaattcaccatcagggatctgcaaagacttggagaacttcaatctgaattggcaggagtagctgatttctctgccacctatcttcgctgtcaactacttctcatcaaggccttgcaggaaaagttgtggaatgtagctgcccctttgtatttgaagcagagtgatttggcctcagcagcagcgaaacagattatggaagagacctacaaaatggaattcatgtacagtggtgtggagaataagcaggtggtgattatacatcacatgaggctgcaggccaaagctttgcaacttatagtaacagcacgaactacacgaggacttgaccccttatttgggatgtgtgaaaaatttttacaggaagtagacttttttcagaggtatttcatcgctgatttgccccacttgcaggacagctttgtggacaaactccttgaccttatgccccgactcatgacatccaaacctgcagaagtggtcaaaattctacagaccatgctgcgacagagtgcctttctgcatctcccgcttccagagcagatccacaaagcctcagccaccatcatcgagccagcgggcgagtcagacaaccctttgcggtttacctctgggttggtggttgccctggatgttgatgcaaccctggagcatgtgcaggatcctcagaacactgttaaggtccaggtcttatatccagatggccaggctcagatgattcaccccaagcctgcagacttccggaatcctggcccagggcggcaccggctcatcactcaggtttatctctcccacaccgcttggacagaggcatgccaggtggaagtgaggctgctgctggcctacaactccagtgctcgcattccaaaatgcccctggatggagggtggtgagatgtcaccacaggtggaaaccagcatcgagggcaccattcccttcagcaagcctgtaaaagtttatataatgcccaaacctgcacggcgctaaggcaaaaacagtcttcccaaccgtggcctagagggcccttcttaggtgtcagaatgagccaagcctgaagcacttcacctggaattgatgtgtaggcttaaggagtatgtgacccttacagtctcatctggtatcaaacacaggataaattgtttcttcattaaaaaataaaaaaccttcaagtctacttacccttctcctgtccacaataaagttgagaaaacaccaa

SEQ ID NO: 143134 - DNA, 956 bp, Homo sapiens
  Payload ID: 8281
  Gene Symbol: INTS4
  Gene Name: integrator complex subunit 4
  ENST ID: ENST00000527522
  CDS Start-End: 28-318
ggaagctgagagggcccgcgggtaggcatggcggcgcaccttaagaagcgggtttatgaggaattcacgaaagtggttcagccacaggaggaaattgctactaagaaactccgactaacaaaaccaagtaaatctgcagcactccacatagatctgtgtaaagctacctccccagcagatgctttgcaatacttgctccagtttgccaggaagcctgtcgaggcggaaagcgtagagggagtagtcaggattctcttggaacattattacaagagatggagtctctctgtgttgcccaggctggtcgcgaattcctgagctcaagcaaccctcctgcttggccctcccaaaggattgggattacagacgtgagctaccacatctgaccaaaatcaggatttctgttctcaagaagttttcgatctctcagtgatctattttccgttagtctttttcttagcaatatctaccattattattatattaaagatctgttaccaataatcatctataataatacttcttagagcagttaacattatattgcttgttagagtttgaaagcactttccatatgtaatattttatttaatcctggtgacagcaccattgttatctctaaattccagatatggaactaagcttagagctgtttagtatccaaggtcacccagctagtaaatggaaggtatggatttgaacttgggttttttttttaaaaaaccttttgttatggaacatttcagatatatactatgtaagtaaagagaatagtttaattaattcccatgtacccattacctggcttcaaaaattatcattttgtggccaaacttgtttcattttccctcttccccaatccacttctacttctttaccctcaccttctccaccagattcttatgaaaataaattcctggcatcatattattttaatcataaattttgatttatat

SEQ ID NO: 143135 - DNA, 556 bp, Homo sapiens
  Payload ID: 8281
  Gene Symbol: INTS4
  Gene Name: integrator complex subunit 4
  ENST ID: ENST00000524766
  CDS Start-End: 23-313
ctgagagggcccgcgggtaggcatggcggcgcaccttaagaagcgggtttatgaggaattcacgaaagtggttcagccacaggaggaaattgctactaagaaactccgactaacaaaaccaagtaaatctgcagcactccacatagatctgtgtaaagctacctccccagcagatgctttgcaatacttgctccagtttgccaggaagcctgtcgaggcggaaagcgtagagggagtagtcaggattctcttggaacattattacaagagatggagtctctctgtgttgcccaggctggtcgcgaattcctgagctcaagcaaccctcctgcttggccctcccaaaggattgggattacagacgtgagctaccacatctgaccaaaatcaggatttctgttctcaagaagttttcgatctctcagtgatctattttccgagaatgatccatctgtgagactgaaaattgcatcattgttgggtttattatcaaagacagcaggattttcaccagactgcattatggatgatgccatcaacatcctgcagaatgaaa

SEQ ID NO: 143136 - DNA, 1382 bp, Homo sapiens
  Payload ID: 8281
  Gene Symbol: INTS4
  Gene Name: integrator complex subunit 4
  Uniprot ID: Q96HW7
  ENST ID: ENST00000535943
  CDS Start-End: 139-1155
aggcatctccttcttgatgtcaaagtccccaggaggcatcgttaactatcgtaacgttacctgccgagcatgagatgggaggaagtgtcatagtccagtggacggttttttccaggctactgtgaaacctgatgtgttatgccggccctgaaacagacagcttcccaagtgactcagaccttaagggatctgcaaagacttggagaacttcaatctgaattggcaggagtagctgatttctctgccacctatcttcgctgtcaactacttctcatcaaggccttgcaggaaaagttgtggaatgtagctgcccctttgtatttgaagcagagtgatttggcctcagcagcagcgaaacagattatggaagagacctacaaaatggaattcatgtacagtggtgtggagaataagcaggtggtgattatacatcacatgaggctgcaggccaaagctttgcaacttatagtaacagcacgaactacacgaggacttgaccccttatttgggatgtgtgaaaaatttttacaggaagtagacttttttcagaggtatttcatcgctgatttgccccacttgcaggacagctttgtggacaaactccttgaccttatgccccgactcatgacatccaaacctgcagaagtggtcaaaattctacagaccatgctgcgacagagtgcctttctgcatctcccgcttccagagcagatccacaaagcctcagccaccatcatcgagccagcgggcgagtcagacaaccctttgcggtttacctctgggttggtggttgccctggatgttgatgcaaccctggagcatgtgcaggatcctcagaacactgttaaggtccaggtcttatatccagatggccaggctcagatgattcaccccaagcctgcagacttccggaatcctggcccagggcggcaccggctcatcactcaggtttatctctcccacaccgcttggacagaggcatgccaggtggaagtgaggctgctgctggcctacaactccagtgctcgcattccaaaatgcccctggatggagggtggtgagatgtcaccacaggtggaaaccagcatcgagggcaccattcccttcagcaagcctgtaaaagtttatataatgcccaaacctgcacggcgctaaggcaaaaacagtcttcccaaccgtggcctagagggcccttcttaggtgtcagaatgagccaagcctgaagcacttcacctggaattgatgtgtaggcttaaggagtatgtgacccttacagtctcatctggtatcaaacacaggataaattgtttcttcattaaaaaataaaaaaccttcaagtctacttacccttctcctgtccacaataaagttgagaaaacacc

SEQ ID NO: 143137 - DNA, 3285 bp, Homo sapiens
  Payload ID: 8282
  Gene Symbol: INTS5
  Gene Name: integrator complex subunit 5
  Uniprot ID: Q6P9B9
  ENST ID: ENST00000330574
  CDS Start-End: 54-3113
atgcgccgcctgcgctccgccgctcgcgcctcgggctcggctcgggctccgggatgtccgcgctgtgcgaccctcccggggccccagggccacctgggcctgccccggccacccacggtcccgcgcctctcagtgctcaggagctgtcccaggaaatcaaggcttttctgactggcgtagaccccattctgggccaccaactctcagcccgggaacatgctcgctgtggtcttctcctgctccgttctttgccacctgctcgggctgctgtgcttgaccacttgagaggtgtctttgatgagagtgtccgggcccacctggctgccctggatgaaacccctgtggctggtccacctcacctccgtccacctccaccctctcatgtccctgctggtggacctggtctagaggatgtggttcaggaagtgcagcaggtgctgtctgagtttatccgggccaacccaaaggcctgggcacctgtgattagtgcatggtccattgacctcatggggcaactgagcagcacgtactcaggccagcaccagcgtgttccccacgctactggcgctcttaatgaactgctacagctgtggatgggttgtagggccacgcgtacattaatggacatctatgtgcagtgcctctcggctctcattggtagctgcccagatgcgtgtgtggatgccttgctggatacctctgttcagcattctccacactttgactgggttgtggcacatattggctcctcttttcctggcaccatcatttcccgggttctctcctgtggccttaaggacttttgtgtccatggtggggctggaggtggagctggcagtagtggtggaagctcttctcagaccccctctacagaccccttccctggatctcctgccattcctgcggagaaacgggtgcccaagattgcctcagttgtaggcatcctaggtcacctggcctcccgccacggagatagcatccgacgggagctcctgcgaatgttccatgatagcctggcagggggatctggaggccgcagtggggacccctcccttcaggccacggttccgttcctactgcagctggcagtcatgtcaccagctttgctgggcactgtctctggagagcttgtggattgcctcaagcccccagctgtgctgagccagctgcagcaacaccttcaaggattcccccgagaggagctggacaacatgttgaacctggctgtgcacctggtgagccaggcctctggggcaggtgcctaccgcttgctgcagttcctggtggacacagctatgcctgcttcggtcattaccacccagggcctggctgtgccagacaccgtgcgtgaggcttgtgaccggctaatccagctgctgctgctgcacctgcaaaaactggttcatcaccggggagggtctcctggggaaggggtgctaggcccgcccccacctccccgcttggtgccctttttagatgcgctcaaaaaccatgttggagagctgtgtggagagacgttacgattggaacggaagcgcttcctctggcagcaccagctcttgggcctgctgtctgtctatacccggcctagctgtggacctgaggccttgggccatctgctgagccgagcccgaagccctgaagagttgagtttggccacccagttatatgcagggctagtggtcagcctctctggcctcctgcccctggctttccgaagctgtctggctcgggtgcatgcagggacattacagcctcccttcacggcccggttcctgcgcaacttggcactgctagtagggtgggaacagcagggtggcgagggccctgcagccctaggggcgcactttggggaatctgcctcagcccatctgtctgacctggctcctctcctgctacatcctgaggaggaagtagctgaagctgctgcctctctcctggccatttgtccctttccttctgaagccttatccccctcccagctcctgggactggtaagggctggggtgcaccgcttctttgcctctctgaggctgcatggacccccaggtgtggcctcagcctgtcagcttctcacccgcctgtctcagacatccccagctgggctcaaggctgtcctgcagctgctggttgaaggagccttacatcgaggcaacacagaactgtttggtgggcaagtagatggggacaatgagactctctcagttgtttcagcttctttggcttctgcctccctgttggacactaaccggaggcacactgcagctgtgccaggtcctggagggatttggtcagttttccatgctggagtcatcggccgtggcttaaagccacccaagtttgtccagtcacgaaatcagcaggaagtgatctataacacccagagcctcctcagcctcctggttcactgctgcagtgccccagggggcactgaatgtggggaatgctggggggcacccatcttgagtccagaggcagccaaagcagtggcagtgaccttggtggagagtgtgtgtcccgatgcagctggtgcagagctggcctggccccccgaggaacacgcccgggccaccgtggagcgggatctccgcattggccggcgcttccgcgaacagcccctgctctttgagctgttaaagctggtagcagctgcacccccagccctgtgctactgttccgtgctgcttcgggggctgctggccgccctcttgggccattgggaagcctctcgccaccctgacacgacccactccccctggcacctggaggcatcctgcaccttagtggctgtcatggctgagggaagcctcctgcctccggccctgggtaatatgcatgaagtatttagccaactggcacctttcgaggtgcgtctgctgctgctcagtgtctggggttttctccgggagcatgggcccttgcctcagaagttcatcttccaatcagagcggggtcgcttcattcgggacttctccagggagggtggaggtgagggtggaccccatctggctgtgctgcacagtgtcctccaccgcaacatcgaccgcctaggtcttttctctggccgtttccaggcaccttcaccgtccactctccttcgacaggggacgtagccttttcttgctctggaagcccagggaggttgagcagtgagagagggaagggactaacgtgctccggaagggtggaggtttctcttctaagtccttggtctaaagagcgctgtcacttttttctctcccacttttttttttctaaataaaatttgccaacttgagaaaacca

SEQ ID NO: 143138 - DNA, 3662 bp, Homo sapiens
  Payload ID: 8283
  Gene Symbol: INTS6
  Gene Name: integrator complex subunit 6
  Uniprot ID: Q9UL03
  ENST ID: ENST00000311234
  CDS Start-End: 474-3137
gccggggtgcggagggagtccctgaaacttctcccaacagccccagggccaatcttccctcagcccactcccctcttcgccagctcccaggtccccactcctgtaccgggggtggggtggggagccaggcccgtctcccgctgggacacacacaggggccgggagcggggacgggacccccgaggcgggggggacgaaccgacagacagacggctgggcgcccgccccagcgggcaggcaggcaggaggaggcggaggcgggggtacgacggggagcactgggtctggggagtttcctctcaactatcgggggagaaactccccgcagccggaggaaagacccagacagtgttttcctcccgggggccgtgctcccccgccccgcgtagcggcggtcgccgccaccggcgcctccacctctaccatctcctctttctccaccacctcgggccccggtgtccccggccagcactatgcccatcttactgttcctgatagacacgtctgcctctatgaaccagcgcagccatctgggcaccacctacctggacacggccaaaggcgcggtagagaccttcatgaagctccgtgcccgggaccctgccagcagaggagacaggtatatgctggtcactttcgaagagccgccctatgctatcaaggctggatggaaagaaaaccatgcaacgtttatgaatgaattgaaaaaccttcaggctgaaggacttacgactcttggccaatccctaaggacagcttttgatttattaaatttaaatagattagtaactggcatagacaactatgggcagggaagaaacccttttttcttggagccagcaataattatcacaattactgatgggagcaagttgactaccaccagtggagtccaggatgagcttcatttacctcttaattctcctttgcctggaagtgaattgaccaaggaaccttttcgttgggatcagagactctttgcattagtgttgcggttgcctggcaccatgtcagtagaatcagaacagttgacaggtgtgcctttagatgactctgcaatcacaccaatgtgtgaagtgacaggcggccgttcatattctgtgtgttctccaagaatgcttaatcagtgtctggagtccttggtgcagaaagtacaaagtggggtggtaataaactttgaaaaagcaggaccagatccttcccctgtagaagatgggcagccagatatatcaaggccttttggatctcagccttggcatagctgtcacaaactcatatatgtcagaccaaatcctaaaactggggttcctataggtcattggcctgttccagagtctttttggccagatcaaaattcgccaacactaccacctcgtacatctcatcctgtagtgaagttttcctgtacagactgtgaaccaatggttattgataaacttccttttgacaaatatgagttggaaccttcaccactgactcaatttatcctggaaaggaaatctcctcaaacatgttggcaggtgtacgtgagcaatagtgcaaaatacagtgaacttggtcatccttttggttacttgaaagccagtacagcactgaactgtgtcaacttatttgtgatgccttacaattatccagtccttcttcccctcttagatgacttgtttaaagtgcataaagcaaaaccaacattgaagtggagacagtcatttgaaagttatttgaagacaatgcctccctactatcttgggcccttgaagaaagctgttaggatgatgggagcacctaacctaatagcagacagtatggaatatggacttagttacagtgtcatttcatacctcaaaaaactgagtcaacaggccaaaatagaatctgatcgagtcattggatctgtaggcaaaaaagtagtacaggagactggaataaaagtccggagccgatcacatggtttatcaatggcatataggaaagattttcaacaactcctccagggaatttcagaggatgtccctcacagactgctagaccttaatatgaaggaatacactgggttccaagttgctttgctgaataaggatttgaagccacagacatttagaaatgcttatgacataccaagacgaaatcttttggatcacttaacaagaatgagatctaatcttttgaagagcactcgcagatttctgaaaggacaggacgaagatcaagtgcacagtgttcctatagcacaaatggggaactaccaggaatacctcaagcaagtaccttctccactaagagaacttgatcctgatcagccacgaaggttgcatacatttggcaacccctttaagctggataagaagggtatgatgatagatgaagcagatgaatttgtggctggacctcaaaataaacataaacgacccggagaaccaaatatgcaagggatccctaaaagacgtcggtgtatgtctccactactaagaggcagacagcagaatcctgttgtaaacaatcatattgggggaaaaggaccacctgcacctacaactcaagcacagccagatcttattaaacctcttcctcttcataaaatttcagaaaccactaatgattcgataatacatgatgtggttgaaaatcatgttgcagaccaactttcatcagacattacaccaaatgctatggatacggaattttcagcatcttctccagccagtttactggaacggccaaccaatcatatggaggctcttggtcatgaccatttaggaaccaatgacctcactgttggtggatttttagaaaatcatgaggagccaagagataaagaacaatgtgctgaagagaacataccagcatcttcactcaacaaaggaaagaaattgatgcattgcagaagccatgaagaggtcaatactgaactaaaagcacaaataatgaaagagatccgaaagccaggaagaaaatatgaaagaatcttcactttactgaagcatgtgcaaggcagtttacaaacaagactaatatttttacaaaatgtcattaaagaagcatcaaggtttaaaaaacgaatgctaatagaacaactggagaacttcttggatgaaattcatcgaagagccaatcagatcaaccatattaatagcaattaaaagaaaatagaatgtggccacttatttcactatcttcttcaaatacaaagtaaatacaagactgttgtgatcttgcattcattttctgacatgcattgttggctatttgaaatactaaaagcaaatctacagatcctttttccatcattttacagtgaccttttcttcattttggtttatttttgtaatgtgaaaagtatcactctaaaaaacatttttaatttaacaaactaaaaatattcctccaaatctcttgcttgtcattgactcttgcgtgtcaatttccctcaggttctattttcttaaaccaacctttaaaattgtcacctctgttaaggttgaactttgccaaaaaaaaaagaagttactttgtaatttttggggaaaaaagcacatacattaaaactaggtaatgttttgtatatacagttattttggatatattattgtaagttgtacaaatgtattttgaagaatatttaagaaaagcacttttgttattccatcaataaatgctctatttta

SEQ ID NO: 143139 - DNA, 7041 bp, Homo sapiens
  Payload ID: 8283
  Gene Symbol: INTS6
  Gene Name: integrator complex subunit 6
  Uniprot ID: Q9UL03
  ENST ID: ENST00000398119
  CDS Start-End: 230-2854
agccggcctacaagcttcccccgcccctgagctgtttaaatatgctaatgaaaggatagggcctgaccagtagaacggcgaggcggtgtatcacgtggctcggggacgtgtcaggggcggagcctccgcagcccctgcccgagttaaaaccggagtgtgagagagaaaagcgcttcagtagcgagaggggctgagaaagtggtgacaccgccgggacacgtctgcctctatgaaccagcgcagccatctgggcaccacctacctggacacggccaaaggcgcggtagagaccttcatgaagctccgtgcccgggaccctgccagcagaggagacaggtatatgctggtcactttcgaagagccgccctatgctatcaaggctggatggaaagaaaaccatgcaacgtttatgaatgaattgaaaaaccttcaggctgaaggacttacgactcttggccaatccctaaggacagcttttgatttattaaatttaaatagattagtaactggcatagacaactatgggcagggaagaaacccttttttcttggagccagcaataattatcacaattactgatgggagcaagttgactaccaccagtggagtccaggatgagcttcatttacctcttaattctcctttgcctggaagtgaattgaccaaggaaccttttcgttgggatcagagactctttgcattagtgttgcggttgcctggcaccatgtcagtagaatcagaacagttgacaggtgtgcctttagatgactctgcaatcacaccaatgtgtgaagtgacaggcggccgttcatattctgtgtgttctccaagaatgcttaatcagtgtctggagtccttggtgcagaaagtacaaagtggggtggtaataaactttgaaaaagcaggaccagatccttcccctgtagaagatgggcagccagatatatcaaggccttttggatctcagccttggcatagctgtcacaaactcatatatgtcagaccaaatcctaaaactggggttcctataggtcattggcctgttccagagtctttttggccagatcaaaattcgccaacactaccacctcgtacatctcatcctgtagtgaagttttcctgtacagactgtgaaccaatggttattgataaacttccttttgacaaatatgagttggaaccttcaccactgactcaatttatcctggaaaggaaatctcctcaaacatgttggcaggtgtacgtgagcaatagtgcaaaatacagtgaacttggtcatccttttggttacttgaaagccagtacagcactgaactgtgtcaacttatttgtgatgccttacaattatccagtccttcttcccctcttagatgacttgtttaaagtgcataaagcaaaaccaacattgaagtggagacagtcatttgaaagttatttgaagacaatgcctccctactatcttgggcccttgaagaaagctgttaggatgatgggagcacctaacctaatagcagacagtatggaatatggacttagttacagtgtcatttcatacctcaaaaaactgagtcaacaggccaaaatagaatctgatcgagtcattggatctgtaggcaaaaaagtagtacaggagactggaataaaagtccggagccgatcacatggtttatcaatggcatataggaaagattttcaacaactcctccagggaatttcagaggatgtccctcacagactgctagaccttaatatgaaggaatacactgggttccaagttgctttgctgaataaggatttgaagccacagacatttagaaatgcttatgacataccaagacgaaatcttttggatcacttaacaagaatgagatctaatcttttgaagagcactcgcagatttctgaaaggacaggacgaagatcaagtgcacagtgttcctatagcacaaatggggaactaccaggaatacctcaagcaagtaccttctccactaagagaacttgatcctgatcagccacgaaggttgcatacatttggcaacccctttaagctggataagaagggtatgatgatagatgaagcagatgaatttgtggctggacctcaaaataaacataaacgacccggagaaccaaatatgcaagggatccctaaaagacgtcggtgtatgtctccactactaagaggcagacagcagaatcctgttgtaaacaatcatattgggggaaaaggaccacctgcacctacaactcaagcacagccagatcttattaaacctcttcctcttcataaaatttcagaaaccactaatgattcgataatacatgatgtggttgaaaatcatgttgcagaccaactttcatcagacattacaccaaatgctatggatacggaattttcagcatcttctccagccagtttactggaacggccaaccaatcatatggaggctcttggtcatgaccatttaggaaccaatgacctcactgttggtggatttttagaaaatcatgaggagccaagagataaagaacaatgtgctgaagagaacataccagcatcttcactcaacaaaggaaagaaattgatgcattgcagaagccatgaagaggtcaatactgaactaaaagcacaaataatgaaagagatccgaaagccaggaagaaaatatgaaagaatcttcactttactgaagcatgtgcaaggcagtttacaaacaagactaatatttttacaaaatgtcattaaagaagcatcaaggtttaaaaaacgaatgctaatagaacaactggagaacttcttggatgaaattcatcgaagagccaatcagatcaaccatattaatagcaattaaaagaaaatagaatgtggccacttatttcactatcttcttcaaatacaaagtaaatacaagactgttgtgatcttgcattcattttctgacatgcattgttggctatttgaaatactaaaagcaaatctacagatcctttttccatcattttacagtgaccttttcttcattttggtttatttttgtaatgtgaaaagtatcactctaaaaaacatttttaatttaacaaactaaaaatattcctccaaatctcttgcttgtcattgactcttgcgtgtcaatttccctcaggttctattttcttaaaccaacctttaaaattgtcacctctgttaaggttgaactttgccaaaaaaaaaagaagttactttgtaatttttggggaaaaaagcacatacattaaaactaggtaatgttttgtatatacagttattttggatatattattgtaagttgtacaaatgtattttgaagaatatttaagaaaagcacttttgttattccatcaataaatgctctattttactcttgtgtggtttaggaaataatcacatttaaagtaatcatttaaaaacatcctaagataatggaattttaaaggccttgctttttagcattggaaaaatacaccacttgaagttcatgtttgttaagcctaactgtaattacatgttacataatctgcattgcctttttactatatgttcgtagtttttgttggccatgccaacatactcccatttctgcctagattatgggaatgactttgtatggggcagatagacagatactttaaaagctatttaaaaagcaaacaactttggatattattggtttccttacttcaacaccttttcctttatcactaggattgtggatggcacgaagctgaagctgttagggagtggtaggtttggagtacagtacatgctctgaaatatctagcctttagcagcttcatgccatgcttgcaaaagcccacaacaaattggaggcctccttgttctgctctgctgttctcacacttaaactctgttttatttataagctaaatggaaaggaaacacctttaagatgactttgctcattttgcatcccccctgagtttcacaggataaggaaaaccacgctattcattctccaccctcaattcaacatggcctagagtatccgtactgaggaagcaatcttatggcctgactcactcaccattcatgatcactgctgtgccttttagtggtttggggggtaagcagtagaaaagaaggtcaaaatagatttggattaagagtaggcaaaataaacttataacatttaaaaactgaagtatttttaggtttataatattgaaaatcacatacccttagctttttacactttatcagacatttttttaaatttcaagggtatagcaaaatgaaattataactttatgaagaaaagcattgatgaaagtggagaacatgcatttagtctaggggatttgaaactctcccaatactgaagacaaaccctgtcaagaaaaagaagaatttaatattatatagtattttcatatgcagttctttaagctttgtttacttctatacaaatacttttaagtaatgcaagataacatttaatagatggaattgttaaggtaattgcctgtagtcacattgctaaattcattgagagttacacaaaatccagaatatattgtctgttcctaaattatatatatttagattctggaattactaggaggaattagaagtcattcagataaaaattcatacttaacaagagtatctaggaaagagattcagcccatcccaatattgagcagctttccttatcagaaagttttattttctgtttcacagattgctcatgacctttaatacatttttctgaatgaaccctggagggaggtgagaagtagcagttttgttcatctcttctttttgtcctttatctctctgccactgttctcacctcatcctaaaacctggtcaggagggtttgaaacctatcagaactaaaggttaatatctcatctccctcaggcttttttcatttaaaaaaaaaatgggtatattagttaaattagaatacttgttgtagaattattgtcaaaggggaagggaaatacatctaggggaaacatcatgtcttttaggccctttatgtcactgaatgacttaaggctcgacaaatgatattcttggaaagtttaatcttgaggttttcaaatctttttttttaatgtctcccatgtttctcatttgctgattgattcattagttgctcttagtaagatttgtcagttggaaataatgaaggctgagactcatttctaaactcttccataaccatcaccagaagagcagccactgtgttgtgtgatgtaggctaatgcctcccagatagaggtaaagtcacaaggactattagaattccagtggattgtggaactggttttggattatccttatattttcattctgattactgaggcagttctgaaaactcctaccattgaaatagtggtgtgtcttttccttgtttaaggattttacatcatttttatgcacttgaattccaaaatcagaatctctcttttacctatcaacctttattggctattggcttttggcaatgacctttctgttcaaatgtagtcctgtctctttgtttccttagggagtagaacctgtcctttttctcatctttcatttttttgacgtgtcctttctaagagaaggctctctgccgcctgttctgggtgataagtgatattttcatctaatcgttatgtggttgggatgatcatggtgaaatactaggaagacatactctgttgatggactttttctctccaaataatcccaaatagattattttctagtgaatggtttatatctttctcgtcacaaaaatgttcctttgatttctagcacaaggtacagcaggatgcaaatgattctcagataaaatgatgttgacagtatttccttaacaatttatgtaaaactatgcataattttcattctaacttttgacatttttctccataaataaaagtaatgcctgatgtttagttaaagtagatccacctttgcttgattttattagtcttgttctatcctatttctttttaatacactgtttagacttgccaacaactcttaactgagaatctcttttccttcctaggctaagtaattgtgagtgggggaggaagaacattaagagaaataatctaaagactttgttcaatattgtcgaagcctaagaatatttgtgtgtccttctgatgtactgaggctttgccggtaccacaccatctttggattaccataaggttatgtagtaggacttaaaagtactagggcaaacatttgatttttgagaaagatcaacagaacagtatagaaatccaggtgcattcattagaatactaggatcacaagaggactactctggtgtactctagtgacctgaaaaaactctaaaatgataagaaagctaggggacaaagggaaaaaagggcaagatttataatttattttactttcatgatttttccaagtgtcttcagaagtagaaacctatagcattaaaaaaaaaaatctacattaactatatatgagctgagagaatgagaaggtaaaaaacatggaggataagtttcctttgtacttacgaaatagtcccctttcttaggatagaagatagcaactgggtagcttctgaagcaccataaaaacagctagaaagaatgcttatttttgaggggatagtggacaaatgagcccttgttgctagagagacactgataaattatctgaatcctgtcaaaaaatactgtaatacctgtgttaggttctctcaggaaatagatgaatggccgatctgctttaaaaataggaatccgagaccttttcaataacaacagagctgcaggaaagaaagaaaaattccattgcattttctgtgcatttttaagaaaataactattggttatgaagtaagttaattttttaagaaatcaaagcatcctaatggcatttgattgtttactgttgtgatgggggtgcagatgggaaaattaaagagaaaagatgccatttagccaatcctgtctcctgttttcaacacattccatggaataaattccttattgaaggtaactttcagaatta

SEQ ID NO: 143140 - DNA, 15428 bp, Homo sapiens
  Payload ID: 8283
  Gene Symbol: INTS6
  Gene Name: integrator complex subunit 6
  Uniprot ID: Q9UL03
  ENST ID: ENST00000442263
  CDS Start-End: 491-838
gagaaagtggtgacaccgccggggtgcggagggagtccctgaaacttctcccaacagccccagggccaatcttccctcagcccactcccctcttcgccagctcccaggtccccactcctgtaccgggggtggggtggggagccaggcccgtctcccgctgggacacacacaggggccgggagcggggacgggacccccgaggcgggggggacgaaccgacagacagacggctgggcgcccgccccagcgggcaggcaggcaggaggaggcggaggcgggggtacgacggggagcactgggtctggggagtttcctctcaactatcgggggagaaactccccgcagccggaggaaagacccagacagtgttttcctcccgggggccgtgctcccccgccccgcgtagcggcggtcgccgccaccggcgcctccacctctaccatctcctctttctccaccacctcgggccccggtgtccccggccagcactatgcccatcttactgttcctgatagacacgtctgcctctatgaaccagcgcagccatctgggcaccacctacctggacacggccaaaggcgcggtagagaccttcatgaagctccgtgcccgggaccctgccagcagaggagacaggtatatgctggtcactttcgaagagccgccctatgctatcaaggctggatggaaagaaaaccatgcaacgtttatgaatgaattgaaaaaccttcaggctgaaggacttacgactcttggccaatccctaaggacagcttttgatttattaaatttaaatagattagtaactggcatagacaactatgggcaggtaggttgaataataaggtggcaaaatagttgatttttcattttgtggaaaaacacagtccagtccaaaaactacataacatgaaatgcaagtataaaacattccaaattaaaatagaatatgcacattgttcaaaggcaaaactcttaccctactatatatattttacatccctcattttttccccctctaaaatgcattggtattcaggattagaatctgaaacttttgctataaagttgacatacattggttttaatcccttgaaagttcagtaaagacctaaaaggaaaagcatcctaccacaccacactcatgttgtatgtgcaactattatagtggcttagagacactagttcgtgttcttcgtttctatattagtaaagatgttagaggaaattaatctgtttgttgcatcagggtttaatgtgaccatgttgtataactattctgaaaggtaagaagtttttcactggagtacagtcactggctgagaacatttaagttttcttttgaagcatacacagttaacaactattgcaggaagaactctgaattaaatttcaggcccagagttttgatttaaactccaaacccttggaaaaaaagactgctggaaaatatgaaagaacccttcgtttcttaacccccacaagtccttttattgcacttactttcatgtatttgaggatgagaggagctttaaatcaacaataattcactaaggaataatgcaaggtggtctattgtaacattttatgatattattgccctggaaataaaagatactgaacaatgtataatgttacatgtaacaaaggaatattatttccaaggagctcagttcttatgttgtagtgaaaagcactattcctaattatatattgggtatatgttgtattttcccaagtcccacagtccctagttttgtgagtttcgtacatttcagggaaattctttctgtgactacaacttttatttgcttcctattgaaggaaattgacttgtttctgttttaggaaattttaagcttcttagggataacttcagtgcttaagtgtctttggaaataactgaatttagttctataacatttaaaatgtacactgaaattcagagtgagcttaccaaattgaacttccaacgtttagttaggtaaatatgtactttcttaccacattaatacttttatgtttttcccatctctgctgcttttattttgcaacttttaataatttaggtagatttgcaatgaactttttggtttgtttctgtaaaatagtagtggatttccttctcttttatattcctttgtgatatgtagtgcaacacagtcttactgcttaaggttttcatccttacctctttgagttcaaagagatatttaaaacttgccattatttggttacctttatttggttgtcatgttgttagtgtatggcagaactattagtttcctctttttctgcatcacatttcataagtggtcaaggcatttggacatattcacctcctattacctattaaaaatacttcttaaagattgcttccttcgaaaaactgcttgtcatggagaggctgaggacatttgtaatttaaacctgtattttccttttcccagttgatatctgcccccagagaacactttagttcttgtctataaggcttaccaaaagtttgcgggaaaggtggtcctgtgctgttaccactttgaccaagagaagaacctggagattgggatgtttttgcatgtcaggatttattaattcaataacagagagggatgatgcttctcacttattctgatgaatcagcaaagattgcaaagcataatattaatgcttatgtcttgaattggcacattaaaaatgacactagcattaaaataagccactgttttcaaatgaaaatgataatttgagtaaagagtattgaattggaagaaaacattcttccagaagatttttttcatcataaaactatctgatttaaacatttcatgttttctattcacaacaaggataaatgattaggaattttggatgtctcaaatatttaatactgaatattgttcatgtgttttcttctttgtaaaagtactttgtatctgcctgtttgctgtggaatacttttattttgtaacttcaatgtctttacataagtatttcccctttcctgctctatactaggatctgtggtgttcacagtactaaatacttgtatgtaacgttagtagttgaaggaaatgagaaaagattaggtggaagatagaacgtatatattttatagaacatctaaaaactttaatgttctgaattactttcttaaatgtctgggttaatatatatatttgtatatttatgtagatatccaccattctcccacatatatgcacatatatgatttttcataactaattacaagactattaaatctatattgcatttgttaacttagttaacatacctacagataaaacatctttgaattattagctaggatgctatcagaatttgcagggcattagtaaggttaagtaactgagaaaaaagaatggttcttagtgaatgttttcctcaagcactttgggtatcccactaaaaaattccatgcctacagacattgttataaatatttaattttgataatcagtaccatttactgatatttctacagtaatggagcaatgtatagcctttagtcaatcttttcctttatagcagtactttaagttgcatatcattgcagataaatttgatacataagtttttcacgtgtgttcaacagagtttcaaataatgctgatcctttgagacctgctgaaagtctgaagcagccttaatatctaaaattaggaaatgtataaaatgtgagaggtctgattaaagttttatatgtagatgagttaattttcttattgttacaggtcatcctgttttccatcaatatatatgtatattttttttgagacagagtttctctcttgttgccgaggctggagtgcagtggcgcgatctcggctcaccgcagcctcctcctcctgggttcaagccattctcatgcttcagcctcctgagcagctgggattacaggcttgagccaccatgcctggttaattttgtatttttagtagagactgggtttctctatgttggtcaggctggtctcgaactcctgaactcaggtgatctgcccaccttggcctcccaaagtgctaggattacaggcgtgagccacagcacccggcccgatattttcaacattgtcttttttttttttttttttttttttcagtaaattatgttagttaagattagccaatatatctttactctggcctgcaagtccgtttttgttactgacctgattccacacccctgctacctgaagtatgttagtactgattaaattgttccaggagttagaatggcacctttcctactatgtgcccttggtgaagacaatccttgacagatatcttaaaaggagataaaatatgtgcttaattttttgaggattttctatggtgaatgtttacctcattgaaaaatggtggctttcgtacaatatcaaatttaatgattctcagggaaaagaattttaaccaattttatttttgagcataaaggtctattttgtaaacttaggagataatacagttatagttctaatactacttttttttccctttacctaaatagtacccatttaataggtagtgtgaaatacaggcttctttttgaaggctggcaggtgaagtagtgagaactccatttccatttgggtgcttggtttctcttagattatcaacaaatgtatgaataagagtttgatatttattaagctatagacatcttttcaaatgaaagtaagttaattactatacctgaaatactgctgtgttgaatataaactggaaacacaatgatgaatagtattttgtaaattttttaattcctttaattaaaatttttttttaaattgtggtaagaaacacctaacaaaatttaccatcttaaccatctttaagtgtgcagttcagtagtgttaagtatattcatattgctgtgcaaccaatatccagaacttttttatcttgcaaaattgaaactctatatcaagtaactcccagtccctggaaacctctattctactttctgtttttatgaatttgtctactctggatatcacagttaagtgaaatcatacagtatttgcctttttagatgggctcatttcacttagcataatgttctcaacattcatttatattttagcatgtcaggattttttcatcctttttaaggctgaataatactctattgtatgtaccacattttgcttatccacatatccattgatagtcacttgggttgcttccacttcttggctgttgtgaataatgctgcaatgaacatggttgtgtaagtaactttttgagatcctgcttccagttcttttggatatataccctgaaatgaaatgacaggatcatattgtaattccattttaaattttttgaggaagtaccatactgtttttcatagcagttgtaccattttacgttcctaccaacagtgcacgagggttacactttctttatatcttcactaacacaattttctgttttactttgacattagccatcctattgggtgtgaggtcgtatctcattgtggtttttatttacattttcctaataattatttatgttaagcatcaacatacgcttgttggccatttgtacactgtctttcgagaaatgttcattcaagtcctttgcccgttttaaaattgttttttgttgttgagctttaggatttctttatattttctggatattaatcccttatcagataaatgatttgcaaatattttctcccattatgtagtttgcttttatactctgttgtttcttcagtgcacaaaatttttatttttgtatggtccagttacatatttttacttttattgcctgtgcctttggtgtcatccacaaaatcattgctaaatccaatgtcactgaagcttttctcctgtgttttaagagttttatagctttagatcttctgtttagatctttaatctattttgaattaatttttgtatatggtataaggtaagggtccaacttcattcttttgcatgtggatatccagtttttccaccaccatgttgaagagacttgccctttcccatttgaatggtctctgcaaatccctgaacttttgagcctcaataatttttgttggtggagagggcactctcctgtcaaacttgcttaaatgttttttccccatctttattgtgtaaaagaagagcagtggctagaaatgtgagaattggaatcccaatcttggcctcgccattgaattattatgtaacattgagcattcacattactattttgagcctctgctacttcttattccaagttggcaataatgaagccattgtacctttaatatagaattgttgagaggtttaaatgggatgatatatttaaaatgtaccttattaggatgtctcactagacaaaagcatccttttcctccaaaagattagtatgtttacctctagttttctatttttttcagctttaattttgaaattaaaattataaaaatcttcaaagctgattattacatgctttaaacatctattagtatcacgaagtatatgtttttctttgggctttgtattgtatcccagaaaagcaggtgtgaaagaaaattaatataacttggccaaagttgtctcagtggcatttaataagcataggatgatgtttttaaagaagtgttaaaacaatttaaataatttagcagataagtcagaaagtcattcttttgcaagaatacttatgtgaaaaaagcacatgccttaggattctttcaaatagggagctccccctagtgcgttttagatgagatttacacaagtttgatttgcagggaaccttttaggagcacatatgttgggtaaatcaagggatagtttaataagatttaactgagctcaaagtagtacaaaatggatatgatttatttcctatagagcattaatttaatggtggtataatttaaatgagaaggaatatccccaaacccagattttattttcttttaaaacatttgcaaaatatttcttcagaattttatactctaaaactgttttctaaaagaaaaaattctccagtcatgatctgaaaaaaaaaaaaaaaagaaaaatgaaaaacactatcctaaggatgttattgcattctttttttttttgggatagagtttcactcttgttgcccaggctggagtgcaatggcgtgatcttggctcactgcaacctctgcctcccgggttcaagccattctcctgcttcagcctcctgagtagctgggattacaggctcccgccaccaccctcggctaatttttgtatttttggtagagacggggtttcgccatgttggccaggctggtctgaaactcctgacctcaggtgatccgcccacctcggcctcccaaagtgctgggatttacaggcgtgagccaccgcccctggccattattgcattcttaattagaaattgttcaaaacaaatcttaaatacaaaagtcaaaaataggccgggtgccatggctcacacctgtaatcccaacactttgggaggctaaagcaggtggatcacttgaggtcaggagtttgagaccagcctagacaatgtggtgaaaccccatctctactaaaaaaaaaaaaaaaaaaaaaaaaaaaaaaaattagctggggggtggtggcatgtgcctgtagtcctagctactcaggactcctggagtcctggttggaggattgcttgaaccccggaggtggaggttgcagtgagctgagatggtgccactgcactccaacttgggcaataggctgtctcaaaaaaacaaaacaaaacaaaaacaaacaaaaaaccaaataatatattctactttaaagagcattttactttctttcgatataggagaatatcgataattatgtattatatacagctggaaattaaaagatcaggaacaaatctaatatttgacatcattggacttatttgtgtattttgaattaaggtcatttgtggtcaaaattagttaaaaggattgtttatttagtcatgttcatgtcatagatttctacaaagagattatatagtattttatagcttgaaatgtttctcaaatatataaaatgatttttggccataataaccttgactcagatttatactctacaattaaattagtcttggtggacttttcttgttttttggggctttttaattttaaaaatgtttagatacaaagtctctctgtgttacccaggctggtcttgaactcctgggctcaagcagtctttccaccacgccttcggagtagctgggactgcaggctcttgccattgtactcagcttaaaaaagtaatttccttatataaactttatttttgtttagtcttactattagtctataaaagtttaccatggttgccagactttaaacaaaatactaaatttttaaaaaattttgttttggtttgtattttctgatctctaacatttttattgagatgtaacttaaataaacaaatctgaagtgtgaagcttagtgaattttaaaatatacactcttaaaaaaattgaacatttgcatctactgacaagttttcattaaactttctgtgttttattattattttcatagggctttagaatggaagtgattttagaagtttactcaattttcctcattttgtaggtgaagaaaaggcatagaaaggttcagaggcttaatttcttcacatttatgaaatatttttaaaaattgtaattggtgatagaacagttatggagattttattaaggatttgtatattatttaataacattttatttaaatgtataagcagtggatctgagttgctttcttcagttttgtgtatagttctgtaatgcagtatgatttctttcagttcttgtttgaaagctaagcttttcattttgtctctgttacatttagtctttcttgtaacattctatctaaatactgtttgttacaaaattagctttagttggattccttcctccctttgtttggcagaaagtaaatgaatttagggcagcggtccccagcctctttggcaccaggctggttttgtggaagacagtttttccatggattggtagaggtggttgggatggtttcagatgaaacttttccacctcaggtcatcaggcgttagagtctcataggagcgcataacctagaccccttgcatgcacagttcacaacagggtttgtgctcctatgagaatctaatgctgctgctgatctaacaggaggcggagccccaacggtaatgctcacttgcccactgctcaccttctgctgtgccacccattcctgatggggtccaggggttggggaccccgatctaggggataaaccaggaaagacttcttagaggtagtagcatctgaagaataaaagtttactgagaacccagaacccttgcaggttagggggcaatgcagagtgaagatcatgatcaatggccagatgcgatggttcatgcctagtaatcccagcactttgggaggctgaggtgggtggatcacctgaggtcagatgttcgagaccagcctggccaacatggtgaaactaaaaatacaaaaattagctgggcatggtggcgggcgcctgtaatcccagctacaggcaccctcaggaagctgaggcaggaaaatcgcttgaacccaggaggcaaaggttgcagtgagctgagattgcgccattgcactccagcctgggcgacaagaacgaaacttcatctcaaaaaaaaaaaaaaatcatggtcaaaaacataggagaggctgtccctgtggctcacacctgtaatcccagcactttgggaggttgaagagggaggatcactagaggccaggagttcaagaccagcctggccaacctggtaaaactccatctctgccaaaaacacaaatattagccaggcatggtggtgcacgcctgcaatcccagctactcaggtggctgaggcaggagagtcacttgaacctaggaggtggaggttgctgtgagccaagattgtgcgactgcactccagcctgggtgacagagtgggaatctgtctcaaaaaaaaaaaaaaggctggaggtggggaggcctggggacgtatgggatagttgacaggattttatactgtaattactttaaggcctagattctaataacatacataagtatttaatggcactttttggttttgtgcttcatactttaagtttctgatgtgtagctagttaatatagagctattaaccttgttcattagtcaatttttccaatgtagtatgccaaccagtattagggttacatttataacttttttcctggagagttgatgagttaactaccatattttcatttaacttaaggtagttttgaaaatttctaagcattatatcttaagattcagaaaaataagaccagatccacttatgaatttccattccactcgtgacctgacaagtcgtataacctctcagcctcactttccccattagacaaatagaatgaaaagacctatcttgcagaactgtgataaagattaaggaatgtacaacataatttattattgtaacacaacctattaatcatttttatgtattttctcttatttgaattttaaaaattgaaattatggggtactagaggtttttttaatcttgcttttttcagaacaagcagcatggtggtatggaaagaactgctgtattagaactggctgtgcctggttctgtcactcactagcttatattgtattgaaaagtcccttaatctctctgagcatcaagtttctcatccatagaattgtgattataccaatgcttaaattttgtgaggattagaagtaatatttgttaatcatctagcaaaagtgcctgcctggcatatggtaggggctcatttatgatgatgatcatcatctccagtattacggtaaacacttaacaggataaaagctttttagtctgaaacctttgacaaaaacagaattaaggttgttccataacctatcatacagttatgtatcgcttaacaatggagataggttctgagaactgcaccattaggcagatctgttgtgggaacatcatagagtatacctacagaaacctagatgggatagatgactatacccctaggctatatggtatatgacccattgctcctaggctatacatctacctgtatagcatgtaactgtactgattgctctaggcagttttaacacttacaagcattcatgtgtctaaacagatataaacattgacaaatacagtagaaatatggtatgaaagataaaaaatggtatacctagatagggcacttaccatgaatgtagcttgaggactggcagttgctctgggtgggtgagtgagttcgtgatgagtgaagtgaaggcctgggacagtacactgctgtagactttataaactgtacacttaggctacactaaatttattaaaaaattttctccaataataaattaaccttagcttactgtaactttataaacttctaaagttttaaaactttttaactctttttagtaagatttaagatacaaacatagctgtataaaatatttatatccttattctgtaagcttttttctatttttaaaattgttatttttttaaaaactttttttttttttgagatggagtcttgctatgtcacccaggctggagtgcagtggctcgatctctgcttactgcaagctctgcctcctgggttcacgccattctcccgcctcagcctcctgagtatctgggactactgccaccacacctggctaattttggtggtttttttgtatttttagtagagacggggtttcaccgtcttagccatcatgctctcctgacctcctgatctcctgacctcatgatccgcccgcctcggcctcccaaagtgctgggattacagacgttagccactgcactggcctttgttaaaaactaagacttacactcatttttctaggcgcacacagggtcaggatcattaagatgtcaggaggtgataggaatttttcagctgtattataatcctacaggaccactgtcatgtatatggtggtctgtcattggccaaaacattatgtgatgtcttactgtacatccatcatgagaagccataagtagctatccagttttttctggctaaagtaattttcaaagcaagaaaggttttaaacttctttgagaaaatttagagtttatttctaggactttgtatattttagaattcacgttggtgatggttgggatgggggtttaggggaggtgctctcctccagaagaaaagtcaagtgtaaaatatataattccttttatttgtcgtgtagatttgtgtaggaaaagacataataggataggcctaggaagaatttttttatatgaagatttttttttgaagggcatatataattggaaattgattattggtatatggagagagagaattgtacatgaaaagtactataacttaaaaaaccttacagttaagaggattagttgtaaccaaaggacaaatttatgtcagtctagtgattagtcctatcaaaaattattctagctttcatataacctgttttttattgcctgttttatctgtgacatgttgacatcttccttctattagtttttgcccaaatgaggtgtgggactcctagtgaaggtccttggaaggattatattttctataaaactttattagggacatgataacagttctgaatatgtgagaaaaagtaattgtatactattaggtgatgcagtttgtagctaggaaatgacagagttgatgctggtgtgtcagagtaaaactttccctttgtcttaaagcgagtgaaccttgttaggtactaggaaacaacaacagtcttttggttattctggggtttcaacactggaaatatctaataacagaattattctgaaataattgaaaactattttaaataaggaattgaagataattgaatatgcagtgtgaaaggtcaggctgcaagtgacagtgggtgatgttgcaagacaatgacaaggtacagtgcttttggattatcaggaattagcaaaatgatgtcttggtgtcctctggtaatttctgagttgtgaactatcttgcttatttatatactttggcaggtaatgaaataatgaatgtaaaattttgaattttgtgtaatcacatttcttaaaccaataagttagaaaggaaaaccaagagattgcatccacaagatcaggcctaaataggtagtagaaagaatagaaggtctttattttaaattttatttttaattcagaatgggcagtgtctaatcacaaatgagattatagtgaatgtaaatcttaatgtaacaaaggattatcttgccatgttcttaaagtttccattttaatgagctttagtaacattctaaaacatgtagcaatctgtgcagtcatccgtatgtgacatctgcttcttcatgaagtgcatttctaaggtaaaactattggtttatttgtatgtatagttaggaaggcttataaaacttttttttttttaatgataggcacaagtattatgtagttagattttttttgtttctggaaaatgttatctactttgaaaattttaaatctataaacacttgggaaggtgtttagcacaagcatcaataaatgtttcaatcagaatctagcaagaaaggattcttagaaacttttactcctgtacatgtactgtgtaatggatttagagaaatttgtttcctcctaaaaaatcttagcaatgttgggttagtaccatttctttccttgaaaacaaaaaaatccacattttttacgaaccagggccccttaaaactaatctcacattatgtcttttttttaattattattgtttttgagacacagtcttgctctatcgcccaggctagagggcagtggcatgatcttggcttactgtaatctctgcctcccaggttcaaacaattcttgtgcctcagccttcccagtagctgggattacaggcaagtgccaccacacctgactaatttttgtatttttagtagagacagtgtttcaacatgttggccaggctggtctggaactcctgacctcaagtgatccttctgcctcagcctcccaaagtgttggattacaggtgtgagccatcacgcccggcctcacattatgccttacccaattattttcagattggccttcagccatagcatatgggaaacaatatactgttagagttttccaagtgcttttcatgaattttttttccctttttaaaatttaatgctttattgctaactttcctgatctgaaacatttattaggcagttcttcattttcagttgtagcctttaagatatttatatagaaggctgtcatagaatgccatcttcttttgtaggacagttgtgtgtgtgaattgattttttttttttgagaccatatttgtagtgtgatgtgtagaaggaagtaaccagaatggttttatctgcttctttgccctacattcaaggtctgcttgtgatagtatttaaaattgagttcagtgctgagttcaagatgggatttaaccagacttttacaaaggtagcatctgtagattttgtagcagtctactcaaggaggtgattaatcttgagagactagacagatttcttttaggtcaaattaaattttaccattattgctgtataactccattcacctatctttgaaaatatgtttacatcttggtttttatttatacgtttatttttaaaaaacatatttctaacatgttttttattacatgcttcactagaataaaattttcccaagttattattacccagtttatcctgaaatcttagcctcaggcagtcctcccacctcggtctcccaaagtgctaggattacaagtgtgagccaccgtgcctggccccagtccatctaatgtatgtattagattcttagaatattactatttattaagtaaagttatatttctgatagcttaattactccttatatgacagcataaacactatttgcctggcactactttttaggcattccccagaccagtttgttaatttcattcaaactttagattccagttcaagtataaaactcaaattctgccaaattattaatatttcagatatattgagtttatattatcgtcttttgtagttatacttagtcttatcaattattgaatttccctaatgttattattatttttttttacaaagtcaaactttagtgattctgcagttcttatggtgacttacgatttcttacattattactcttcagtctattattaaatcaaattccaggatggagttccttagtcgttacattaaaacagatatatggaactcccccctacttttgcttaagtcatagtattccatctgtttttaatgctgttgtatttttaacataaggaattacgtggttgaataaaggaattgtatcgg

SEQ ID NO: 143141 - DNA, 3767 bp, Homo sapiens
  Payload ID: 8283
  Gene Symbol: INTS6
  Gene Name: integrator complex subunit 6
  ENST ID: ENST00000469430
  CDS Start-End: 267-722
agacggctgggcgcccgccccagcgggcaggcaggcaggaggaggcggaggcgggggtacgacggggagcactgggtctggggagtttcctctcaactatcgggggagaaactccccgcagccggaggaaagacccagacagtgttttcctcccgggggccgtgctcccccgccccgcgtagcggcggtcgccgccaccggcgcctccacctctaccatctcctctttctccaccacctcgggccccggtgtccccggccagcactatgcccatcttactgttcctgatagacacgtctgcctctatgaaccagcgcagccatctgggcaccacctacctggacacggccaaaggcgcggtagagaccttcatgaagctccgtgcccgggaccctgccagcagaggagacaggtatatgctggtcactttcgaagagccgccctatgctatcaaggctggatggaaagaaaaccatgcaacgtttatgaatgaattgaaaaaccttcaggctgaaggacttacgactcttggccaatccctaaggacagcttttgatttattaaatttaaatagattagtaactggcatagacaactatgggcagggaagaaacccttttttcttggagccagcaataattatcacaattactgatgggagcaagttgactaccaccagtggagtccaggatgaggtactggggacacacagatggaattaagcaaggctagaaaacgtattatctttgaagacagctaaaggagcagcccagtggttttcaagaagtgctaaagtgcactgactgtctcatgatgactggtgcctcagggagggtcatgattcctggatacaggatcgacctgatcctggatgtcacttcaagcagtcagatcgtggggaaaagccttgtctaatggctagccttcctcaaaagtctgatgctagtcatctcggaaggcctcagaaaaagccttaaagcttcatttacctcttaattctcctttgcctggaagtgaattgaccaaggaaccttttcgttgggatcagagactctttgcattagtgttgcggttgcctggcaccatgtcagtagaatcagaacagttgacaggtgtgcctttagatgactctgcaatcacaccaatgtgtgaagtgacaggcggccgttcatattctgtgtgttctccaagaatgcttaatcagtgtctggagtccttggtgcagaaagtacaaagtggggtggtaataaactttgaaaaagcaggaccagatccttcccctgtagaagatgggcagccagatatatcaaggccttttggatctcagccttggcatagctgtcacaaactcatatatgtcagaccaaatcctaaaactggggttcctataggtcattggcctgttccagagtctttttggccagatcaaaattcgccaacactaccacctcgtacatctcatcctgtagtgaagttttcctgtacagactgtgaaccaatggttattgataaacttccttttgacaaatatgagttggaaccttcaccactgactcaatttatcctggaaaggaaatctcctcaaacatgttggcaggtgtacgtgagcaatagtgcaaaatacagtgaacttggtcatccttttggttacttgaaagccagtacagcactgaactgtgtcaacttatttgtgatgccttacaattatccagtccttcttcccctcttagatgacttgtttaaagtgcataaagcaaaaccaacattgaagtggagacagtcatttgaaagttatttgaagacaatgcctccctactatcttgggcccttgaagaaagctgttaggatgatgggagcacctaacctaatagcagacagtatggaatatggacttagttacagtgtcatttcatacctcaaaaaactgagtcaacaggccaaaatagaatctgatcgagtcattggatctgtaggcaaaaaagtagtacaggagactggaataaaagtccggagccgatcacatggtttatcaatggcatataggaaagattttcaacaactcctccagggaatttcagaggatgtccctcacagactgctagaccttaatatgaaggaatacactgggttccaagttgctttgctgaataaggatttgaagccacagacatttagaaatgcttatgacataccaagacgaaatcttttggatcacttaacaagaatgagatctaatcttttgaagagcactcgcagatttctgaaaggacaggacgaagatcaagtgcacagtgttcctatagcacaaatggggaactaccaggaatacctcaagcaagtaccttctccactaagagaacttgatcctgatcagccacgaaggttgcatacatttggcaacccctttaagctggataagaagggtatgatgatagatgaagcagatgaatttgtggctggacctcaaaataaacataaacgacccggagaaccaaatatgcaagggatccctaaaagacgtcggtgtatgtctccactactaagaggcagacagcagaatcctgttgtaaacaatcatattgggggaaaaggaccacctgcacctacaactcaagcacagccagatcttattaaacctcttcctcttcataaaatttcagaaaccactaatgattcgataatacatgatgtggttgaaaatcatgttgcagaccaactttcatcagacattacaccaaatgctatggatacggaattttcagcatcttctccagccagtttactggaacggccaaccaatcatatggaggctcttggtcatgaccatttaggaaccaatgacctcactgttggtggatttttagaaaatcatgaggagccaagagataaagaacaatgtgctgaagagaacataccagcatcttcactcaacaaaggaaagaaattgatgcattgcagaagccatgaagaggtcaatactgaactaaaagcacaaataatgaaagagatccgaaagccaggaagaaaatatgaaagaatcttcactttactgaagcatgtgcaaggcagtttacaaacaagactaatatttttacaaaatgtcattaaagaagcatcaaggtttaaaaaacgaatgctaatagaacaactggagaacttcttggatgaaattcatcgaagagccaatcagatcaaccatattaatagcaattaaaagaaaatagaatgtggccacttatttcactatcttcttcaaatacaaagtaaatacaagactgttgtgatcttgcattcattttctgacatgcattgttggctatttgaaatactaaaagcaaatctacagatcctttttccatcattttacagtgaccttttcttcattttggtttatttttgtaatgtgaaaagtatcactctaaaaaacatttttaatttaacaaactaaaaatattcctccaaatctcttgcttgtcattgactcttgcgtgtcaatttccctcaggttctattttcttaaaccaacctttaaaattgtcacctctgttaaggttgaactttgccaaaaaaaaaagaagttactttgtaatttttggggaaaaaagcacatacattaaaactaggtaatgttttgtatatacagttattttggatatattattgtaagttgtacaaatgtattttgaagaatatttaagaaaagcacttttgttattccatcaataaatgctctattttactcttgtgtggtttaggaaataatcaca

SEQ ID NO: 143142 - DNA, 597 bp, Homo sapiens
  Payload ID: 8283
  Gene Symbol: INTS6
  Gene Name: integrator complex subunit 6
  ENST ID: ENST00000483288
  CDS Start-End: 219-597
aatgtgtttgagaaaactgttttcctcggacatgcaggcgtggactccttacttcaggtaaggtgacagcagcttgacagagagtgccttccctcccacggcatttgggacgaggctgaaggaaagacacaggcggggttacgggaaacccattctctgcgccatctgggcaagctgaagtcagtttttccgctttctcacgagacacgtctgcctctatgaaccagcgcagccatctgggcaccacctacctggacacggccaaaggcgcggtagagaccttcatgaagctccgtgcccgggaccctgccagcagaggagacaggtatatgctggtcactttcgaagagccgccctatgctatcaaggctggatggaaagaaaaccatgcaacgtttatgaatgaattgaaaaaccttcaggctgaaggacttacgactcttggccaatccctaaggacagcttttgatttattaaatttaaatagattagtaactggcatagacaactatgggcagggaagaaacccttttttcttggagccagcaataattatcacaattactgatgggagcaagttgactaccaccagtggag

SEQ ID NO: 143143 - DNA, 483 bp, Homo sapiens
  Payload ID: 8283
  Gene Symbol: INTS6
  Gene Name: integrator complex subunit 6
  ENST ID: ENST00000483746
  CDS Start-End: 21-483
ggtctttgtgacagttaaatatggaggatgaggggaagatatcaagaataacggctaggtttttagaacagccacctcgtacatctcatcctgtagtgaagttttcctgtacagactgtgaaccaatggttattgataaacttccttttgacaaatatgagttggaaccttcaccactgactcaatttatcctggaaaggaaatctcctcaaacatgttggcaggtgtacgtgagcaatagtgcaaaatacagtgaacttggtcatccttttggttacttgaaagccagtacagcactgaactgtgtcaacttatttgtgatgccttacaattatccagtccttcttcccctcttagatgacttgtttaaagtgcataaagcaaaaccaacattgaagtggagacagtcatttgaaagttatttgaagacaatgcctccctactatcttgggcccttgaagaaagctgttaggatgatgggag

SEQ ID NO: 143144 - DNA, 452 bp, Homo sapiens
  Payload ID: 8283
  Gene Symbol: INTS6
  Gene Name: integrator complex subunit 6
  ENST ID: ENST00000488009
  CDS Start-End: 184-452
ggcccggaagccagatgcggggctgccaggattggtcttgtcagattcgtcctaagagggccggtgggacagctgcaggttaacttcctaagtccggctcccatctgcttccactagtaccttcacatacccaaattttgggtattagattaggctggatggaaagaaaaccatgcaacgtttatgaatgaattgaaaaaccttcaggctgaaggacttacgactcttggccaatccctaaggacagcttttgatttattaaatttaaatagattagtaactggcatagacaactatgggcagggaagaaacccttttttcttggagccagcaataattatcacaattactgatgggagcaagttgactaccaccagtggagtccaggatgaggtaagttgtgcttatattacatggattatgcaaatgcagttgaacaatcctttattttt

SEQ ID NO: 143145 - DNA, 496 bp, Homo sapiens
  Payload ID: 8283
  Gene Symbol: INTS6
  Gene Name: integrator complex subunit 6
  ENST ID: ENST00000491189
  CDS Start-End: 102-496
aagccagatgcggggctgccaggattggtcttgtcagattcgtcctaagagggccggtgggacagctgcaggctggatggaaagaaaaccatgcaacgtttatgaatgaattgaaaaaccttcaggctgaaggacttacgactcttggccaatccctaaggacagcttttgatttattaaatttaaatagattagtaactggcatagacaactatgggcagggaagaaacccttttttcttggagccagcaataattatcacaattactgatgggagcaagttgactaccaccagtggagtccaggatgagcttcatttacctcttaattctcctttgcctggaagtgaattgaccaaggaaccttttcgttgggatcagagactctttgcattagtgttgcggttgcctggcaccatgtcagtagaatcagaacagttgacaggtgtgcctttagatgactctgcaatcacaccaatgtgtgaagtgacaggcgg

SEQ ID NO: 143146 - DNA, 474 bp, Homo sapiens
  Payload ID: 8283
  Gene Symbol: INTS6
  Gene Name: integrator complex subunit 6
  ENST ID: ENST00000485178
  CDS Start-End: 85-474
tccggcgcccgcgaggccccgagtcctcctccggagggcggctgcgggcctgccctcttctcctaaccagacacgtctgcctctatgaaccagcgcagccatctgggcaccacctacctggacacggccaaaggcgcggtagagaccttcatgaagctccgtgcccgggaccctgccagcagaggagacaggtatatgctggtcactttcgaagagccgccctatgctatcaaggctggatggaaagaaaaccatgcaacgtttatgaatgaattgaaaaaccttcaggctgaaggacttacgactcttggccaatccctaaggacagcttttgatttattaaatttaaatagattagtaactggcatagacaactatgggcagggaagaaacccttttttcttggagccagcaataattatcacaattactgatgggagcaagttgactaccaccagtggagtccaggatgag

SEQ ID NO: 143147 - DNA, 3022 bp, Homo sapiens
  Payload ID: 8283
  Gene Symbol: INTS6
  Gene Name: integrator complex subunit 6
  ENST ID: ENST00000497989
  CDS Start-End: 369-2498
gttttgtttgttgtggttttgatgttttttttcctttcagctaaaggagcagcccagtggttttcaagaagtgctaaagtgcactgactgtctcatgatgactggtgcctcagggagggtcatgattcctggatacaggatcgacctgatcctggatgtcacttcaagcagtcagatcgtggggaaaagccttgtctaatggctagccttcctcaaaagtctgatgctagtcatctcggaaggcctcagaaaaagccttaaagcttcatttacctcttaattctcctttgcctggaagtgaattgaccaaggaaccttttcgttgggatcagagactctttgcattagtgttgcggttgcctggcaccatgtcagtagaatcagaacagttgacaggtgtgcctttagatgactctgcaatcacaccaatgtgtgaagtgacaggcggccgttcatattctgtgtgttctccaagaatgcttaatcagtgtctggagtccttggtgcagaaagtacaaagtggggtggtaataaactttgaaaaagcaggaccagatccttcccctgtagaagatgggcagccagatatatcaaggccttttggatctcagccttggcatagctgtcacaaactcatatatgtcagaccaaatcctaaaactggggttcctataggtcattggcctgttccagagtctttttggccagatcaaaattcgccaacactaccacctcgtacatctcatcctgtagtgaagttttcctgtacagactgtgaaccaatggttattgataaacttccttttgacaaatatgagttggaaccttcaccactgactcaatttatcctggaaaggaaatctcctcaaacatgttggcaggtgtacgtgagcaatagtgcaaaatacagtgaacttggtcatccttttggttacttgaaagccagtacagcactgaactgtgtcaacttatttgtgatgccttacaattatccagtccttcttcccctcttagatgacttgtttaaagtgcataaagcaaaaccaacattgaagtggagacagtcatttgaaagttatttgaagacaatgcctccctactatcttgggcccttgaagaaagctgttaggatgatgggagcacctaacctaatagcagacagtatggaatatggacttagttacagtgtcatttcatacctcaaaaaactgagtcaacaggccaaaatagaatctgatcgagtcattggatctgtaggcaaaaaagtagtacaggagactggaataaaagtccggagccgatcacatggtttatcaatggcatataggaaagattttcaacaactcctccagggaatttcagaggatgtccctcacagactgctagaccttaatatgaaggaatacactgggttccaagttgctttgctgaataaggatttgaagccacagacatttagaaatgcttatgacataccaagacgaaatcttttggatcacttaacaagaatgagatctaatcttttgaagagcactcgcagatttctgaaaggacaggacgaagatcaagtgcacagtgttcctatagcacaaatggggaactaccaggaatacctcaagcaagtaccttctccactaagagaacttgatcctgatcagccacgaaggttgcatacatttggcaacccctttaagctggataagaagggtatgatgatagatgaagcagatgaatttgtggctggacctcaaaataaacataaacgacccggagaaccaaatatgcaagggatccctaaaagacgtcggtgtatgtctccactactaagaggcagacagcagaatcctgttgtaaacaatcatattgggggaaaaggaccacctgcacctacaactcaagcacagccagatcttattaaacctcttcctcttcataaaatttcagaaaccactaatgattcgataatacatgatgtggttgaaaatcatgttgcagaccaactttcatcagacattacaccaaatgctatggatacggaattttcagcatcttctccagccagtttactggaacggccaaccaatcatatggaggctcttggtcatgaccatttaggaaccaatgacctcactgttggtggatttttagaaaatcatgaggagccaagagataaagaacaatgtgctgaagagaacataccagcatcttcactcaacaaaggaaagaaattgatgcattgcagaagccatgaagaggtcaatactgaactaaaagcacaaataatgaaagagatccgaaagccaggaagaaaatatgaaagaatcttcactttactgaagcatgtgcaaggcagtttacaaacaagactaatatttttacaaaatgtcattaaagaagcatcaaggtttaaaaaacgaatgctaatagaacaactggagaacttcttggatgaaattcatcgaagagccaatcagatcaaccatattaatagcaattaaaagaaaatagaatgtggccacttatttcactatcttcttcaaatacaaagtaaatacaagactgttgtgatcttgcattcattttctgacatgcattgttggctatttgaaatactaaaagcaaatctacagatcctttttccatcattttacagtgaccttttcttcattttggtttatttttgtaatgtgaaaagtatcactctaaaaaacatttttaatttaacaaactaaaaatattcctccaaatctcttgcttgtcattgactcttgcgtgtcaatttccctcaggttctattttcttaaaccaacctttaaaattgtcacctctgttaaggttgaactttgccaaaaaaaaaagaagttactttgtaatttttggggaaaaaagcacatacattaaaactaggtaatgttttgtatatacagttattttggatatattattgtaagttgtacaaatgtattttgaagaatatttaagaaaagcacttttgttattccatcaataaatgctctatttt

SEQ ID NO: 143148 - DNA, 2307 bp, Homo sapiens
  Payload ID: 8283
  Gene Symbol: INTS6
  Gene Name: integrator complex subunit 6
  ENST ID: ENST00000490542
  CDS Start-End: 576-2291
agaggaggtgggcctgacagcctggtgtgtttttggagtacagagtgggaaggggtatgagggaagaggtcttttagaggttgttacatgccaactcatttttctaaactttgtttgcaatatgcaagggagaaaataagtacttggcatggctgaagtatggagtctgtatggcgtggtggtgggaaggcagatagggaccagatcactgaagatctttatatgtgatattaagtgtctagaccctatttttaggtgattggctgttacttttaccgaacagttttagatagggaaattatatgatcctatttatatttcactgccatggattgatcagacagggactgattagaaactaaacaaagcaaaaagcatttgtactagtctaatctgagaaatgatgaaggcccaaattaaagtggtaagaaatagaagataacatttctagagagatgagagtttagtattgacagaaggcagcaactagtaatgactacctaccatgtttatgtgttctgccacctcgtacatctcatcctgtagtgaagttttcctgtacagactgtgaaccaatggttattgataaacttccttttgacaaatatgagttggaaccttcaccactgactcaatttatcctggaaaggaaatctcctcaaacatgttggcaggtgtacgtgagcaatagtgcaaaatacagtgaacttggtcatccttttggttacttgaaagccagtacagcactgaactgtgtcaacttatttgtgatgccttacaattatccagtccttcttcccctcttagatgacttgtttaaagtgcataaagcaaaaccaacattgaagtggagacagtcatttgaaagttatttgaagacaatgcctccctactatcttgggcccttgaagaaagctgttaggatgatgggagcacctaacctaatagcagacagtatggaatatggacttagttacagtgtcatttcatacctcaaaaaactgagtcaacaggccaaaatagaatctgatcgagtcattggatctgtaggcaaaaaagtagtacaggagactggaataaaagtccggagccgatcacatggtttatcaatggcatataggaaagattttcaacaactcctccagggaatttcagaggatgtccctcacagactgctagaccttaatatgaaggaatacactgggttccaagttgctttgctgaataaggatttgaagccacagacatttagaaatgcttatgacataccaagacgaaatcttttggatcacttaacaagaatgagatctaatcttttgaagagcactcgcagatttctgaaaggacaggacgaagatcaagtgcacagtgttcctatagcacaaatggggaactaccaggaatacctcaagcaagtaccttctccactaagagaacttgatcctgatcagccacgaaggttgcatacatttggcaacccctttaagctggataagaagggtatgatgatagatgaagcagatgaatttgtggctggacctcaaaataaacataaacgacccggagaaccaaatatgcaagggatccctaaaagacgtcggtgtatgtctccactactaagaggcagacagcagaatcctgttgtaaacaatcatattgggggaaaaggaccacctgcacctacaactcaagcacagccagatcttattaaacctcttcctcttcataaaatttcagaaaccactaatgattcgataatacatgatgtggttgaaaatcatgttgcagaccaactttcatcagacattacaccaaatgctatggatacggaattttcagcatcttctccagccagtttactggaacggccaaccaatcatatggaggctcttggtcatgaccatttaggaaccaatgacctcactgttggtggatttttagaaaatcatgaggagccaagagataaagaacaatgtgctgaagagaacataccagcatcttcactcaacaaaggaaagaaattgatgcattgcagaagccatgaagaggtcaatactgaactaaaagcacaaataatgaaagagatccgaaagccaggaagaaaatatgaaagaatcttcactttactgaagcatgtgcaaggcagtttacaaacaagactaatatttttacaaaatgtcattaaagaagcatcaaggtttaaaaaacgaatgctaatagaacaactggagaacttcttggatgaaattcatcgaagagccaatcagatcaaccatattaatagcaattaaaagaaaatagaatgtg

SEQ ID NO: 143149 - DNA, 3380 bp, Homo sapiens
  Payload ID: 8284
  Gene Symbol: INTS7
  Gene Name: integrator complex subunit 7
  Uniprot ID: Q9NVH2
  ENST ID: ENST00000366992
  CDS Start-End: 84-2912
aagaaggcggcgggggaagatggcggtcctggggtagagtttgcaagctttctgactaggctagtcgagtaactattcgggtcatggcgtcaaactcaactaagtctttcctggcagatgccggctatggcgaacaggaactggatgccaactctgcccttatggaattggacaaaggcctaagatctggcaaacttggtgaacagtgtgaagcagttgttcgctttcccagactttttcagaagtatccattccctattcttatcaattctgcattcctaaagttagctgatgttttcagagttggaaataatttcctgaggctatgtgttcttaaagttacccaacaaagtgagaaacatttggagaagattctaaatgtggatgaatttgtgaagagaattttttctgtgattcatagtaatgatcctgtggcaagagccatcaccctccggatgttgggaagtctggcatcaataattcctgagaggaagaatgctcatcatagtattcgtcagagtttagattcacatgataatgtagaagttgaagctgctgtttttgctgctgcaaacttctctgcacagtcaaaggattttgctgtaggaatctgtaacaaaatcagtgaaatgattcaaggtttagcgacaccagtagacttgaagctaaaattgatacccattctacagcacatgcaccatgatgcaatcttggcttccagtgctcgtcagcttttacaacagctggtcacatcctatccgtccaccaaaatggtgattgtgtctttgcacactttcactctgcttgcagcgtcatctttggttgatacacctaagcagattcagcttctgttgcagtatttgaagaatgatcccaggaaggcagtaaagagacttgctattcaagatctgaaattacttgctaataaaacaccacatacttggagtagggagaatattcaggcactttgtgagtgtgccctccagactccttatgacagcttaaaactagggatgttgtctgtcctttccacactatcagggaccatcgccatcaaacattacttcagtatagttccaggaaatgtgagttcttctcccagatcttctgatttagtcaaattagcccaagagtgctgttaccataataacaggggcattgcagctcatggagttagagtcctaactaatataactgtttcttgtcaagaaaaggatcttttggcactggaacaagatgctgtctttggcctggaatccctactggtactttgtagtcaagatgatagtccaggtgctcaggccactttaaagattgctctaaactgtatggtgaagttggccaagggcaggccccatcttagccagtcagtagttgagaccttgttgactcaattgcacagtgctcaagacgctgcccggattttgatgtgccattgcctggcagccattgccatgcaactgccggtgctgggtgatgggatgcttggtgacctcatggagctgtacaaggtgattggacgatcagccacagacaagcaacaagaacttctggtgagtttggctactgtgatttttgttgcaagtcagaaggcattgtctgtggaaagtaaggcagtaattaagcagcagcttgaaagtgtctccaatggatggactgtataccgtattgccagacaggcttccagaatgggtaatcatgacatggccaaagagctttatcagagtttgctgactcaggttgcctcagaacatttctacttctggctaaatagtttgaaggagttttcacatgcagaacagtgtctcactgggttgcaagaggaaaattatagttcagcactttcttgcattgctgaatctttaaaattctatcacaaagggattgcttccttaacagcagctagtacaccactgaatcctttaagctttcagtgtgaatttgtaaaactcaggattgaccttttacaagccttctctcaacttatctgtacttgtaatagcctgaagacaagcccaccacctgcaattgccacaacaattgccatgaccttaggaaatgacctccagaggtgtggtcgcatctccaatcagatgaaacagtccatggaagaatttcgaagccttgcttctcgatatggagatctttaccaggcatcttttgatgctgactcagcaactttgaggaatgttgaactacagcagcagagctgtttactgatatctcatgcaatagaagccctgattttggatccagaatcagcaagtttccaggaatatggatctactggaacagcccatgctgatagtgaatatgaaagaagaatgatgtctgtatataatcatgtcttggaggaggtagaatcactcaatcggaaatatacccctgtttcttatatgagatattttttccagaaactacagtctaccagcatcaagcttgctctgtcaccatcgccccggaatcctgcagagcccattgctgtccagaataaccagcagctggcgctaaaggtagagggagtggttcagcacggatctaaaccaggactcttccgcaaaattcagtctgtctgtctgaatgtttcttccacactgcagagtaaatctggacaagactacaagatacccattgacaacatgaccaatgagatggagcaaagggttgaacctcataatgattacttcagtactcaatttctgttgaactttgctatccttggaacacacaacattacagtggaatcttctgtgaaagatgccaatggtatagtatggaagactggtcccagaactaccatatttgtaaaatccctggaagacccttattcccagcaaattcgcttacaacagcagcaagcccagcagccattacagcagcagcagcaacgcaatgcctacacacggttttaaccatggaatgaatgcactgcagactctcaagagatcaatcaaattgccagaaacagtttggtttttcatatggaataagtattaaagttacagtgtagttcatttattcattgatttttgtaatgtaatattctggaaaaaattttgttttcttaaaaattttgtctgacagctgggcgtggttgctcacgcctgtaatcccagcactttgggaggctgaggtgggcggctcacgaggagatcaagaccatcctggctaacacagtgaaaccccgtctccactaaaaaatacaaaaaaattagccaagcatggtggcaggcgcctgtagtcccagctacttgggaggctgaggcaggagaatggtgtgaacctgggaggcggagcttgcagtgagccgagactgtgctccagcctgggcgacagagcgagactccgtctcaaaaaaataaataaatacattttgtctg

SEQ ID NO: 143150 - DNA, 3422 bp, Homo sapiens
  Payload ID: 8284
  Gene Symbol: INTS7
  Gene Name: integrator complex subunit 7
  Uniprot ID: Q9NVH2
  ENST ID: ENST00000366993
  CDS Start-End: 100-2946
cggaagaaaaaccagcaagaaggcggcgggggaagatggcggtcctggggtagagtttgcaagctttctgactaggctagtcgagtaactattcgggtcatggcgtcaaactcaactaagtctttcctggcagatgccggctatggcgaacaggaactggatgccaactctgcccttatggaattggacaaaggcctaagatctggcaaacttggtgaacagtgtgaagcagttgttcgctttcccagactttttcagaagtatccattccctattcttatcaattctgcattcctaaagttagctgatgttttcagagttggaaataatttcctgaggctatgtgttcttaaagttacccaacaaagtgagaaacatttggagaagattctaaatgtggatgaatttgtgaagagaattttttctgtgattcatagtaatgatcctgtggcaagagccatcaccctccggatgttgggaagtctggcatcaataattcctgagaggaagaatgctcatcatagtattcgtcagagtttagattcacatgataatgtagaagttgaagctgctgtttttgctgctgcaaacttctctgcacagtcaaaggattttgctgtaggaatctgtaacaaaatcagtgaaatgattcaaggtttagcgacaccagtagacttgaagctaaaattgatacccattctacagcacatgcaccatgatgcaatcttggcttccagtgctcgtcagcttttacaacagctggtcacatcctatccgtccaccaaaatggtgattgtgtctttgcacactttcactctgcttgcagcgtcatctttggttgatacacctaagcagattcagcttctgttgcagtatttgaagaatgatcccaggaaggcagtaaagagacttgctattcaagatctgaaattacttgctaataaaacaccacatacttggagtagggagaatattcaggcactttgtgagtgtgccctccagactccttatgacagcttaaaactagggatgttgtctgtcctttccacactatcagggaccatcgccatcaaacattacttcagtatagttccaggaaatgtgagttcttctcccagatcttctgatttagtcaaattagcccaagagtgctgttaccataataacaggggcattgcagctcatggagttagagtcctaactaatataactgtttcttgtcaagaaaaggatcttttggcactggaacaagatgctgtctttggcctggaatccctactggtactttgtagtcaagatgatagtccaggtgctcaggccactttaaagattgctctaaactgtatggtgaagttggccaagggcaggccccatcttagccagtcagtagttgagaccttgttgactcaattgcacagtgctcaagacgctgcccggattttgatgtgccattgcctggcagccattgccatgcaactgccggtgctgggtgatgggatgcttggtgacctcatggagctgtacaaggtgattggacgatcagccacagacaagcaacaagaacttctggtgagtttggctactgtgatttttgttgcaagtcagaaggcattgtctgtggaaagtaaggcagtaattaagcagcagcttgaaagtgtctccaatggatggactgtataccgtattgccagacaggcttccagaatgggtaatcatgacatggccaaagagctttatcagagtttgctgactcaggttgcctcagaacatttctacttctggctaaatagtttgaaggagttttcacatgcagaacagtgtctcactgggttgcaagaggaaaattatagttcagcactttcttgcattgctgaatctttaaaattctatcacaaagggattgcttccttaacagcagctagtacaccactgaatcctttaagctttcagtgtgaatttgtaaaactcaggattgaccttttacaagccttctctcaacttatctgtacttgtaatagcctgaagacaagcccaccacctgcaattgccacaacaattgccatgaccttaggaaatgacctccagaggtgtggtcgcatctccaatcagatgaaacagtccatggaagaatttcgaagccttgcttctcgatatggagatctttaccaggcatcttttgatgctgactcagcaactttgaggaatgttgaactacagcagcagagctgtttactgatatctcatgcaatagaagccctgattttggatccagaatcagcaagtttccaggaatatggatctactggaacagcccatgctgatagtgaatatgaaagaagaatgatgtctgtatataatcatgtcttggaggagcacacagcatgcctctgcaatgccatcattgctttgctgaaagttcccctttctttccagagatattttttccagaaactacagtctaccagcatcaagcttgctctgtcaccatcgccccggaatcctgcagagcccattgctgtccagaataaccagcagctggcgctaaaggtagagggagtggttcagcacggatctaaaccaggactcttccgcaaaattcagtctgtctgtctgaatgtttcttccacactgcagagtaaatctggacaagactacaagatacccattgacaacatgaccaatgagatggagcaaagggttgaacctcataatgattacttcagtactcaatttctgttgaactttgctatccttggaacacacaacattacagtggaatcttctgtgaaagatgccaatggtatagtatggaagactggtcccagaactaccatatttgtaaaatccctggaagacccttattcccagcaaattcgcttacaacagcagcaagcccagcagccattacagcagcagcagcaacgcaatgcctacacacggttttaaccatggaatgaatgcactgcagactctcaagagatcaatcaaattgccagaaacagtttggtttttcatatggaataagtattaaagttacagtgtagttcatttattcattgatttttgtaatgtaatattctggaaaaaattttgttttcttaaaaattttgtctgacagctgggcgtggttgctcacgcctgtaatcccagcactttgggaggctgaggtgggcggctcacgaggagatcaagaccatcctggctaacacagtgaaaccccgtctccactaaaaaatacaaaaaaattagccaagcatggtggcaggcgcctgtagtcccagctacttgggaggctgaggcaggagaatggtgtgaacctgggaggcggagcttgcagtgagccgagactgtgctccagcctgggcgacagagcgagactccgtctcaaaaaaataaataaatacattttgtctgaaaaataa

SEQ ID NO: 143151 - DNA, 4417 bp, Homo sapiens
  Payload ID: 8284
  Gene Symbol: INTS7
  Gene Name: integrator complex subunit 7
  Uniprot ID: Q9NVH2
  ENST ID: ENST00000366994
  CDS Start-End: 106-2994
agcgcgcggaagaaaaaccagcaagaaggcggcgggggaagatggcggtcctggggtagagtttgcaagctttctgactaggctagtcgagtaactattcgggtcatggcgtcaaactcaactaagtctttcctggcagatgccggctatggcgaacaggaactggatgccaactctgcccttatggaattggacaaaggcctaagatctggcaaacttggtgaacagtgtgaagcagttgttcgctttcccagactttttcagaagtatccattccctattcttatcaattctgcattcctaaagttagctgatgttttcagagttggaaataatttcctgaggctatgtgttcttaaagttacccaacaaagtgagaaacatttggagaagattctaaatgtggatgaatttgtgaagagaattttttctgtgattcatagtaatgatcctgtggcaagagccatcaccctccggatgttgggaagtctggcatcaataattcctgagaggaagaatgctcatcatagtattcgtcagagtttagattcacatgataatgtagaagttgaagctgctgtttttgctgctgcaaacttctctgcacagtcaaaggattttgctgtaggaatctgtaacaaaatcagtgaaatgattcaaggtttagcgacaccagtagacttgaagctaaaattgatacccattctacagcacatgcaccatgatgcaatcttggcttccagtgctcgtcagcttttacaacagctggtcacatcctatccgtccaccaaaatggtgattgtgtctttgcacactttcactctgcttgcagcgtcatctttggttgatacacctaagcagattcagcttctgttgcagtatttgaagaatgatcccaggaaggcagtaaagagacttgctattcaagatctgaaattacttgctaataaaacaccacatacttggagtagggagaatattcaggcactttgtgagtgtgccctccagactccttatgacagcttaaaactagggatgttgtctgtcctttccacactatcagggaccatcgccatcaaacattacttcagtatagttccaggaaatgtgagttcttctcccagatcttctgatttagtcaaattagcccaagagtgctgttaccataataacaggggcattgcagctcatggagttagagtcctaactaatataactgtttcttgtcaagaaaaggatcttttggcactggaacaagatgctgtctttggcctggaatccctactggtactttgtagtcaagatgatagtccaggtgctcaggccactttaaagattgctctaaactgtatggtgaagttggccaagggcaggccccatcttagccagtcagtagttgagaccttgttgactcaattgcacagtgctcaagacgctgcccggattttgatgtgccattgcctggcagccattgccatgcaactgccggtgctgggtgatgggatgcttggtgacctcatggagctgtacaaggtgattggacgatcagccacagacaagcaacaagaacttctggtgagtttggctactgtgatttttgttgcaagtcagaaggcattgtctgtggaaagtaaggcagtaattaagcagcagcttgaaagtgtctccaatggatggactgtataccgtattgccagacaggcttccagaatgggtaatcatgacatggccaaagagctttatcagagtttgctgactcaggttgcctcagaacatttctacttctggctaaatagtttgaaggagttttcacatgcagaacagtgtctcactgggttgcaagaggaaaattatagttcagcactttcttgcattgctgaatctttaaaattctatcacaaagggattgcttccttaacagcagctagtacaccactgaatcctttaagctttcagtgtgaatttgtaaaactcaggattgaccttttacaagccttctctcaacttatctgtacttgtaatagcctgaagacaagcccaccacctgcaattgccacaacaattgccatgaccttaggaaatgacctccagaggtgtggtcgcatctccaatcagatgaaacagtccatggaagaatttcgaagccttgcttctcgatatggagatctttaccaggcatcttttgatgctgactcagcaactttgaggaatgttgaactacagcagcagagctgtttactgatatctcatgcaatagaagccctgattttggatccagaatcagcaagtttccaggaatatggatctactggaacagcccatgctgatagtgaatatgaaagaagaatgatgtctgtatataatcatgtcttggaggaggtagaatcactcaatcggaaatatacccctgtttcttatatgcacacagcatgcctctgcaatgccatcattgctttgctgaaagttcccctttctttccagagatattttttccagaaactacagtctaccagcatcaagcttgctctgtcaccatcgccccggaatcctgcagagcccattgctgtccagaataaccagcagctggcgctaaaggtagagggagtggttcagcacggatctaaaccaggactcttccgcaaaattcagtctgtctgtctgaatgtttcttccacactgcagagtaaatctggacaagactacaagatacccattgacaacatgaccaatgagatggagcaaagggttgaacctcataatgattacttcagtactcaatttctgttgaactttgctatccttggaacacacaacattacagtggaatcttctgtgaaagatgccaatggtatagtatggaagactggtcccagaactaccatatttgtaaaatccctggaagacccttattcccagcaaattcgcttacaacagcagcaagcccagcagccattacagcagcagcagcaacgcaatgcctacacacggttttaaccatggaatgaatgcactgcagactctcaagagatcaatcaaattgccagaaacagtttggtttttcatatggaataagtattaaagttacagtgtagttcatttattcattgatttttgtaatgtaatattctggaaaaaattttgttttcttaaaaattttgtctgacagctgggcgtggttgctcacgcctgtaatcccagcactttgggaggctgaggtgggcggctcacgaggagatcaagaccatcctggctaacacagtgaaaccccgtctccactaaaaaatacaaaaaaattagccaagcatggtggcaggcgcctgtagtcccagctacttgggaggctgaggcaggagaatggtgtgaacctgggaggcggagcttgcagtgagccgagactgtgctccagcctgggcgacagagcgagactccgtctcaaaaaaataaataaatacattttgtctgaaaaataactgggatcctggccagaaagattgttctttcttgttttattattagttttttctgttgccaagcttttttttctttcaagaatagtcacatgttgagatcactgaattggtaaatttgaccgctactcttccaaaatacatcatttgctgcctgacttagacctaggattctgagttgttcattgggaggttctgaccagtcactacaaggtttatccatggtagcagaacctgagtccttctgtagatggacttgaaagtgttccgtgcaacatccagccttctggattatgaaagcccacagtctaacagtattgaaacatcctgctgtattagttcaaccacatatttatctcttcctgtgctaaagcagtctttattattttcatatttaattgaaacaaagagcagctagcaatttcatagaaaattaatttgttttttctgatgtgtctgcaactgtgtataatacagacatttcacattgtttccaaaagtgaagaacactcatttaatatcttcaatgttttaagttagaaggggtggatcttttcctttggttggtgattggtttggtttatacttgatgagttatgctagactgattgtttagagagagcagtctctttattacacaggctcagtttgttgggatgctcagggaacagagttttctggttagccagaaaacccccttttttcctattttaattctggttgaaaaccatgataaaatagactttcttagcacagtatggtagatataacttaactgctttttgattggggatcatttagggcttcaggatcacgatttctaaacatcagggatcatatggttgcagatgccgatgctataagtaatttggccggatgcagctcctaaggtaaagcagggtactttccctggaatttcctttttaaataaatatctgtttctttgcttg

SEQ ID NO: 143152 - DNA, 3136 bp, Homo sapiens
  Payload ID: 8284
  Gene Symbol: INTS7
  Gene Name: integrator complex subunit 7
  Uniprot ID: Q9NVH2
  ENST ID: ENST00000440600
  CDS Start-End: 103-2844
gcgcggaagaaaaaccagcaagaaggcggcgggggaagatggcggtcctggggtagagtttgcaagctttctgactaggctagtcgagtaactattcgggtcatggcgtcaaactcaactaagtctttcctggcagatgccggctatggcgaacaggaactggatgccaactctgcccttatggaattggacaaaggcctaagatctggcaaacttggtgaacagtgtgaagcagttgttcgctttcccagactttttcagaagtatccattccctattcttatcaattctgcattcctaaagttagctgatgttttcagagttgggatgttgggaagtctggcatcaataattcctgagaggaagaatgctcatcatagtattcgtcagagtttagattcacatgataatgtagaagttgaagctgctgtttttgctgctgcaaacttctctgcacagtcaaaggattttgctgtaggaatctgtaacaaaatcagtgaaatgattcaaggtttagcgacaccagtagacttgaagctaaaattgatacccattctacagcacatgcaccatgatgcaatcttggcttccagtgctcgtcagcttttacaacagctggtcacatcctatccgtccaccaaaatggtgattgtgtctttgcacactttcactctgcttgcagcgtcatctttggttgatacacctaagcagattcagcttctgttgcagtatttgaagaatgatcccaggaaggcagtaaagagacttgctattcaagatctgaaattacttgctaataaaacaccacatacttggagtagggagaatattcaggcactttgtgagtgtgccctccagactccttatgacagcttaaaactagggatgttgtctgtcctttccacactatcagggaccatcgccatcaaacattacttcagtatagttccaggaaatgtgagttcttctcccagatcttctgatttagtcaaattagcccaagagtgctgttaccataataacaggggcattgcagctcatggagttagagtcctaactaatataactgtttcttgtcaagaaaaggatcttttggcactggaacaagatgctgtctttggcctggaatccctactggtactttgtagtcaagatgatagtccaggtgctcaggccactttaaagattgctctaaactgtatggtgaagttggccaagggcaggccccatcttagccagtcagtagttgagaccttgttgactcaattgcacagtgctcaagacgctgcccggattttgatgtgccattgcctggcagccattgccatgcaactgccggtgctgggtgatgggatgcttggtgacctcatggagctgtacaaggtgattggacgatcagccacagacaagcaacaagaacttctggtgagtttggctactgtgatttttgttgcaagtcagaaggcattgtctgtggaaagtaaggcagtaattaagcagcagcttgaaagtgtctccaatggatggactgtataccgtattgccagacaggcttccagaatgggtaatcatgacatggccaaagagctttatcagagtttgctgactcaggttgcctcagaacatttctacttctggctaaatagtttgaaggagttttcacatgcagaacagtgtctcactgggttgcaagaggaaaattatagttcagcactttcttgcattgctgaatctttaaaattctatcacaaagggattgcttccttaacagcagctagtacaccactgaatcctttaagctttcagtgtgaatttgtaaaactcaggattgaccttttacaagccttctctcaacttatctgtacttgtaatagcctgaagacaagcccaccacctgcaattgccacaacaattgccatgaccttaggaaatgacctccagaggtgtggtcgcatctccaatcagatgaaacagtccatggaagaatttcgaagccttgcttctcgatatggagatctttaccaggcatcttttgatgctgactcagcaactttgaggaatgttgaactacagcagcagagctgtttactgatatctcatgcaatagaagccctgattttggatccagaatcagcaagtttccaggaatatggatctactggaacagcccatgctgatagtgaatatgaaagaagaatgatgtctgtatataatcatgtcttggaggaggtagaatcactcaatcggaaatatacccctgtttcttatatgcacacagcatgcctctgcaatgccatcattgctttgctgaaagttcccctttctttccagagatattttttccagaaactacagtctaccagcatcaagcttgctctgtcaccatcgccccggaatcctgcagagcccattgctgtccagaataaccagcagctggcgctaaaggtagagggagtggttcagcacggatctaaaccaggactcttccgcaaaattcagtctgtctgtctgaatgtttcttccacactgcagagtaaatctggacaagactacaagatacccattgacaacatgaccaatgagatggagcaaagggttgaacctcataatgattacttcagtactcaatttctgttgaactttgctatccttggaacacacaacattacagtggaatcttctgtgaaagatgccaatggtatagtatggaagactggtcccagaactaccatatttgtaaaatccctggaagacccttattcccagcaaattcgcttacaacagcagcaagcccagcagccattacagcagcagcagcaacgcaatgcctacacacggttttaaccatggaatgaatgcactgcagactctcaagagatcaatcaaattgccagaaacagtttggtttttcatatggaataagtattaaagttacagtgtagttcatttattcattgatttttgtaatgtaatattctggaaaaaattttgttttcttaaaaattttgtctgacagctgggcgtggttgctcacgcctgtaatcccagcactttgggaggctgaggtgggcggctcacgaggagatcaagaccatcctggctaacacagtgaaaccccgtctccactaaaaaatac

SEQ ID NO: 143153 - DNA, 560 bp, Homo sapiens
  Payload ID: 8284
  Gene Symbol: INTS7
  Gene Name: integrator complex subunit 7
  ENST ID: ENST00000612340
  CDS Start-End: 1-459
gcaatagaagccctgattttggatccagaatcagcaagtttccaggaatatggatctactggaacagcccatgctgatagtgaatatgaaagaagaatgatgtctgtatataatcatgtcttggaggaggtagaatcactcaatcggaaatatacccctgtttcttatatgatacccattgacaacatgaccaatgagatggagcaaagggttgaacctcataatgattacttcagtactcaatttctgttgaactttgctatccttggaacacacaacattacagtggaatcttctgtgaaagatgccaatggtatagtatggaagactggtcccagaactaccatatttgtaaaatccctggaagacccttattcccagcaaattcgcttacaacagcagcaagcccagcagccattacagcagcagcagcaacgcaatgcctacacacggttttaaccatggaatgaatgcactgcagactctcaagagatcaatcaaattgccagaaacagtttggtttttcatatggaataagtattaaagttacagtgtagttc

SEQ ID NO: 143154 - DNA, 4447 bp, Homo sapiens
  Payload ID: 8284
  Gene Symbol: INTS7
  Gene Name: integrator complex subunit 7
  ENST ID: ENST00000469606
  CDS Start-End: 100-363
cggaagaaaaaccagcaagaaggcggcgggggaagatggcggtcctggggtagagtttgcaagctttctgactaggctagtcgagtaactattcgggtcatggcgtcaaactcaactaagtctttcctggcagatgccggctatggcgaacaggaactggatgccaactctgcccttatggaattggacaaaggcctaagatctggcaaacttggtgaacagtgtgaagcagttgttcgctttcccagactttttcagaagtatccattccctattcttatcaattctgcattcctaaagttagctgatgttttcagagttggcatgagatgcatgtctgtgaagtacctgaaacataaataatttcctgaggctatgtgttcttaaagttacccaacaaagtgagaaacatttggagaagattctaaatgtggatgaatttgtgaagagaattttttctgtgattcatagtaatgatcctgtggcaagagccatcaccctccggatgttgggaagtctggcatcaataattcctgagaggaagaatgctcatcatagtattcgtcagagtttagattcacatgataatgtagaagttgaagctgctgtttttgctgctgcaaacttctctgcacagtcaaaggattttgctgtaggaatctgtaacaaaatcagtgaaatgattcaaggtttagcgacaccagtagacttgaagctaaaattgatacccattctacagcacatgcaccatgatgcaatcttggcttccagtgctcgtcagcttttacaacagctggtcacatcctatccgtccaccaaaatggtgattgtgtctttgcacactttcactctgcttgcagcgtcatctttggttgatacacctaagcagattcagcttctgttgcagtatttgaagaatgatcccaggaaggcagtaaagagacttgctattcaagatctgaaattacttgctaataaaacaccacatacttggagtagggagaatattcaggcactttgtgagtgtgccctccagactccttatgacagcttaaaactagggatgttgtctgtcctttccacactatcagggaccatcgccatcaaacattacttcagtatagttccaggaaatgtgagttcttctcccagatcttctgatttagtcaaattagcccaagagtgctgttaccataataacaggggcattgcagctcatggagttagagtcctaactaatataactgtttcttgtcaagaaaaggatcttttggcactggaacaagatgctgtctttggcctggaatccctactggtactttgtagtcaagatgatagtccaggtgctcaggccactttaaagattgctctaaactgtatggtgaagttggccaagggcaggccccatcttagccagtcagtagttgagaccttgttgactcaattgcacagtgctcaagacgctgcccggattttgatgtgccattgcctggcagccattgccatgcaactgccggtgctgggtgatgggatgcttggtgacctcatggagctgtacaaggtgattggacgatcagccacagacaagcaacaagaacttctggtgagtttggctactgtgatttttgttgcaagtcagaaggcattgtctgtggaaagtaaggcagtaattaagcagcagcttgaaagtgtctccaatggatggactgtataccgtattgccagacaggcttccagaatgggtaatcatgacatggccaaagagctttatcagagtttgctgactcaggttgcctcagaacatttctacttctggctaaatagtttgaaggagttttcacatgcagaacagtgtctcactgggttgcaagaggaaaattatagttcagcactttcttgcattgctgaatctttaaaattctatcacaaagggattgcttccttaacagcagctagtacaccactgaatcctttaagctttcagtgtgaatttgtaaaactcaggattgaccttttacaagccttctctcaacttatctgtacttgtaatagcctgaagacaagcccaccacctgcaattgccacaacaattgccatgaccttaggaaatgacctccagaggtgtggtcgcatctccaatcagatgaaacagtccatggaagaatttcgaagccttgcttctcgatatggagatctttaccaggcatcttttgatgctgactcagcaactttgaggaatgttgaactacagcagcagagctgtttactgatatctcatgcaatagaagccctgattttggatccagaatcagcaagtttccaggaatatggatctactggaacagcccatgctgatagtgaatatgaaagaagaatgatgtctgtatataatcatgtcttggaggaggtagaatcactcaatcggaaatatacccctgtttcttatatgcacacagcatgcctctgcaatgccatcattgctttgctgaaagttcccctttctttccagagatattttttccagaaactacagtctaccagcatcaagcttgctctgtcaccatcgccccggaatcctgcagagcccattgctgtccagaataaccagcagctggcgctaaaggtagagggagtggttcagcacggatctaaaccaggactcttccgcaaaattcagtctgtctgtctgaatgtttcttccacactgcagagtaaatctggacaagactacaagatacccattgacaacatgaccaatgagatggagcaaagggttgaacctcataatgattacttcagtactcaatttctgttgaactttgctatccttggaacacacaacattacagtggaatcttctgtgaaagatgccaatggtatagtatggaagactggtcccagaactaccatatttgtaaaatccctggaagacccttattcccagcaaattcgcttacaacagcagcaagcccagcagccattacagcagcagcagcaacgcaatgcctacacacggttttaaccatggaatgaatgcactgcagactctcaagagatcaatcaaattgccagaaacagtttggtttttcatatggaataagtattaaagttacagtgtagttcatttattcattgatttttgtaatgtaatattctggaaaaaattttgttttcttaaaaattttgtctgacagctgggcgtggttgctcacgcctgtaatcccagcactttgggaggctgaggtgggcggctcacgaggagatcaagaccatcctggctaacacagtgaaaccccgtctccactaaaaaatacaaaaaaattagccaagcatggtggcaggcgcctgtagtcccagctacttgggaggctgaggcaggagaatggtgtgaacctgggaggcggagcttgcagtgagccgagactgtgctccagcctgggcgacagagcgagactccgtctcaaaaaaataaataaatacattttgtctgaaaaataactgggatcctggccagaaagattgttctttcttgttttattattagttttttctgttgccaagcttttttttctttcaagaatagtcacatgttgagatcactgaattggtaaatttgaccgctactcttccaaaatacatcatttgctgcctgacttagacctaggattctgagttgttcattgggaggttctgaccagtcactacaaggtttatccatggtagcagaacctgagtccttctgtagatggacttgaaagtgttccgtgcaacatccagccttctggattatgaaagcccacagtctaacagtattgaaacatcctgctgtattagttcaaccacatatttatctcttcctgtgctaaagcagtctttattattttcatatttaattgaaacaaagagcagctagcaatttcatagaaaattaatttgttttttctgatgtgtctgcaactgtgtataatacagacatttcacattgtttccaaaagtgaagaacactcatttaatatcttcaatgttttaagttagaaggggtggatcttttcctttggttggtgattggtttggtttatacttgatgagttatgctagactgattgtttagagagagcagtctctttattacacaggctcagtttgttgggatgctcagggaacagagttttctggttagccagaaaacccccttttttcctattttaattctggttgaaaaccatgataaaatagactttcttagcacagtatggtagatataacttaactgctttttgattggggatcatttagggcttcaggatcacgatttctaaacatcagggatcatatggttgcagatgccgatgctataagtaatttggccggatgcagctcctaaggtaaagcagggtactttccctggaatttcctttttaaataaatatctgtttctttgcttgtg

SEQ ID NO: 143155 - DNA, 795 bp, Homo sapiens
  Payload ID: 8284
  Gene Symbol: INTS7
  Gene Name: integrator complex subunit 7
  ENST ID: ENST00000475798
  CDS Start-End: 1-344
cagtaattaagcagcagcttgaaagtgtctccaatggatggactgtataccgtattgccagacaggcttccagaatgggtaatcatgacatggccaaagagctttatcagagtttgctgactcaggttgcctcagaacatttctacttctggctaaatagtttgaaggagttttcacatgcagaacagtgtctcactgggttgcaagaggaaaattatagttcagcactttcttgcattgctgaatctttaaaattctatcacaaagggattgcttccttaacacctgaagacaagcccaccacctgcaattgccacaacaattgccatgaccttaggaaatgacctccagaggtgtggtcgcatctccaatcagatgaaacagtccatggaagaatttcgaagccttgcttctcgatatggagatctttaccaggcatcttttgatgctgactcagcaactttgaggaatgttgaactacagcagcagagctgtttactgatatctcatgcaatagaagccctgattttggatccagaatcagcaagtttccaggaatatggatctactggaacagcccatgctgatagtgaatatgaaagaagaatgatgtctgtatataatcatgtcttggaggaggtagaatcactcaatcggaaatatacccctgtttcttatatgcacacagcatgcctctgcaatgccatcattgctttgctgaaagttcccctttctttccagagatattttttccagaaactacagtctaccagcatcaagcttgctctgtcacca

SEQ ID NO: 143156 - DNA, 571 bp, Homo sapiens
  Payload ID: 8284
  Gene Symbol: INTS7
  Gene Name: integrator complex subunit 7
  ENST ID: ENST00000619805
  CDS Start-End: 94-222
aaaaaccagcaagaaggcggcgggggaagatggcggtcctggggtagagtttgcaagctttctgactaggctagtcgagtaactattcgggtcatggcgtcaaactcaactaagtctttcctggcagatgccggctatggcgaacaggaactggatgccaactctgcccttatggaattggacaaagacggtgtcacctcacctgtattccaaaatacctgaattctcagaccatcaagaaagtttgtcaagaaagaccacagattgcttttacattatcgatatggctcagatgttgttggtgtttcagtaaacaaatatgaggcctttggggaagtatcttcataggccctcctcaagagaaaggcctcagcagccagatttgttccaggcctaagatctggcaaacttggtgaacagtgtgaagcagttgttcgctttcccagactttttcagaagtatccattccctattcttatcaattctgcattcctaaagttagctgatgttttcagagttggaaataatttcctgaggctatgtgttcttaaagttacccaacaaagtgaga

SEQ ID NO: 143157 - DNA, 3434 bp, Homo sapiens
  Payload ID: 8285
  Gene Symbol: INTS8
  Gene Name: integrator complex subunit 8
  ENST ID: ENST00000343161
  CDS Start-End: 57-2333
caagtgtcaggttggagccgggaagcggccctggtggtagcggcggcgggggcaggatgagcgcggaggcggcggaccgggaggcggccacctccagccggccctgcaccccgccgcagacctgctggtttgagtttctgctggaggagtcactgttggagaaacatctgcgcaagccctgcccggatcctgcaccagttcaacttatagttcagtttttggaacaggcttccaaaccttcagttaatgaacaaaaccaagttcaacctccgcctgataacaagagaaatcgtattttaaaactacttgctcttaaagttgctgcacatttgaagtgggacttagacatattagagaaaagtttgtctgttccagtattgaatatgctactaaatgaactactctgcatcagtaaagttcctcctgggacaaagcatgtagacatggatctggccactttacctccgaccactgccatggctgtacttctctataatagatgggcaattaggacaattgttcaaagtagttttccagtcaaacaggcaaaacccggaccccctcagttaagtgttatgaatcaaatgcaacaggaaaaagagctaacagaaaacattttgaaagtgctcaaagaacaagctgctgattctattttggtactagaagcagccctaaaattaaacaaggatctttatgtccatacgatgagaactctagatttattggccatggaaccaggcatggtaaatggagaaactgagagttctactgctggattgaaagtcaaaaccgaagaaatgcagtgccaggtgtgctatgatttgggcgcagcatacttccagcaaggctccacaaattcagctgtctatgaaaatgccagggaaaaattttttagaaccaaagaactaattgcagagataggttcattatctcttcattgtaccatagatgagaagcggttagctggctattgtcaagcatgtgatgttcttgtaccttcttctgatagtacatctcaacagttgactccatatagtcaagtccatatttgtttgagatctggcaactatcaggaggtaatacagattttcattgaagacaacttaaccttgagtttacctgtccagttccgacagtcagtcctaagagaactctttaagaaagctcaacagggaaatgaagctctagatgaaatctgttttaaagtttgtgcctgtaatacagtccgtgatatactggaaggcagaacaattagtgttcaatttaaccagctatttcttagaccaaataaagagaaaatagactttcttcttgaggtatgttcaagatcagtaaatttagaaaaagcttcagagtctttgaaaggaaacatggctgcttttctaaagaatgtgtgtctggggttggaagatctgcagtatgttttcatgatttcttcacatgagcttttcattacattgttgaaagatgaagaacgaaagctacttgttgatcagatgaggaagagatcccctagagtaaatctgtgcattaaacctgtaacttcattttatgatatcccagcttcagcaagtgtcaacattggtcagttagagcatcaacttatattgtcagtggatccttggaggattagacaaattttaattgaattacatggtatgacttcagagcgccagttctggacagtgtctaataagtgggaagtaccttctgtctatagtggtgttatcctgggaattaaagacaatttaacaagagatttggtttatattcttatggccaaaggtttgcactgcagtactgttaaggacttttcccatgctaaacagctctttgctgcttgtttggagttggtaacagagttctcaccgaagcttcgtcaggtcatgctgaatgagatgttgcttttggatattcatacacacgaagctgggacagggcaggcaggagagagaccgccatccgaccttataagtagagtacgaggctatctggaaatgaggcttcctgatattcctcttcgtcaagttatagctgaggaatgtgttgcctttatgttaaactggagagaaaatgaataccttacactccaagttcctgcatttttgcttcagagtaatccatatgtaaagcttggacagcttttagcagctacatgcaaagaacttccaggccctaaagaaagtagacggactgccaaagacctttgggaagttgttgttcaaatctgtagtgtgtccagtcagcacaaacgaggaaatgatggcagagttagtttaataaaacagagggaatctacgttaggtatcatgtatcggtatgtattggagtgaactgctttcttttatcaaaaaattacgaggacagggtcttgatctgtcacccaagctggagtgctgaggtgaaccactcgttttgactattattttatcactctttgtgaaacttcacaatgttcgggaggacattgtgaatgatattacagctgaacacatttctatttggccatcttccattcccaaacatcacgttgctttgtcgcccaggctggagtgcagtggtgaggtctcagctcactgcaacctacgcctgcaaggttcaagcgattctcatgcctcagcctgccaagtatctgggattacagcctccagtctgtggactttgaagctgtggcaatcacagtgaaagagctagttcgatatacactcagtataaatccaaataaccattcttggttaattatccaggcagatatttactttgcaacgaatcagtattcagcagctcttcactattacctccaggcaggagctgtgtgttctgacttctttaacaaggctgtgccccctgatgtttatacagaccaggtaataaaacgaatgataaaatgttgttctttgctgaattgccacacacaggtggccattttatgtcagttcctcagagaaattgactacaaaacagcgtttaaatctctgcaagaacaaaacagtcatgatgctatggactcctactacgactacatatgggatgttaccattttggaatacttgacttatcttcatcataaaagaggagaaacagataaaagacaaattgcaatcaaagccatcggccagacagagttgaatgcaagcaatccagaagaagtgttacagctggcagcgcagagaaggaaaaaaaagtttctccaagcaatggcaaaactttacttttaagcagttaaatttttttaacttttattttttaaacaatgggctaaaaataaacagtattaaaaggttaagtttatataatacatatgtacacaattagtggtgttttcttttcagacaaaatactgaaacaaatattagtttaaaaacaaactatacagaagacttcataccgtaacaataaatgtatagtttcttcaaagggagaagagattcaca

SEQ ID NO: 143158 - DNA, 3272 bp, Homo sapiens
  Payload ID: 8285
  Gene Symbol: INTS8
  Gene Name: integrator complex subunit 8
  ENST ID: ENST00000524333
  CDS Start-End: 134-1009
tgtgtgagtttccgggacgttcggagggtggcctctctcccaccgggttccgcataccccaggcaccggcccgcatccaagtgtcaggttggagccgggaagcggccctggtggtagcggcggcgggggcaggatgagcgcggaggcggcggaccgggaggcggccacctccagccggccctgcaccccgccgcagacctgctggtttgagtttctgctggaggagtcactgttggagaaacatctgcgcaagccctgcccggatcctgcaccagttcaacttatagttcagtttttggaacaggcttccaaaccttcagttaatgaacaaaaccaagttcaacctccgcctgataacaagagaaatcgtattttaaaactacttgctcttaaagttgctgcacatttgaagtgggacttagacatattagagaaaagtttgtctgttccagtattgaatatgctactaaatgaactactctgcatcagtaaagttcctcctgggacaaagcatgtagacatggatctggccactttacctccgaccactgccatggctgtacttctctataatagatgggcaattaggacaattgttcaaagtagttttccagtcaaacaggcaaaacccggaccccctcagttaagtgttatgaatcaaatgcaacaggaaaaagagctaacagaaaacattttgaaagtgctcaaagaacaagctgctgattctattttggtactagaagcagccctaaaattaaacaaggatctttatgtccatacgatgagaactctagatttattggccatggaaccaggcatggtaaatggagaaactgagagttctactgctggattgaaagtcaaaaccgaagaaatgcagtgccaggtgtgctatgatttgggcgcagcatacttccagcaaggctccacaaattcagctgtctatgaaaatgccagggaaaaattttttagaaccaaagaactaattgcagagatgagaagcggttagctggctattgtcaagcatgtgatgttcttgtaccttcttctgatagtacatctcaacagttgactccatatagtcaagtccatatttgtttgagatctggcaactatcaggaggtaatacagattttcattgaagacaacttaaccttgagtttacctgtccagttccgacagtcagtcctaagagaactctttaagaaagctcaacagggaaatgaagctctagatgaaatctgttttaaagtttgtgcctgtaatacagtccgtgatatactggaaggcagaacaattagtgttcaatttaaccagctatttcttagaccaaataaagagaaaatagactttcttcttgaggtatgttcaagatcagtaaatttagaaaaagcttcagagtctttgaaaggaaacatggctgcttttctaaagaatgtgtgtctggggttggaagatctgcagtatgttttcatgatttcttcacatgagcttttcattacattgttgaaagatgaagaacgaaagctacttgttgatcagatgaggaagagatcccctagagtaaatctgtgcattaaacctgtaacttcattttatgatatcccagcttcagcaagtgtcaacattggtcagttagagcatcaacttatattgtcagtggatccttggaggattagacaaattttaattgaattacatggtatgacttcagagcgccagttctggacagtgtctaataagtgggaagtaccttctgtctatagtggtgttatcctgggaattaaagacaatttaacaagagatttggtttatattcttatggccaaaggtttgcactgcagtactgttaaggacttttcccatgctaaacagctctttgctgcttgtttggagttggtaacagagttctcaccgaagcttcgtcaggtcatgctgaatgagatgttgcttttggatattcatacacacgaagctgggacagggcaggcaggagagagaccgccatccgaccttataagtagagtacgaggctatctggaaatgaggcttcctgatattcctcttcgtcaagttatagctgaggaatgtgttgcctttatgttaaactggagagaaaatgaataccttacactccaagttcctgcatttttgcttcagagtaatccatatgtaaagcttggacagcttttagcagctacatgcaaagaacttccaggccctaaagaaagtagacggactgccaaagacctttgggaagttgttgttcaaatctgtagtgtgtccagtcagcacaaacgaggaaatgatggcagagttagtttaataaaacagagggaatctacgttaggtatcatgtatcggtatgtattggagtgaactgctttcttttatcaaaaaattacgagaaccactcgttttgactattattttatcactctttgtgaaacttcacaatgttcgggtaagtatttcataatttcatttagaaaaatttaaaagaaatttctttgtaaatcacacctttttttttctttttaaaggaggacattgtgaatgatattacagctgaacacatttctatttggccatcttccattcccaacctccagtctgtggactttgaagctgtggcaatcacagtgaaagagctagttcgatatacactcagtataaatccaaataaccattcttggttaattatccaggcagatatttactttgcaacgaatcagtattcagcagctcttcactattacctccaggcaggagctgtgtgttctgacttctttaacaaggctgtgccccctgatgtttatacagaccaggtaataaaacgaatgataaaatgttgttctttgctgaattgccacacacaggtggccattttatgtcagttcctcagagaaattgactacaaaacagcgtttaaatctctgcaagaacaaaacagtcatgatgctatggactcctactacgactacatatgggatgttaccattttggaatacttgacttatcttcatcataaaagaggagaaacagataaaagacaaattgcaatcaaagccatcggccagacagagttgaatgcaagcaatccagaagaagtgttacagctggcagcgcagagaaggaaaaaaaagtttctccaagcaatggcaaaactttacttttaagcagttaaatttttttaacttttattttttaaacaatgggctaaaaataaacagtattaaaaggttaagtttatataatacatatgtacacaa

SEQ ID NO: 143159 - DNA, 581 bp, Homo sapiens
  Payload ID: 8285
  Gene Symbol: INTS8
  Gene Name: integrator complex subunit 8
  ENST ID: ENST00000519457
  CDS Start-End: 143-581
attttggattgtgtgagtttccgggacgttcggagggtggcctctctcccaccgggttccgcataccccaggcaccggcccgcatccaagtgtcaggttggagccgggaagcggccctggtggtagcggcggcgggggcaggatgagcgcggaggcggcggaccgggaggcggccacctccagccggccctgcaccccgccgcagacctgctggtttgagtttctgctggaggagtcactgttggagaaacatctgcgcaagccctgcccggatcctgcaccagttcaacttatagttcagtttttggaacaggcttccaaaccttcagttaatgaacaaaaccaagttcaacctccgcctgataacaagagaaatcgtattttaaaactacttgctcttaaagttgctgcacatttgaagtgggacttagacatattagagaaaagggcaattaggacaattgttcaaagtagttttccagtcaaacaggcaaaacccggaccccctcagttaagtgttatgaatcaaatgcaacaggaaaaagagctaacagaaaacattttgaaagtgctcaaagaac

SEQ ID NO: 143160 - DNA, 569 bp, Homo sapiens
  Payload ID: 8285
  Gene Symbol: INTS8
  Gene Name: integrator complex subunit 8
  ENST ID: ENST00000519053
  CDS Start-End: 287-569
ttgtgtgagtttccgggacgttcggagggtggcctctctcccaccgggttccgcataccccaggcaccggcccgcatccaagtgtcaggttggagccgggaagcggccctggtggtagcggcggcgggggcaggatgagcgcggaggcggcggaccgggaggcggccacctccagccggccctgcaccccgccgcagacctgctggtttgagtttctgctggaggagtcactgttggagaaacatctgcgcaagccctgcccggtttgtctgttccagtattgaatatgctactaaatgaactactctgcatcagtaaagttcctcctgggacaaagcatgtagacatggatctggccactttacctccgaccactgccatggctgtacttctctataatagatgggcaattaggacaattgttcaaagtagttttccagtcaaacaggcaaaacccggaccccctcagttaagtgttatgaatcaaatgcaacaggaaaaagagctaacagaaaacattttgaaagtgctcaaagaacaagctgctgattctattttggtactagaag

SEQ ID NO: 143161 - DNA, 735 bp, Homo sapiens
  Payload ID: 8285
  Gene Symbol: INTS8
  Gene Name: integrator complex subunit 8
  ENST ID: ENST00000522171
  CDS Start-End: 122-735
gttaaataggtaactgcaaggaggtgatatgaatgccatgaccgggatgcacagctctatggccacatacaacagggtgcctacctgtccaaggaggtagtgaagaccgcagagaaaagtcatgtttgatcctgcaccagttcaacttatagttcagtttttggaacaggcttccaaaccttcagttaatgaacaaaaccaagttcaacctccgcctgataacaagagaaatcgtattttaaaactacttgctcttaaagttgctgcacatttgaagtgggacttagacatattagagaaaagtttgtctgttccagtattgaatatgctactaaatgaactactctgcatcagtaaagttcctcctgggacaaagcatgtagacatggatctggccactttacctccgaccactgccatggctgtacttctctataatagatgggcaattaggacaattgttcaaagtagttttccagtcaaacaggcaaaacccggaccccctcagttaagtgttatgaatcaaatgcaacaggaaaaagagctaacagaaaacattttgaaagtgctcaaagaacaagctgctgattctattttggtactagaagcagccctaaaattaaacaaggatctttatgtccatacgatgagaactctagatttattggccatggaaccaggcatggtaaatggagaaactgagagttctactgctggattgaaagtcaaaaccga

SEQ ID NO: 143162 - DNA, 3351 bp, Homo sapiens
  Payload ID: 8285
  Gene Symbol: INTS8
  Gene Name: integrator complex subunit 8
  ENST ID: ENST00000523206
  CDS Start-End: 57-932
caagtgtcaggttggagccgggaagcggccctggtggtagcggcggcgggggcaggatgagcgcggaggcggcggaccgggaggcggccacctccagccggccctgcaccccgccgcagacctgctggtttgagtttctgctggaggagtcactgttggagaaacatctgcgcaagccctgcccggatcctgcaccagttcaacttatagttcagtttttggaacaggcttccaaaccttcagttaatgaacaaaaccaagttcaacctccgcctgataacaagagaaatcgtattttaaaactacttgctcttaaagttgctgcacatttgaagtgggacttagacatattagagaaaagtttgtctgttccagtattgaatatgctactaaatgaactactctgcatcagtaaagttcctcctgggacaaagcatgtagacatggatctggccactttacctccgaccactgccatggctgtacttctctataatagatgggcaattaggacaattgttcaaagtagttttccagtcaaacaggcaaaacccggaccccctcagttaagtgttatgaatcaaatgcaacaggaaaaagagctaacagaaaacattttgaaagtgctcaaagaacaagctgctgattctattttggtactagaagcagccctaaaattaaacaaggatctttatgtccatacgatgagaactctagatttattggccatggaaccaggcatggtaaatggagaaactgagagttctactgctggattgaaagtcaaaaccgaagaaatgcagtgccaggtgtgctatgatttgggcgcagcatacttccagcaaggctccacaaattcagctgtctatgaaaatgccagggaaaaattttttagaaccaaagaactaattgcagagatgagaagcggttagctggctattgtcaagcatgtgatgttcttgtaccttcttctgatagtacatctcaacagttgactccatatagtcaagtccatatttgtttgagatctggcaactatcaggaggtaatacagattttcattgaagacaacttaaccttgagtttacctgtccagttccgacagtcagtcctaagagaactctttaagaaagctcaacagggaaatgaagctctagatgaaatctgttttaaagtttgtgcctgtaatacagtccgtgatatactggaaggcagaacaattagtgttcaatttaaccagctatttcttagaccaaataaagagaaaatagactttcttcttgaggtatgttcaagatcagtaaatttagaaaaagcttcagagtctttgaaaggaaacatggctgcttttctaaagaatgtgtgtctggggttggaagatctgcagtatgttttcatgatttcttcacatgagcttttcattacattgttgaaagatgaagaacgaaagctacttgttgatcagatgaggaagagatcccctagagtaaatctgtgcattaaacctgtaacttcattttatgatatcccagcttcagcaagtgtcaacattggtcagttagagcatcaacttatattgtcagtggatccttggaggattagacaaattttaattgaattacatggtatgacttcagagcgccagttctggacagtgtctaataagtgggaagtaccttctgtctatagtggtgttatcctgggaattaaagacaatttaacaagagatttggtttatattcttatggccaaaggtttgcactgcagtactgttaaggacttttcccatgctaaacagctctttgctgcttgtttggagttggtaacagagttctcaccgaagcttcgtcaggtcatgctgaatgagatgttgcttttggatattcatacacacgaagctgggacagggcaggcaggagagagaccgccatccgaccttataagtagagtacgaggctatctggaaatgaggcttcctgatattcctcttcgtcaagttatagctgaggaatgtgttgcctttatgttaaactggagagaaaatgaataccttacactccaagttcctgcatttttgcttcagagtaatccatatgtaaagcttggacagcttttagcagctacatgcaaagaacttccaggccctaaagaaagtagacggactgccaaagacctttgggaagttgttgttcaaatctgtagtgtgtccagtcagcacaaacgaggaaatgatggcagagttagtttaataaaacagagggaatctacgttaggtatcatgtatcggagtgaactgctttcttttatcaaaaaattacgagaaccactcgttttgactattattttatcactctttgtgaaacttcacaatgttcgggaggacattgtgaatgatattacagctgaacacatttctatttggccatcttccattcccaaacatcacgttgctttgtcgcccaggctggagtgcagtggtgaggtctcagctcactgcaacctacgcctgcaaggttcaagcgattctcatgcctcagcctgccaagtatctgggattacagcctccagtctgtggactttgaagctgtggcaatcacagtgaaagagctagttcgatatacactcagtataaatccaaataaccattcttggttaattatccaggcagatatttactttgcaacgaatcagtattcagcagctcttcactattacctccaggcaggagctgtgtgttctgacttctttaacaaggctgtgccccctgatgtttatacagaccaggtaataaaacgaatgataaaatgttgttctttgctgaattgccacacacaggtggccattttatgtcagttcctcagagaaattgactacaaaacagcgtttaaatctctgcaagaacaaaacagtcatgatgctatggactcctactacgactacatatgggatgttaccattttggaatacttgacttatcttcatcataaaagaggagaaacagataaaagacaaattgcaatcaaagccatcggccagacagagttgaatgcaagcaatccagaagaagtgttacagctggcagcgcagagaaggaaaaaaaagtttctccaagcaatggcaaaactttacttttaagcagttaaatttttttaacttttattttttaaacaatgggctaaaaataaacagtattaaaaggttaagtttatataatacatatgtacacaattagtggtgttttcttttcagacaaaatactgaaacaaatattagtttaaaaacaaactatacagaagacttcataccgtaacaataaatgtatagtttcttcaaagggagaagagattcaca

SEQ ID NO: 143163 - DNA, 597 bp, Homo sapiens
  Payload ID: 8285
  Gene Symbol: INTS8
  Gene Name: integrator complex subunit 8
  ENST ID: ENST00000523808
  CDS Start-End: 10-597
gctcaccgtatgctgccatccgtccaggaagcgagtgggaagctggtgttctcggcaggacggcgggagcatctgaggagaggacccaggtgcgaggaaatctcagaaatgggaacggggaaattgaaagcacaggagataaactttgcttgggtcacaactagaacccttcgcttcgcctttacgaaaatattgaggcccgttgcaaccctagatgaggttgtctcattttctcgctggagaactgtcagggaacacggaaaacccacccgcgacccggcttcatgcggcgccgtctcctatggcaaccgggaggaggcgtggttcgaagatcctgcaccagttcaacttatagttcagtttttggaacaggcttccaaaccttcagttaatgaacaaaaccaagttcaacctccgcctgataacaagagaaatcgtattttaaaactacttgctcttaaagttgctgcacatttgaagtgggacttagacatattagagaaaagtttgtctgttccagtattgaatatgctactaaatgaactactctgcatcagtaaagttcctcctgggacaaagcatgtagacatggatctg

SEQ ID NO: 143164 - DNA, 548 bp, Homo sapiens
  Payload ID: 8285
  Gene Symbol: INTS8
  Gene Name: integrator complex subunit 8
  ENST ID: ENST00000521860
  CDS Start-End: 1-548
gaacaacgattggtccgaaggcgcggcggtggcgcggggaggcggatccaggaccgcagctccggctggcccgcgccgccattttggattgtatcctgcaccagttcaacttatagttcagtttttggaacaggcttccaaaccttcagttaatgaacaaaaccaagttcaacctccgcctgataacaagagaaatcgtattttaaaactacttgctcttaaagttgctgcacatttgaagtgggacttagacatattagagaaaagtttgtctgttccagtattgaatatgctactaaatgaactactctgcatcagtaaagttcctcctgggacaaagcatgtagacatggatctggccactttacctccgaccactgccatggctgtacttctctataatagatgggcaattaggacaattgttcaaagtagttttccagtcaaacaggcaaaacccggaccccctcagttaagtgttatgaatcaaatgcaacaggaaaaagagctaacagaaaacattttgaaagtgctcaaagaacaagctg

SEQ ID NO: 143165 - DNA, 2482 bp, Homo sapiens
  Payload ID: 8285
  Gene Symbol: INTS8
  Gene Name: integrator complex subunit 8
  ENST ID: ENST00000520526
  CDS Start-End: 1-2402
aggaaaaagagctaacagaaaacattttgaaagtgctcaaagaacaagctgctgattctattttggtactagaagcagccctaaaattaaacaaggatctttatgtccatacgatgagaactctagatttattggccatggaaccaggcatggtaaatggagaaactgagagttctactgctggattgaaagtcaaaaccgaagaaatgcagtgccaggtgtgctatgatttgggcgcagcatacttccagcaaggctccacaaattcagctgtctatgaaaatgccagggaaaaattttttagaaccaaagaactaattgcagagataggttcattatctcttcattgtaccatagatgagaagcggttagctggctattgtcaagcatgtgatgttcttgtaccttcttctgatagtacatctcaacagttgactccatatagtcaagtccatatttgtttgagatctggcaactatcaggaggtaatacagattttcattgaagacaacttaaccttgagtttacctgtccagttccgacagtcagtcctaagagaactctttaagaaagctcaacagggaaatgaagctctagatgaaatctgttttaaagtttgtgcctgtaatacagtccgtgatatactggaaggcagaacaattagtgttcaatttaaccagctatttcttagaccaaataaagagaaaatagactttcttcttgaggtatgttcaagatcagtaaatttagaaaaagcttcagagtctttgaaaggaaacatggctgcttttctaaagaatgtgtgtctggggttggaagatctgcagtatgttttcatgatttcttcacatgagcttttcattacattgttgaaagatgaagaacgaaagctacttgttgatcagatgaggaagagatcccctagagtaaatctgtgcattaaacctgtaacttcattttatgatatcccagcttcagcaagtgtcaacattggtcagttagagcatcaacttatattgtcagtggatccttggaggattagacaaattttaattgaattacatggtatgacttcagagcgccagttctggacagtgtctaataagtgggaagtaccttctgtctatagtggtgttatcctgggaattaaagacaatttaacaagagatttggtttatattcttatggccaaaggtttgcactgcagtactgttaaggacttttcccatgctaaacagctctttgctgcttgtttggagttggtaacagagttctcaccgaagcttcgtcaggtcatgctgaatgagatgttgcttttggatattcatacacacgaagctgggacagggcaggcaggagagagaccgccatccgaccttataagtagagtacgaggctatctggaaatgaggcttcctgatattcctcttcgtcaagttatagctgaggaatgtgttgcctttatgttaaactggagagaaaatgaataccttacactccaagttcctgcatttttgcttcagagtaatccatatgtaaagcttggacagcttttagcagctacatgcaaagaacttccaggccctaaagaaagtagacggactgccaaagacctttgggaagttgttgttcaaatctgtagtgtgtccagtcagcacaaacgaggaaatgatggcagagttagtttaataaaacagagggaatctacgttaggtatcatgtatcggagtgaactgctttcttttatcaaaaaattacgagaaccactcgttttgactattattttatcactctttgtgaaacttcacaatgttcgggaggacattgtgaatgatattacagctgaacacatttctatttggccatcttccattcccaacctccagtctgtggactttgaagctgtggcaatcacagtgaaagagctagttcgatatacactcagtataaatccaaataaccattcttggttaattatccaggcagatatttactttgcaacgaatcagtattcagcagctcttcactattacctccaggcaggagctgtgtgttctgacttctttaacaaggctgtgccccctgatgtttatacagaccaggtggccattttatgtcagttcctcagagaaattgactacaaaacagcgtttaaatctctgcaagaacaaaacagtcatgatgctatggactcctactacgactacatatgggatgttaccattttggaatacttgacttatcttcatcataaaagaggagaaacagataaaagacaaattgcaatcaaagccatcggccagacagagttgaatgcaagcaatccagaagaagtgttacagctggcagcgcagagaaggaaaaaaaagtttctccaagcaatggcaaaactttacttttaagcagttaaatttttttaacttttattttttaaacaatgggctaaaaataaacagtattaaaaggttaagtttatataata

SEQ ID NO: 143166 - DNA, 4633 bp, Homo sapiens
  Payload ID: 8285
  Gene Symbol: INTS8
  Gene Name: integrator complex subunit 8
  Uniprot ID: Q75QN2
  ENST ID: ENST00000523731
  CDS Start-End: 134-3121
tgtgtgagtttccgggacgttcggagggtggcctctctcccaccgggttccgcataccccaggcaccggcccgcatccaagtgtcaggttggagccgggaagcggccctggtggtagcggcggcgggggcaggatgagcgcggaggcggcggaccgggaggcggccacctccagccggccctgcaccccgccgcagacctgctggtttgagtttctgctggaggagtcactgttggagaaacatctgcgcaagccctgcccggatcctgcaccagttcaacttatagttcagtttttggaacaggcttccaaaccttcagttaatgaacaaaaccaagttcaacctccgcctgataacaagagaaatcgtattttaaaactacttgctcttaaagttgctgcacatttgaagtgggacttagacatattagagaaaagtttgtctgttccagtattgaatatgctactaaatgaactactctgcatcagtaaagttcctcctgggacaaagcatgtagacatggatctggccactttacctccgaccactgccatggctgtacttctctataatagatgggcaattaggacaattgttcaaagtagttttccagtcaaacaggcaaaacccggaccccctcagttaagtgttatgaatcaaatgcaacaggaaaaagagctaacagaaaacattttgaaagtgctcaaagaacaagctgctgattctattttggtactagaagcagccctaaaattaaacaaggatctttatgtccatacgatgagaactctagatttattggccatggaaccaggcatggtaaatggagaaactgagagttctactgctggattgaaagtcaaaaccgaagaaatgcagtgccaggtgtgctatgatttgggcgcagcatacttccagcaaggctccacaaattcagctgtctatgaaaatgccagggaaaaattttttagaaccaaagaactaattgcagagataggttcattatctcttcattgtaccatagatgagaagcggttagctggctattgtcaagcatgtgatgttcttgtaccttcttctgatagtacatctcaacagttgactccatatagtcaagtccatatttgtttgagatctggcaactatcaggaggtaatacagattttcattgaagacaacttaaccttgagtttacctgtccagttccgacagtcagtcctaagagaactctttaagaaagctcaacagggaaatgaagctctagatgaaatctgttttaaagtttgtgcctgtaatacagtccgtgatatactggaaggcagaacaattagtgttcaatttaaccagctatttcttagaccaaataaagagaaaatagactttcttcttgaggtatgttcaagatcagtaaatttagaaaaagcttcagagtctttgaaaggaaacatggctgcttttctaaagaatgtgtgtctggggttggaagatctgcagtatgttttcatgatttcttcacatgagcttttcattacattgttgaaagatgaagaacgaaagctacttgttgatcagatgaggaagagatcccctagagtaaatctgtgcattaaacctgtaacttcattttatgatatcccagcttcagcaagtgtcaacattggtcagttagagcatcaacttatattgtcagtggatccttggaggattagacaaattttaattgaattacatggtatgacttcagagcgccagttctggacagtgtctaataagtgggaagtaccttctgtctatagtggtgttatcctgggaattaaagacaatttaacaagagatttggtttatattcttatggccaaaggtttgcactgcagtactgttaaggacttttcccatgctaaacagctctttgctgcttgtttggagttggtaacagagttctcaccgaagcttcgtcaggtcatgctgaatgagatgttgcttttggatattcatacacacgaagctgggacagggcaggcaggagagagaccgccatccgaccttataagtagagtacgaggctatctggaaatgaggcttcctgatattcctcttcgtcaagttatagctgaggaatgtgttgcctttatgttaaactggagagaaaatgaataccttacactccaagttcctgcatttttgcttcagagtaatccatatgtaaagcttggacagcttttagcagctacatgcaaagaacttccaggccctaaagaaagtagacggactgccaaagacctttgggaagttgttgttcaaatctgtagtgtgtccagtcagcacaaacgaggaaatgatggcagagttagtttaataaaacagagggaatctacgttaggtatcatgtatcggagtgaactgctttcttttatcaaaaaattacgagaaccactcgttttgactattattttatcactctttgtgaaacttcacaatgttcgggaggacattgtgaatgatattacagctgaacacatttctatttggccatcttccattcccaacctccagtctgtggactttgaagctgtggcaatcacagtgaaagagctagttcgatatacactcagtataaatccaaataaccattcttggttaattatccaggcagatatttactttgcaacgaatcagtattcagcagctcttcactattacctccaggcaggagctgtgtgttctgacttctttaacaaggctgtgccccctgatgtttatacagaccaggtaataaaacgaatgataaaatgttgttctttgctgaattgccacacacaggtggccattttatgtcagttcctcagagaaattgactacaaaacagcgtttaaatctctgcaagaacaaaacagtcatgatgctatggactcctactacgactacatatgggatgttaccattttggaatacttgacttatcttcatcataaaagaggagaaacagataaaagacaaattgcaatcaaagccatcggccagacagagttgaatgcaagcaatccagaagaagtgttacagctggcagcgcagagaaggaaaaaaaagtttctccaagcaatggcaaaactttacttttaagcagttaaatttttttaacttttattttttaaacaatgggctaaaaataaacagtattaaaaggttaagtttatataatacatatgtacacaattagtggtgttttcttttcagacaaaatactgaaacaaatattagtttaaaaacaaactatacagaagacttcataccgtaacaataaatgtatagtttcttcaaagggagaagagattcacatatctgataacaaaataaactagcaatctagttttctaatctactttatgaggctggattttttttttagaaaagctaatttaaaatatttagaaatagctagcctatgtacagcaagttttcatgtctttttttaataaatagatttctaggagtcagtatatatttaatactcttcttccttaagaaaatagaagtttaggtcaagtgttaagctttatcactttgacactgtccttatctcacaatggaggaatttagaaaggaccttaacagtttcacaaacataaataaagccttagtcacactaaattaaaaaaaaaaattccttagggatatcttagagtagtaaagtgacttcctcatataaatagtttgaaagggtacttaagtttttcacccaaattgtgatatacaaaaaggttattaccaagcaacctacatgtcaagaaagccccagttaggaaggagccacagcatttatcttgtttataatttctttggtactcccactgtttagagcacaggttgaacaccatgttcatctaagccttattagttaaaaaatgtgttatggcaaggcaaataaactagtttaaaaaacattaaatttcaccatttgtagaaattcaagttttataatagcttgctatagcagctatagataaattagtcaccttattacaaaactaaacctttgtaaacaagtttaaatttaattttcaagaaccaaattgcactagtcaagagtgtaggaattttgagaatctaacaactagattcaaagtactgtatcacttagtataccctttaaggtagcacttatccagtccaaaactccagtgacaaaattcctagtttatcaagataaacacagtaacactggattaaaggaaaaacattgctatggtatagactgtggttggcttctatccagtaaccttgggaatgaagacatctttgtaaacaagtcctgctgtttctttaacagctaacataggaaataattaaatgtattctttagtgccaattgtaagttttaaaatcagaatggcagtgtaacttgtgaattggctagggcaatcaatcacagcactactttctgtaaaactttagtagttcagtgataccagttctacccaatcttggtgaattccaacttgtttgcttagttatcttctttagtgttttcctggtggtttttcagtgctcttcggtggtgtcataatgcctccattgcacactggtgacaactgtcccccttttctgaaggtgtttatgtaatttacttcctcc

SEQ ID NO: 143167 - DNA, 487 bp, Homo sapiens
  Payload ID: 8285
  Gene Symbol: INTS8
  Gene Name: integrator complex subunit 8
  ENST ID: ENST00000520315
  CDS Start-End: 1-396
gaaatgaggcttcctgatattcctcttcgtcaagttatagctgaggaatgtgttgcctttatgttaaactggagagaaaatgaataccttacactccaagttcctgcatttttgcttcagagtaatccatatgtaaagcttggacagcttttagcagctacatgcaaagaacttccaggccctaaagaaagtagacggactgccaaagacctttgggaagttgttgttcaaatctgtagtgtgtccagtcagcacaaacgaggaaatgatggcagagttagtttaataaaacagagggaatctacgttaggtatcatgtatcggagtgaactgctttcttttatcaaaaaattacgaggacagggtcttgatctgtcacccaagctggagtgctgaggaaccactcgttttgactattattttatcactctttgtgaaacttcacaatgttcgggaggacattgtgaatgatattacagctgaacac

SEQ ID NO: 143168 - DNA, 2759 bp, Homo sapiens
  Payload ID: 8286
  Gene Symbol: INTS9
  Gene Name: integrator complex subunit 9
  Uniprot ID: Q9NV88
  ENST ID: ENST00000416984
  CDS Start-End: 361-2274
gaaaggggagtcggagccgtcgggactacacatcccagaacaccatgggccccaggcccgtaaggaagacatgatatcatgctggggtggagagggaggatgcattggcggctgggatgaatttgagctgacggaaggaggcgttcggagaggaaagggaggaaaaggaaaggcgaccacagttcccatgatgcctggaggggagactacatttcccattattcccctggaagggacgtgaggatgaaagactgcaagtcccgcgatgctctcggctggcaggtggcggagattgcaccggaagacgcttcctgggtttgaggagttcagtgactgctattgaaccaccaaaagtccattatgaaactgtattgcctgtcagggcacccaaccttaccatgcaatgtgctcaaattcaaatcaaccaccattatgttggactgcggactggacatgacttctaccctcaatttccttcctttgccacttgttcaaagtcccaggctgtccaatcttcctggctggtccctgaaggatggaaatgctttcttggacaagacggagctaatagatctgtctacagtagatgtgattctcatctctaactatcactgtatgatggcgctgccatacatcaccgagcacaccggcttcacaggcacagtgtatgccacggaacccaccgtccagatcggcaggcttctcatggaagagctggtgaatttcattgaaagagtgccaaaggctcagtctgcctccttgtggaagaataaggacattcagaggctgttaccttctcctctcaaggatgcagtggaagtctcaacctggagaagatgctatacaatgcaagaggtgaactctgcccttagtaaaatccagctggtgggatattctcagaaaattgagctttttggtgcggtccaggtgactcctctgagctctggctatgcccttgggagctccaactggatcatccagtctcattacgagaaagtgtcttatgtctctggatcctccttgcttaccacacacccccagcccatggaccaagcttctctcaaaaacagcgatgttcttgttctgacagggcttacccagatccccactgcaaacccagatggaatggtgggagagttctgcagcaacctagctctgacagtccggaatggaggaaacgtgttggttccctgctacccttctggagtgatctatgacctcctggagtgcctatatcagtacatcgactcagccgggctttccagcgtccccctctacttcatctcccctgtggccaacagttcactggagttttcccagatctttgctgagtggctttgtcacaacaaacagagtaaggtgtatcttccagaaccaccttttcctcatgcagagctcattcagaccaataagctgaagcactaccccagcatccacggagacttcagcaacgactttagacagccctgtgtggtgttcaccgggcacccttccctccgcttcggggacgtggtccacttcatggagctctggggaaaatctagtctcaataccgtcatattcacggaaccagacttctcctacctggaagccctggctccttaccagccgctggccatgaaatgcatctactgccccatcgacacccggctgaacttcatccaggtgtcaaagctgcttaaagaagtgcagcccctgcacgtggtgtgtcctgagcagtacactcagccgcccccagcccagtcccacaggatggacctcatgatcgactgccagccccccgccatgtcctatcggcgggctgaggttctcgccctgcccttcaaacgtcggtacgagaagatcgagatcatgccagagctcgcagattcactggtgcccatggagatcaagcctggcatctccttggcaactgtctcggccgtgctgcacaccaaagataacaagcacttgcttcagccccctcctcggcccgcccagcccacgagcgggaagaagagaaagcgggtgagcgatgacgtaccagactgcaaagtcctgaagcctttgttgagcggttccatccctgtggagcagttcgtgcagaccctggagaagcatggcttcagtgatattaaggtggaggacacagccaagggccatatcgtcctgctccaggaggctgagacgctcatccagattgaagaagactcgacccatatcatctgcgacaatgacgagatgctcagagtgcgactgcgggaccttgtcctcaaattcttacagaagttctgagtgggccatctgagctacttccctgaaatcctgcagtccctcactggctgccctcacaagccacctgaggagtggcatgagaggccattaactgtgtctttgtggtgtcctctggcttaaggagtgaagaggtggctcttgagggaaatggtctggacttattcccagcactgtttcaggcaagaactttccctttcaacttcaggctcattttcttctcaactctggctctctcaaggagctggagggtggcagaagtgggacaggagaagttttccaagaggttcatgggaggcggaggtgactggctggctgtcttgcatcagtcccaggcctcggccaggggagccagcctttggtttcgtttacttgcctacagtgctgtacgcaataagatgatgatcccaaaatatggtaaagtgaacccatctgtctgcattttctactctgagcccatttgttaataaacacttatttttatataa

SEQ ID NO: 143169 - DNA, 929 bp, Homo sapiens
  Payload ID: 8286
  Gene Symbol: INTS9
  Gene Name: integrator complex subunit 9
  ENST ID: ENST00000523436
  CDS Start-End: 28-929
ctgctattgaaccaccaaaagtccattatgaaactgtattgcctgtcagggcacccaaccttaccatgcaatgtgctcaaattcaaatcaaccaccattatgttggactgcggactggacatgacttctaccctcaatttccttcctttgccacttgttcaaagtcccaggctgtccaatcttcctggctggtccctgaaggatggaaatgctttcttggacaaggagctaaaggagtgctcgggtcatgtatttgtggattctgtgccggaattctgtttaccagagacggagctaatagatctgtctacagtagatgtgattctcatctctaactatcactgtatgatggcgctgccatacatcaccgagcacaccggcttcacaggcacagtgtatgccacggaacccaccgtccagatcggcaggcttctcatggaagagctggtgaatttcattgaaagagtgccaaaggctcagtctgcctccttgtggaagaataaggacattcagaggctgttaccttctcctctcaaggatgcagtggaagtctcaacctggagaagatgctatacaatgcaagaggtgaactctgcccttagtaaaatccagctggtgggatattctcagaaaattcccatggaccaagcttctctcaaaaacagcgatgttcttgttctgacagggcttacccagatccccactgcaaacccagatggaatggtgggagagttctgcagcaacctagctctgacagtccggaatggaggaaacgtgttggttccctgctacccttctggagtgatctatgacctcctggagtgcctatatcagtacatcgactcagccgggctttccagcgtccccctctacttcatctcccctgtggccaacagttcactggagttttcccagatctttgctgagtg

SEQ ID NO: 143170 - DNA, 2578 bp, Homo sapiens
  Payload ID: 8286
  Gene Symbol: INTS9
  Gene Name: integrator complex subunit 9
  ENST ID: ENST00000523303
  CDS Start-End: 32-1609
gtgactgctattgaaccaccaaaagtccattatgaaactgtattgcctgtcagggcacccaaccttaccatgcaatgtgctcaaattcaaatcaaccaccattatgttggactgcggactggacatgacttctaccctcaatttccttcctttgccacttgttcaaagtcccaggctgtccaatcttcctggctggtccctgaaggatggaaatgctttcttggacaaggagctaaaggagtgctcgggtcatgtatttgtggattctgtgccggaattctgtttaccagagacggagctaatagatctgtctacagtagatgtgattctcatctctaactatcactgtatgatggcgctgccatacatcaccgagcacaccggcttcacaggcacagtgtatgccacggaacccaccgtccagatcggcaggcttctcatggaagagctggtgaatttcattgaaagagtgccaaaggctcagtctgcctccttgtggaagaataaggacattcagaggctgttaccttctcctctcaaggatgcagtggaagtctcaacctggagaagatgctatacaatgcaagaggtgaactctgcccttagtaaaatccagctggtgggatattctcagaaaattgagctttttggtgcggtccaggtgactcctctgagctctggctatgcccttgggagctccaactggatcatccagtctcattacgagaaagtgtcttatgtctctggatcctccttgcttaccacacacccccagcccatggaccaagcttctctcaaaaacagcgatgttcttgttctgacagggcttacccagatccccactgcaaacccagatggaatggtgggagagttctgcagcaacctagctctgacagtccggaatggaggaaacgtgttggttccctgctacccttctggagtgatctatgacctcctggagtgcctatatcagtacatcgactcagccgggctttccagcgtccccctctacttcatctcccctgtggccaacagttcactggagttttcccagatctttgctgagtggctttgtcacaacaaacagagtaaggtgtatcttccagaaccaccttttcctcatgcagagctcattcagaccaataagctgaagcactaccccagcatccacggagacttcagcaacgactttagacagccctgtgtggtgttcaccgggcacccttccctccgcttcggggacgtggtccacttcatggagctctggggaaaatctagtctcaataccgtcatattcacggaaccagacttctcctacctggaagccctggctccttaccagccgctggccatgaaatgcatctactgccccatcgacacccggctgaacttcatccaggtgtcaaagctgcttaaagaagtgcagcccctgcacgtggtgtgtcctgagcagtacactcagccgcccccagcccagtcccacaggatggacctcatgatcgactgccagccccccgccatgtcctatcggcgggctgaggttctcgccctgcccttcaaacgtcggtacgagaagatcgagatcatgccagagactgcagtgatgtaaatacagattaaaggaagagtaatggtcatcattaaaggcccccagcctgaactgcgccctttgctttcagctcgcagattcactggtgcccatggagatcaagcctggcatctccttggcaactgtctcggccgtgctgcacaccaaagataacaagcacttgcttcagccccctcctcggcccgcccagcccacgagcgggaagaagagaaagcgggtgagcgatgacgtaccagactgcaaagtcctgaagcctttgttgagcggttccatccctgtggagcagttcgtgcagaccctggagaagcatggcttcagtgatattaaggtggaggacacagccaagggccatatcgtcctgctccaggaggctgagacgctcatccagattgaagaagactcgacccatatcatctgcgacaatgacgagatgctcagagtgcgactgcgggaccttgtcctcaaattcttacagaagttctgagtgggccatctgagctacttccctgaaatcctgcagtccctcactggctgccctcacaagccacctgaggagtggcatgagaggccattaactgtgtctttgtggtgtcctctggcttaaggagtgaagaggtggctcttgagggaaatggtctggacttattcccagcactgtttcaggcaagaactttccctttcaacttcaggctcattttcttctcaactctggctctctcaaggagctggagggtggcagaagtgggacaggagaagttttccaagaggttcatgggaggcggaggtgactggctggctgtcttgcatcagtcccaggcctcggccaggggagccagcctttggtttcgtttacttgcctacagtgctgtacgcaataagatgatgatcccaaaatatggtaaagtgaacccatctgtctgcattttctactctgagcccatttgttaataaacacttatttttatataa

SEQ ID NO: 143171 - DNA, 756 bp, Homo sapiens
  Payload ID: 8286
  Gene Symbol: INTS9
  Gene Name: integrator complex subunit 9
  ENST ID: ENST00000518510
  CDS Start-End: 46-558
gtttgaggagttcagtgactgctattgaaccaccaaaagtccattatgaaactgtattgcctgtcagggcacccaaccttaccatgcaatgtgctcaaattcaaatcaaccaccattatgttggactgcggactggacatgacttctaccctcaatttccttcctttgccacttgttcaaagtcccaggctgtccaatcttcctggctggtccctgaaggatggaaatgctttcttggacaaggagctaaaggagtgctcgggtcatgtatttgtggattctgtgccggaattctgtttaccagagacggagctaatagatctgtctacagtagatgtgattctcatctctaactatcactgtatgatggcgctgccatacatcaccgagcacaccggcttcacaggcacagtgtatgccacggaacccaccgtccagatcggcaggcttctcatggaagagctggtgaatttcattgaaagagtgccaaaggctcagtctgcctccttgtggaagaataaggacattcagaggagctttttggtgcggtccaggtgactcctctgagctctggctatgcccttgggagctccaactggatcatccagtctcattacgagaaagtgtcttatgtctctggatcctccttgcttaccacacacccccagcccatggaccaagcttctctcaaaaacagcgatgttcttgttctgacagggcttacccagatccccactgcaaacccagatggaatgg

SEQ ID NO: 143172 - DNA, 2544 bp, Homo sapiens
  Payload ID: 8286
  Gene Symbol: INTS9
  Gene Name: integrator complex subunit 9
  Uniprot ID: Q9NV88
  ENST ID: ENST00000521022
  CDS Start-End: 83-2059
gcaggtggcggagattgcaccggaagacgcttcctgggtttgaggagttcagtgactgctattgaaccaccaaaagtccattatgaaactgtattgcctgtcagggcacccaaccttaccatgcaatgtgctcaaattcaaatcaaccaccattatgttggactgcggactggacatgacttctaccctcaatttccttcctttgccacttgttcaaagtcccaggctgtccaatcttcctggctggtccctgaaggatggaaatgctttcttggacaaggagctaaaggagtgctcgggtcatgtatttgtggattctgtgccggaattctgtttaccagagacggagctaatagatctgtctacagtagatgtgattctcatctctaactatcactgtatgatggcgctgccatacatcaccgagcacaccggcttcacaggcacagtgtatgccacggaacccaccgtccagatcggcaggcttctcatggaagagctggtgaatttcattgaaagagtgccaaaggctcagtctgcctccttgtggaagaataaggacattcagaggctgttaccttctcctctcaaggatgcagtggaagtctcaacctggagaagatgctatacaatgcaagaggtgaactctgcccttagtaaaatccagctggtgggatattctcagaaaattgagctttttggtgcggtccaggtgactcctctgagctctggctatgcccttgggagctccaactggatcatccagtctcattacgagaaagtgtcttatgtctctggatcctccttgcttaccacacacccccagcccatggaccaagcttctctcaaaaacagcgatgttcttgttctgacagggcttacccagatccccactgcaaacccagatggaatggtgggagagttctgcagcaacctagctctgacagtccggaatggaggaaacgtgttggttccctgctacccttctggagtgatctatgacctcctggagtgcctatatcagtacatcgactcagccgggctttccagcgtccccctctacttcatctcccctgtggccaacagttcactggagttttcccagatctttgctgagtggctttgtcacaacaaacagagtaaggtgtatcttccagaaccaccttttcctcatgcagagctcattcagaccaataagctgaagcactaccccagcatccacggagacttcagcaacgactttagacagccctgtgtggtgttcaccgggcacccttccctccgcttcggggacgtggtccacttcatggagctctggggaaaatctagtctcaataccgtcatattcacggaaccagacttctcctacctggaagccctggctccttaccagccgctggccatgaaatgcatctactgccccatcgacacccggctgaacttcatccaggtgtcaaagctgcttaaagaagtgcagcccctgcacgtggtgtgtcctgagcagtacactcagccgcccccagcccagtcccacaggatggacctcatgatcgactgccagccccccgccatgtcctatcggcgggctgaggttctcgccctgcccttcaaacgtcggtacgagaagatcgagatcatgccagagctcgcagattcactggtgcccatggagatcaagcctggcatctccttggcaactgtctcggccgtgctgcacaccaaagataacaagcacttgcttcagccccctcctcggcccgcccagcccacgagcgggaagaagagaaagcgggtgagcgatgacgtaccagactgcaaagtcctgaagcctttgttgagcggttccatccctgtggagcagttcgtgcagaccctggagaagcatggcttcagtgatattaaggtggaggacacagccaagggccatatcgtcctgctccaggaggctgagacgctcatccagattgaagaagactcgacccatatcatctgcgacaatgacgagatgctcagagtgcgactgcgggaccttgtcctcaaattcttacagaagttctgagtgggccatctgagctacttccctgaaatcctgcagtccctcactggctgccctcacaagccacctgaggagtggcatgagaggccattaactgtgtctttgtggtgtcctctggcttaaggagtgaagaggtggctcttgagggaaatggtctggacttattcccagcactgtttcaggcaagaactttccctttcaacttcaggctcattttcttctcaactctggctctctcaaggagctggagggtggcagaagtgggacaggagaagttttccaagaggttcatgggaggcggaggtgactggctggctgtcttgcatcagtcccaggcctcggccaggggagccagcctttggtttcgtttacttgcctacagtgctgtacgcaataagatgatgatcccaaaatatggtaaagtgaacccatctgtctgcattttctactctgagcccatttgttaataaacacttatttttatataa

SEQ ID NO: 143173 - DNA, 559 bp, Homo sapiens
  Payload ID: 8286
  Gene Symbol: INTS9
  Gene Name: integrator complex subunit 9
  ENST ID: ENST00000520184
  CDS Start-End: 298-559
ttcctgggtttgaggagttcagtgactgctattgaaccaccaaaagtccattatgaaactgtctcataaccctcagtagatgatatgctgcttggtgacagaggaagaaaactggaattgcacaaagagcatcgctggaggccacagggtctgggccctttgcaagcgcctcctgtacaagtgtgtgaacctcaggcagccactctgtgctcccgtgcactcagttgacccacgtattgcctgtcagggcacccaaccttaccatgcaatgtgctcaaattcaaatcaaccaccattatgttggactgcggactggacatgacttctaccctcaatttccttcctttgccacttgttcaaagtcccaggctgtccaatcttcctggctggtccctgaaggatggaaatgctttcttggacaaggagctaaaggagtgctcgggtcatgtatttgtggattctgtgccggaattctgtttaccagagacggagctaatagatctgtctacagtagatgtgattctcatctctaactatcactgtatgatggcgctgccat

SEQ ID NO: 143174 - DNA, 668 bp, Homo sapiens
  Payload ID: 8286
  Gene Symbol: INTS9
  Gene Name: integrator complex subunit 9
  ENST ID: ENST00000524081
  CDS Start-End: 1-668
cccaaccttaccatgcaatgtgctcaaattcaaatcaaccaccattatgttggactgcggactggacatgacttctaccctcaatttccttcctttgccacttgttcaaagtcccaggctgtccaatcttcctggctggtccctgaaggatggaaatgctttcttggacaaggagctaaaggagtgctcgggtcatgtatttgtggattctgtgccggaattctgtttaccagagacggagctaatagatctgtctacagtagatgtgattctcatctctaactatcactgtatgatggcgctgccatacatcaccgagcacaccggcttcacaggcacagtgtatgccacggaacccaccgtccagatcggcaggctgttaccttctcctctcaaggatgcagtggaagtctcaacctggagaagatgctatacaatgcaagaggtgaactctgcccttagtaaaatccagctggtgggatattctcagaaaattgagctttttggtgcggtccaggtgactcctctgagctctggctatgcccttgggagctccaactggatcatccagtctcattacgagaaagtgtcttatgtctctggatcctccttgcttaccacacacccccagcccatggaccaagcttctctcaaaaacagcgatgttc

SEQ ID NO: 143175 - DNA, 686 bp, Homo sapiens
  Payload ID: 8286
  Gene Symbol: INTS9
  Gene Name: integrator complex subunit 9
  ENST ID: ENST00000517383
  CDS Start-End: 1-452
tgcccatggagatcaagcctggcatctccttggcaactgtctcggccgtgctgcacaccaaagataacaagcacttgcttcagccccctcctcggcccgcccagcccacgagcgggaagaagagaaagcgggtgagcgatgacgtaccagactgcaaagtcctgaagcctttgttgagcggttccatccctgtggagcagttcgtgcagaccctggagaagatctcacagatgtgcagtctgcccagcccacctctttcttttcttctggagcagcatggcttcagtgatattaaggtggaggacacagccaagggccatatcgtcctgctccaggaggctgagacgctcatccagattgaagaagactcgacccatatcatctgcgacaatgacgagatgctcagagtgcgactgcgggaccttgtcctcaaattcttacagaagttctgagtgggccatctgagctacttccctgaaatcctgcagtccctcactggctgccctcacaagccacctgaggagtggcatgagaggccattaactgtgtctttgtggtgtcctctggcttaaggagtgaagaggtggctcttgagggaaatggtctggacttattcccagcactgtttcaggcaagaactttccctttcaacttcaggctcattttcttctcaactctggctctct

SEQ ID NO: 143176 - DNA, 416 bp, Homo sapiens
  Payload ID: 8286
  Gene Symbol: INTS9
  Gene Name: integrator complex subunit 9
  ENST ID: ENST00000520437
  CDS Start-End: 1-78
attatgttggactgcggactggacatgacttctaccctcaatttccttcctttgccacttgttcaaagacggagctaatagatctgtctacagtagatgtgattctcatctctaactatcactgtatgatggcgctgccatacatcaccgagcacaccggcttcacaggcacagtgtatgccacggaacccaccgtccagatcggcaggcttctcatggaagagctggtgaatttcattgaaagagtgccaaaggctcagtctgcctccttgtggaagaataaggacattcagaggctgttaccttctcctctcaaggatgcagtggaagtctcaacctggagaagatgctatacaatgcaagaggtgaactctgcccttagtaaaatccagctggtgggatattctcagaaaatt

SEQ ID NO: 143177 - DNA, 2045 bp, Homo sapiens
  Payload ID: 8286
  Gene Symbol: INTS9
  Gene Name: integrator complex subunit 9
  ENST ID: ENST00000522363
  CDS Start-End: 61-177
gaagacgcttcctgggtttgaggagttcagtgactgctattgaaccaccaaaagtccattatgaaactgtcccaggctgtccaatcttcctggctggtccctgaaggatggaaatgctttcttggacaagacggagctaatagatctgtctacagtagatgtgattctcatctctaactatcactgtatgatggcgctgccatacatcaccgagcacaccggcttcacaggcacagtgtatgccacggaacccaccgtccagatcggcaggcttctcatggaagagctggtgaatttcattgaaagagtgccaaaggctcagtctgcctccttgtggaagaataaggacattcagaggctgttaccttctcctctcaaggatgcagtggaagtctcaacctggagaagatgctatacaatgcaagaggtgaactctgcccttagtaaaatccagctggtgggatattctcagaaaattgagctttttggtgcggtccaggtgactcctctgagctctggctatgcccttgggagctccaactggatcatccagtctcattacgagaaagtgtcttatgtctctggatcctccttgcttaccacacacccccagcccatggaccaagcttctctcaaaaacagcgatgttcttgttctgacagggcttacccagatccccactgcaaacccagatggaatggtgggagagttctgcagcaacctagctctgacagtccggaatggaggaaacgtgttggttccctgctacccttctggagtgatctatgacctcctggagtgcctatatcagtacatcgactcagccgggctttccagcgtccccctctacttcatctcccctgtggccaacagttcactggagttttcccagatctttgctgagtggctttgtcacaacaaacagagtaaggtgtatcttccagaaccaccttttcctcatgcagagctcattcagaccaataagctgaagcactaccccagcatccacggagacttcagcaacgactttagacagccctgtgtggtgttcaccgggcacccttccctccgcttcggggacgtggtccacttcatggagctctggggaaaatctagtctcaataccgtcatattcacggaaccagacttctcctacctggaagccctggctccttaccagccgctggccatgaaatgcatctactgccccatcgacacccggctgaacttcatccaggtgtcaaagctgcttaaagaagtgcagcccctgcacgtggtgtgtcctgagcagtacactcagccgcccccagcccagtcccacaggatggacctcatgatcgactgccagccccccgccatgtcctatcggcgggctgaggttctcgccctgcccttcaaacgtcggtacgagaagatcgagatcatgccagagctcgcagattcactggtgcccatggagatcaagcctggcatctccttggcaactgtctcggccgtgctgcacaccaaagataacaagcacttgcttcagccccctcctcggcccgcccagcccacgagcgggaagaagagaaagcgggtgagcgatgacgtaccagactgcaaagtcctgaagcctttgttgagcggttccatccctgtggagcagttcgtgcagaccctggagaagcatggcttcagtgatattaaggtggaggacacagccaagggccatatcgtcctgctccaggaggctgagacgctcatccagattgaagaagactcgacccatatcatctgcgacaatgacgagatgctcagagtgcgactgcgggaccttgtcctcaaattcttacagaagttctgagtgggccatctgagctacttccctgaaatcctgcagtccctcactggctgccctcacaagccacctgaggagtggcatgagaggccattaactgtgtctttgtggtgtcctctggcttaaggagtgaagaggtggctcttgagggaaatggtctggacttattcccagcactgtttcaggcaagaactttccctttcaa

SEQ ID NO: 143178 - DNA, 2430 bp, Homo sapiens
  Payload ID: 8286
  Gene Symbol: INTS9
  Gene Name: integrator complex subunit 9
  Uniprot ID: Q9NV88
  ENST ID: ENST00000521777
  CDS Start-End: 138-2042
cagtgactgctattgaaccaccaaaagtccattatgaaactggtgagtcttcgctcctaggtcagagggcaaagtattgcctgtcagggcacccaaccttaccatgcaatgtgctcaaattcaaatcaaccaccattatgttggactgcggactggacatgacttctaccctcaatttccttcctttgccacttgttcaaagtcccaggctgtccaatcttcctggctggtccctgaaggatggaaatgctttcttggacaaggagctaaaggagtgctcgggtcatgtatttgtggattctgtgccggaattctgtttaccagagacggagctaatagatctgtctacagtagatgtgattctcatctctaactatcactgtatgatggcgctgccatacatcaccgagcacaccggcttcacaggcacagtgtatgccacggaacccaccgtccagatcggcaggcttctcatggaagagctggtgaatttcattgaaagagtgccaaaggctcagtctgcctccttgtggaagaataaggacattcagaggctgttaccttctcctctcaaggatgcagtggaagtctcaacctggagaagatgctatacaatgcaagaggtgaactctgcccttagtaaaatccagctggtgggatattctcagaaaattgagctttttggtgcggtccaggtgactcctctgagctctggctatgcccttgggagctccaactggatcatccagtctcattacgagaaagtgtcttatgtctctggatcctccttgcttaccacacacccccagcccatggaccaagcttctctcaaaaacagcgatgttcttgttctgacagggcttacccagatccccactgcaaacccagatggaatggtgggagagttctgcagcaacctagctctgacagtccggaatggaggaaacgtgttggttccctgctacccttctggagtgatctatgacctcctggagtgcctatatcagtacatcgactcagccgggctttccagcgtccccctctacttcatctcccctgtggccaacagttcactggagttttcccagatctttgctgagtggctttgtcacaacaaacagagtaaggtgtatcttccagaaccaccttttcctcatgcagagctcattcagaccaataagctgaagcactaccccagcatccacggagacttcagcaacgactttagacagccctgtgtggtgttcaccgggcacccttccctccgcttcggggacgtggtccacttcatggagctctggggaaaatctagtctcaataccgtcatattcacggaaccagacttctcctacctggaagccctggctccttaccagccgctggccatgaaatgcatctactgccccatcgacacccggctgaacttcatccaggtgtcaaagctgcttaaagaagtgcagcccctgcacgtggtgtgtcctgagcagtacactcagccgcccccagcccagtcccacaggatggacctcatgatcgactgccagccccccgccatgtcctatcggcgggctgaggttctcgccctgcccttcaaacgtcggtacgagaagatcgagatcatgccagagctcgcagattcactggtgcccatggagatcaagcctggcatctccttggcaactgtctcggccgtgctgcacaccaaagataacaagcacttgcttcagccccctcctcggcccgcccagcccacgagcgggaagaagagaaagcgggtgagcgatgacgtaccagactgcaaagtcctgaagcctttgttgagcggttccatccctgtggagcagttcgtgcagaccctggagaagcatggcttcagtgatattaaggtggaggacacagccaagggccatatcgtcctgctccaggaggctgagacgctcatccagattgaagaagactcgacccatatcatctgcgacaatgacgagatgctcagagtgcgactgcgggaccttgtcctcaaattcttacagaagttctgagtgggccatctgagctacttccctgaaatcctgcagtccctcactggctgccctcacaagccacctgaggagtggcatgagaggccattaactgtgtctttgtggtgtcctctggcttaaggagtgaagaggtggctcttgagggaaatggtctggacttattcccagcactgtttcaggcaagaactttccctttcaacttcaggctcattttcttctcaactctggctctctcaaggagctggagggtggcagaagtgggacaggagaagttttccaagaggttcatgggaggcggaggtgactggctggctgtcttgcatcagtcccaggcctcggccaggggagccagcctttggtttcgtttacttgcctacagtgctgtacg

SEQ ID NO: 143179 - DNA, 3400 bp, Homo sapiens
  Payload ID: 8287
  Gene Symbol: ITFG1
  Gene Name: integrin alpha FG-GAP repeat containing 1
  Uniprot ID: Q8TB96
  ENST ID: ENST00000320640
  CDS Start-End: 230-2068
actgtcgggaggcgcgcctgccggaagtgagcgtgagggcggctttcaccctagctccactgcttttttagcgtcggaagggcagccctagtgggagagagaaaaaggagccggcagcggctcttacgcgtcccggggctgcgcgccactctctcggccggtaacgcggtgctttgcggctgtcgtcaagcgcggcgttgggccggcgggcgggggctgaggggctgccatggcggcggcgggccggctcccgagctcctgggccctcttctcgccgctcctcgcagggcttgcactactgggagtcgggccggtcccagcgcgggcgctgcacaacgtcacggccgagctctttggggccgaggcctggggcacccttgcggctttcggggacctcaactccgacaagcagacggatctcttcgtgctgcgggaaagaaatgacttaatcgtctttttggcagaccagaatgcaccctattttaaacccaaagtaaaggtatctttcaagaatcacagtgcattgataacaagtgtagtccctggggattatgatggagattctcaaatggatgtccttctgacatatcttcccaaaaattatgccaagagtgaattaggagctgttatcttctggggacaaaatcaaacattagatcctaacaatatgaccatactcaataggacttttcaagatgagccactaattatggatttcaatggtgatctaattcctgatatttttggtatcacaaatgaatccaaccagccacagatactattaggagggaatttatcatggcatccagcattgaccactacaagtaaaatgcgaattccacattctcatgcatttattgatctgactgaagattttacagcagatttattcctgacgacattgaatgccaccactagtaccttccagtttgaaatatgggaaaatttggatggaaacttctctgtcagtactatattggaaaaacctcaaaatatgatggtggttggacagtcagcatttgcagactttgatggagatggacacatggatcatttactgccaggctgtgaagataaaaattgccaaaagagtaccatctacttagtgagatctgggatgaagcagtgggttccagtcctacaagatttcagcaataagggcacactctggggctttgtgccatttgtggatgaacagcaaccaactgaaataccaattccaattacccttcatattggagactacaatatggatggctatccagacgctctggtcatactaaagaacacatctggaagcaaccagcaggcctttttactggagaacgtcccttgtaataatgcaagctgtgaagaggcgcgtcgaatgtttaaagtctactgggagctgacagacctaaatcaaattaaggatgccatggttgccaccttctttgacatttacgaagatggaatcttggacattgtagtgctaagtaaaggatatacaaagaatgattttgccattcatacactaaaaaataactttgaagcagatgcttattttgttaaagttattgttcttagtggtctgtgttctaatgactgtcctcgtaagataacaccctttggagtgaatcaacctggaccttatatcatgtatacaactgtagatgcaaatgggtatctgaaaaatggatcagctggccaactcagccaatccgcacatttagctctccaactaccatacaacgtgcttggtttaggtcggagcgcaaattttcttgaccatctctacgttggtattccccgtccatctggagaaaaatctatacgaaaacaagagtggactgcaatcattccaaattcccagctaattgtcattccataccctcacaatgtccctcgaagttggagtgccaaactgtatcttacaccaagtaatattgttctgcttactgctatagctctcatcggtgtctgtgttttcatcttggcaataattggcattttacattggcaggaaaagaaagcagatgatagagaaaaacgacaagaagcccaccggtttcattttgatgctatgtgacttgcctttaatattacataatggaatggctgttcacttgattagttgaaacacaaattctggcttgaaaaaataggggagattaaatattatttataaatgatgtatcccatggtaattattggaaagtattcaaataaatatggtttgaatatgtcacaaggtctttttttttaaagcactttgtatataaaaatttgggttctctattctgtagtgctgtacatttttgttcctttgtggaatgtgttgcatgtactccagtgtttgtgtatttataatcttatttgcatcatgatgatggaaaaagttgtgtaaataaaaataattaaatgagcaggaatttttgtgtccacttgacttggtcttgcttcttattctaatgatgcaaattatacttttgtgaatatatcacggagtcattaggcattcagcttcatcacagcaggtcaggggtctcactgatggcatacaatatagtgatcgggtactctgacttggtagcacagtaagacagacttgccttaaactcctaattcaaccacttacaaagtcattgtttgaacttggctcttgtttaacctctgtaaacctcagttttcttgtttattcagtggggctaatacttgagttactgtaaacattaaatgggatgatgtatgtgaagtgcttagcttggtgcctagcacagagtaagtggtcaatatgtggtagttgtcattattaatattttagatgatcttattagacttatacatctaattatagaaatacatagacttgatagaattttattttcaggcatgaagaaatattctttggaaaagctaaatttttggtgattgacataaagatttacttgctcatattaactaaaaattatagtactctccaagaattaatgtgccctaaaaattttcctccaaaaacttatccttatcatgtgataatgaagaacatttgatttcttgaaaggaaactgctgtaggcagcatctgggaatgcaaatcttcaatcacatttctattctcaaacacttggagaagtctataatttacattcagacttcaatgcaaattttgtattgtgaacttcacatttccaaaaagttactttaaaaagactttaagactgaaaaaaaaaagtttatcaatgctaataattttctagtatgcaaatggacatgtgatgcctataaaacacaaaaatttctctgaaaacaattttgttcttatttttttctttatagttcactgagattggcatgtgtttttactttgtatctaagcatgttaacatgtcttcttaataaatattccttattgaaacaaa

SEQ ID NO: 143180 - DNA, 1849 bp, Homo sapiens
  Payload ID: 8287
  Gene Symbol: ITFG1
  Gene Name: integrin alpha FG-GAP repeat containing 1
  ENST ID: ENST00000544001
  CDS Start-End: 292-1686
actgtcgggaggcgcgcctgccggaagtgagcgtgagggcggctttcaccctagctccactgcttttttagcgtcggaagggcagccctagtgggagagagaaaaaggagccggcagcggctcttacgcgtcccggggctgcgcgccactctctcggccggaaatgacttaatcgtctttttggcagaccagaatgcaccctattttaaacccaaagtaaaggtatctttcaagaatcacagtgcattgataacaagtgtagtccctggggattatgatggagattctcaaatggatgtccttctgacatatcttcccaaaaattatgccaagagtgaattaggagctgttatcttctggggacaaaatcaaacattagatcctaacaatatgaccatactcaataggacttttcaagatgagccactaattatggatttcaatggtgatctaattcctgatatttttggtatcacaaatgaatccaaccagccacagatactattaggagggaatttatcatggcatccagcattgaccactacaagtaaaatgcgaattccacattctcatgcatttattgatctgactgaagattttacagcagatttattcctgacgacattgaatgccaccactagtaccttccagtttgaaatatgggaaaatttggatggaaacttctctgtcagtactatattggaaaaacctcaaaatatgatggtggttggacagtcagcatttgcagactttgatggagatggacacatggatcatttactgccaggctgtgaagataaaaattgccaaaagagtaccatctacttagtgagatctgggatgaagcagtgggttccagtcctacaagatttcagcaataagggcacactctggggctttgtgccatttgtggatgaacagcaaccaactgaaataccaattccaattacccttcatattggagactacaatatggatggctatccagacgctctggtcatactaaagaacacatctggaagcaaccagcaggcctttttactggagaacgtcccttgtaataatgcaagctgtgaagaggcgcgtcgaatgtttaaagtctactgggagctgacagacctaaatcaaattaaggatgccatggttgccaccttctttgacatttacgaagatggaatcttggacattgtagtgctaagtaaaggatatacaaagaatgattttgccattcatacactaaaaaataactttgaagcagatgcttattttgttaaagttattgttcttagtggtctgtgttctaatgactgtcctcgtaagataacaccctttggagtgaatcaacctggaccttatatcatgtatacaactgtagatgcaaatgggtatctgaaaaatggatcagctggccaactcagccaatccgcacatttagctctccaactaccatacaacgtgcttggtttaggtcggagcgcaaattttcttgaccatctctacgttggtattccccgtccatctggagaaaaatctatacgaaaacaagagtggactgcaatcattccaaattcccagctaattgtcattccataccctcacaatgtccctcgaagctctcatcggtgtctgtgttttcatcttggcaataattggcattttacattggcaggaaaagaaagcagatgatagagaaaaacgacaagaagcccaccggtttcattttgatgctatgtgacttgcctttaatattacataatggaatggctgttcacttgattagttgaaacacaaattctggcttgaaaaaataggggagattaaatattatttataaatgatgtatcccatg

SEQ ID NO: 143181 - DNA, 550 bp, Homo sapiens
  Payload ID: 8287
  Gene Symbol: ITFG1
  Gene Name: integrin alpha FG-GAP repeat containing 1
  ENST ID: ENST00000563730
  CDS Start-End: 330-550
acaatgcaaagttaaacaaaacaccagccgggtactcaggcctgggcccaccaaagaagaaataaagacataatgatatcttatagtgaaatcaaccttcagaaacaaaggtatttaaaattaccaagtgacccttttggggtctacaacacttaccagaccttaagaaagcggaagacggagagacgactgcatcaggaaatgacttaatcgtctttttggcagaccagaatgcaccctattttaaacccaaagtaaaggtatctttcaagaatcacagtgcattgataacaagtgtagtccctggggattatgatggagattctcaaatggatgtccttctgacatatcttcccaaaaattatgccaagagtgaattaggagctgttatcttctggggacaaaatcaaacattagatcctaacaatatgaccatactcaataggacttttcaagatgagccactaattatggatttcaatggtgatctaattcctgatatttttggtatcacaaatgaatccaaccagccacagatactattaggagg

SEQ ID NO: 143182 - DNA, 584 bp, Homo sapiens
  Payload ID: 8287
  Gene Symbol: ITFG1
  Gene Name: integrin alpha FG-GAP repeat containing 1
  ENST ID: ENST00000565262
  CDS Start-End: 1-537
gtgctaagtaaaggatatacaaagaatgattttgccattcatacactaaaaaataactttgaagcagatgcttattttgttaaagttattgttcttagtggtctgtgttctaatgactgtcctcgtaagataacaccctttggagtgaatcaacctggaccttatatcatgtatacaactgtagatgcaaatgggtatctgaaaaatggatcaggtcggagcgcaaattttcttgaccatctctacgttggtattccccgtccatctggagaaaaatctatacgaaaacaagagtggactgcaatcattccaaattcccagctaattgtcattccataccctcacaatgtccctcgaagttggagtgccaaactgtatcttacaccaagtaatattgttctgcttactgctatagctctcatcggtgtctgtgttttcatcttggcaataattggcattttacattggcaggaaaagaaagcagatgatagagaaaaacgacaagaagcccaccggtttcattttgatgctatgtgacttgcctttaatattacataatggaatggctgttcacttgattagtt

SEQ ID NO: 143183 - DNA, 2663 bp, Homo sapiens
  Payload ID: 8287
  Gene Symbol: ITFG1
  Gene Name: integrin alpha FG-GAP repeat containing 1
  ENST ID: ENST00000565940
  CDS Start-End: 1-341
ttaaacccaaagtaaaggtatctttcaagaatcacagtgcattgataacaagtgtagtccctggggattatgatggagattctcaaatggatgtccttctgacatatcttcccaaaaattatgccaagagtgaattaggagctgttatcttctggggacaaaatcaaacattagatcctaacaatatgaccatactcaataggacttttcaagatgagccactaattatggatttcaatggtgatctaattcctgatatttttggtatcacaaatgaatccaaccagccacagatactattaggaggccataccaccctgaacgcgccccatctcttctgatctcggaagctaaccaaggtcagacctggttagtgcttggatgggagatcacctattactttttctgtaggtttttaataaagaatatgggtgctttgatgctagtaatagtgaactttgaaataattattgtgaatcctgaatgagaaacctgtttttttctccaaaatttgaaaaatatcttgaagagagtcttgctttagagacaaattggaaggagatcctgatttgcttttgtggccgtatccaagaggaattgagtgcaggtggggtgcagggaaaacacagtccactccccaccaccactccgctccttccacagcaaatggggactgctcagaaaaccctgtcctttcttttcctctcttcaaaggcaggcatgtgattgaggatgtgatggtgacttctggcctgttttattttgtggtaacttcactttagtcagggaaataattggaatatctttaatctgatgtagtttgacctttagaaattgaaagtgaaacagctattgttgataattcacaaagtattaataaaacttctattacctgtacagattttttacttaatctgcgagaaaactatttagaatattatggaattgtgccatagcttctttatttgttcttaattctatattagatttttttttctctgcttcatgaacaagttcagattttaaaacatcatgcctgaagacatgtccaactttattttttatatgttatattctggtccaatatactagagtaataatactctggtattttaggatatctgtcatttgaacctcagttacaaattaaacaatagtagctaaccatatctaagtgataagtttgcatctaagatttgtcctgatgccagtttgaagatatataagctgacagaaatttgcattgtttagaatgactgtagtctaacaatatcatggttcagacaacagaaagctgaatatgcccctgtggcagcaaatattaatatgttactaaaatatgaaaactacgtttaagcaatgtcagttttataaacaacagataagatatgtacataggtgagtaagtgaaaaagtcatcagcattgacattttgggttattcacgtgaccttgattggcagcctaatcttttatttatcaagaaatctaccttttacaacttaaatattatgctttatggatatgccaaacccaagattatctttaattgaatttgaccagcgctttggtttgggaagcatgcaatgatctttaaattcagtgtgaaatgcttctgtagaattatagcagaaagcccttgctataacctggcttagtgcagacatgcaaatctgagatagcacaaccagtttggctggactaaaggtgcagatgatcagtctaaacagcagtggtgataagcagaagaattccttataattggtacagtggggttatctaacagggacaggaagggcactcactgcatctaatgaggttcaggaggtaattgaagtgtgttaaatggtcaaaggtgagacttcagtttgagcttcaacttcacttataatgacttgaaataatgtaataatgtgccatattacttagaaataacacctagctgttaagtgtcacagcagcttctgcagtgatgtgacgttattgataatgagcattttctataagaggacattggaaactgatgttgcatactcattcagaatattgtttttaatgttgaagtgaaaacacttgtacctgtaattttagtcaaaaccaaatataatgttggtctgttaaaattttctgactcaaaaaaaaaaaaaaaaaaaaaaattttctgactcacgtactgagttcaaatacgttctgggtcaggcccaagttgtatacttggagatattaatgtaggtatgtgacagatatatactttgccgtacactgtttacatcacaagtgatcgcatgaaaatattgaatgtggtataagtagcactgaaagcaatcatttttaactgttgtgtgggtagattttgcccctccattatcaaaaaaactgtattctctatttaaatgtagtcagctactatcaatccagaagaaataaatctgcatttttccatttagcctttcatattttctcacattataaccaatgactgatttattaaatcacccttcagttttactgttgattttgtttgtttgctgatacattacagaaaatattataaatatttgttttaatgaagtgtgacattgtatcacttaaatctattgtttagtaagaatatgaaaattatgatgaggtttataacacaaaataaaaccaaataatactcaa

SEQ ID NO: 143184 - DNA, 2361 bp, Homo sapiens
  Payload ID: 8288
  Gene Symbol: ITFG2
  Gene Name: integrin alpha FG-GAP repeat containing 2
  Uniprot ID: Q969R8
  ENST ID: ENST00000228799
  CDS Start-End: 140-1483
gaggaagaggcagagattggaggttcaggcagtgacgtaacttgctgccttaggtggccttccgctctggcggctgtcgcgacgggggttcagggaatatttactgggcctctccgctccctctgctcttggaggtgccatgaggtcagttagctacgtgcagcgcgtggcgctggagttcagcgggagcctcttcccgcacgcaatctgcctcggagacgttgataacgatacgttaaatgaactggtggtgggagacaccagcgggaaggtgtctgtgtataaaaatgatgacagtcggccatggctcacctgttcctgccagggaatgctgacttgcgttggggttggagacgtgtgtaataaaggaaagaacctgttggtggcagtgagtgctgaaggctggtttcatttgtttgacctgacacctgccaaggtgttggatgcttctgggcaccacgagacactaatcggagaggagcagcgtccagtcttcaagcagcacatccctgccaacaccaaggtcatgctgatcagcgacatcgatggagatgggtgtcgtgagctggtggtgggctacacagaccgtgtggtgcgagctttccgctgggaggagctaggtgagggtcctgaacatctgacagggcagctggtgtccctcaagaaatggatgctggagggtcaggtggacagcctctcagtgactctggggccactgggtcttcctgaactgatggtgtctcagccaggttgtgcgtatgcaattctactgtgtacctggaaaaaggacactgggtcccctcctgcctctgaagggcccacggatggtagtagggagaccccagctgcccgagacgtggtgctgcaccagacatctggccgtatccacaacaagaatgtctccactcacctaattggcaacatcaaacaaggccacggcactgagagtagtggctctggcctctttgccctgtgcaccctggatgggacactgaagctcatggaagaaatggaagaagcagacaagctgctgtggtcagtgcaggtggatcaccagctctttgccctggagaaactggatgtcaccggcaacgggcatgaggaggtagttgcatgcgcctgggatggacagacatatatcattgatcacaaccgcaccgtcgtccgcttccaagtggatgaaaatatccgtgccttctgtgcaggcctgtacgcctgcaaagagggccgcaacagcccctgcctcgtatatgtcactttcaaccagaagatctatgtgtactgggaggtgcagctggagcggatggagtctaccaatctggtgaaactgctggagaccaagccggagtaccacagcctgctgcaggagctgggcgtggatcctgacgacctccctgtgactcgtgccctgcttcaccaaacgctctaccatccagaccagccaccacagtgtgctccctcaagcctccaggatcccacctagctgtacttgcctcatagctggtgaaggattcttctgaacccccaccctaccccctaaaggtatctgtggtattggcaggatagggaatatgcattacagaaatgcaggatttgactctgggcatgaaagatggcagcagccctagggtgaccgtgaactatagacctcgcagtcttttcggtgaaagaagagacaagttgaccctctgcccatttccttatggacctcacccatcatgccagcagggtcataggaccctggccttgttccaaatcatctgggacatgacccactccccactgtcactgtgttgaaaacagagacttgtttgtgtggccccaacacccataaggaaaccaggctttaggcccaggggagcagtggaggtaagggctccaccccatcttaagctctgtcttccgtggcacaattccaagttcttgacgttagtaattgttaaaggaatggcaaactgttttgttttgaaggatctttctacagtctggtcttacccatgttcctagcaaccctgagatgattttcttccatttaccaaagcagccgggtcagtgctttctcacgttgccgtattcttcaggtattagtcagcttcagaagccctgctcccatttttccacccacccattcccccataaaacagcttattgtctccaagacaatagacatttaaaatgtgatgcgggtttatgatccagaccacaatcagaattatatcttgggtcatttatgtgccgtctgttcttgattctctatgctctaaatcggtgtttttcaaactgtggttgcagtcctttggtggattatggccagcattttttaaataggtagaatagaataaagtaaaatagaaaatagca

SEQ ID NO: 143185 - DNA, 715 bp, Homo sapiens
  Payload ID: 8288
  Gene Symbol: ITFG2
  Gene Name: integrin alpha FG-GAP repeat containing 2
  ENST ID: ENST00000534935
  CDS Start-End: 1-396
ggcaacgggcatgaggaggtagttgcatgcgcctgggatggacagacatatatcattgatcacaaccgcaccgtcgtccgcttccaagtggatgaaaatatccgtgccttctgtgcaggcctgtacgcctgcaaagagggccgcaacagcccctgcctcgtatatgtcactttcaaccagaagatctatgtgtactgggaggtgcagctggagcggatggagtctaccaatctggtgaaactgctggagaccaagccggagtaccacagcctgctgcaggagctgggcgtggatcctgacgacctccctgtgactcgtgccctgcttcaccaaacgctctaccatccagaccagccaccacagtgtgctccctcaagcctccaggatcccacctagctgtacttgcctcatagctggtgaaggattcttctgaacccccaccctaccccctaaaggatctttctacagtctggtcttacccatgttcctagcaaccctgagatgattttcttccatttaccaaagcagccgggtcagtgctttctcacgttgccgtattcttcaggtattagtcagcttcagaagccctgctcccatttttccacccacccattcccccataaaacagcttattgtctccaagacaatagacatttaaaatgtgatgcgggtttatgatccagaccacaatcagaattatatcttgggtcattta

SEQ ID NO: 143186 - DNA, 449 bp, Homo sapiens
  Payload ID: 8288
  Gene Symbol: ITFG2
  Gene Name: integrin alpha FG-GAP repeat containing 2
  ENST ID: ENST00000535564
  CDS Start-End: 1-53
aactggtggtgggagacaccagcgggaaggtatctgtggtattggcaggatagggaatatgcattacagaaatgcaggatttgactctgggcatgaaagatggcagcagccctagggtgaccgtgaactatagacctcgcagtcttttcggtgaaagaagagacaagttgaccctctgcccatttccttatggacctcacccatcatgccagcagggtcataggaccctggccttgttccaaatcatctgggacatgacccactccccactgtcactgtgttgaaaacagagacttgtttgtgtggccccaacacccataaggaaaccaggctttaggcccaggggagcagtggaggtaagggctccaccccatcttaagctctgtcttccgtggcacaattccaagttcttgacgttagtaattgttaaaggaatggcaaactgtttt

SEQ ID NO: 143187 - DNA, 292 bp, Homo sapiens
  Payload ID: 8288
  Gene Symbol: ITFG2
  Gene Name: integrin alpha FG-GAP repeat containing 2
  ENST ID: ENST00000538822
  CDS Start-End: 1-172
taccaatctggtgaaactgctggagaccaagccggagtaccacagcctgctgcaggagctgggcgtggatcctgacgacctccctgtgactcgtgccctgcttcaccaaacgctctaccatccagaccagccaccacagtgtgctccctcaagcctccaggatcccacctagctgtacttgcctcatagctggtgaaggattcttctgaacccccaccctaccccctaaaggcgtctttggatcacactgcgcggctgctggctccatcacaaaacaatgaaggtaggcagt

SEQ ID NO: 143188 - DNA, 1935 bp, Homo sapiens
  Payload ID: 8288
  Gene Symbol: ITFG2
  Gene Name: integrin alpha FG-GAP repeat containing 2
  Uniprot ID: Q969R8
  ENST ID: ENST00000540929
  CDS Start-End: 69-512
ggctgtcgcgacgggggttcagggaatatttactgggcctctccgctccctctgctcttggaggtgccatgaggtcagttagctacgtgcagcgcgtggcgctggagttcagcgggagcctcttcccgcacgcaatctgcctcggagacgttgataacgatacgttaaatgaactggtggtgggagacaccagcgggaaggtgtctgtgtataaaaatgatgacagtcggccatggctcacctgttcctgccagggaatgctgacttgcgttggggttggagacgtgtgtaataaaggaaagaacctgttggtggcagtgagtgctgaaggctggtttcatttgtttgacctgacacctgccaaggtgttggatgcttctgggcaccacgagacactaatcggagaggagcagcgtccagtcttcaagcagcacatccctgccaacaccaaggtcatgctgatcagcgacatcggtgggcatgcctacctttgcaggcagccaggagagtaggagtcagtggatactagagcatatcccaagggattgggatggagatgggtgtcgtgagctggtggtgggctacacagaccgtgtggtgcgagctttccgctgggaggagctaggtgagggtcctgaacatctgacagggcagctggtgtccctcaagaaatggatgctggagggtcaggtggacagcctctcagtgactctggggccactgggtcttcctgaactgatggtgtctcagccaggttgtgcgtatgcaattctactgtgtacctggaaaaaggacactgggtcccctcctgcctctgaagggcccacggatggtagtagggagaccccagctgcccgagacgtggtgctgcaccagacatctggccgtatccacaacaagaatgtctccactcacctaattggcaacatcaaacaaggccacggcactgagagtagtggctctggcctctttgccctgtgcaccctggatgggacactgaagctcatggaagaaatggaagaagcagacaagctgctgtggtcagtgcaggtggatcaccagctctttgccctggagaaactggatgtcaccggcaacgggcatgaggaggtagttgcatgcgcctgggatggacagacatatatcattgatcacaaccgcaccgtcgtccgcttccaagtggatgaaaatatccgtgccttctgtgcaggcctgtacgcctgcaaagagggccgcaacagcccctgcctcgtatatgtcactttcaaccagaagatctatgtgtactgggaggtgcagctggagcggatggagtctaccaatctggtgaaactgctggagaccaagccggagtaccacagcctgctgcaggagctgggcgtggatcctgacgacctccctgtgactcgtgccctgcttcaccaaacgctctaccatccagaccagccaccacagtgtgctccctcaagcctccaggatcccacctagctgtacttgcctcatagctggtgaaggattcttctgaacccccaccctaccccctaaagaatgcggacccagaatgattggagagcaagaagagcaatccacatagaagaagcacagagcaaagacggtggccgaggaccagtgggaatttattgcgaatgttcaatagtgactgagtggttaagtggttccagagattacagggccaatgccttagaacacatgagttttttccagaattacgttatccatgcacacacaccatttgtctgtgtagagcacactgaggagtacttacttaatttaagtattgtattttgaccaaggaaggggggcagagtaatggtggtgacagatggagttgcaccgaggagacatggcttggggcagggaggaaggaggtagaggatcctggttaggtccaggctagggagagaggtgcccttt

SEQ ID NO: 143189 - DNA, 559 bp, Homo sapiens
  Payload ID: 8288
  Gene Symbol: ITFG2
  Gene Name: integrin alpha FG-GAP repeat containing 2
  ENST ID: ENST00000540662
  CDS Start-End: 1-179
tgtactgggaggtgcagctggagcggatggagtctaccaatctggtgaaactgctggagaccaagccggagtaccacagcctgctgcaggagctgggcgtgggtgagtcccagaaaagccagtggcccgagtgcccaggagacccacagcatgctgcaggagctgggcgtggatcctgacgacctccctgtgactcgtgccctgcttcaccaaacgctctaccatccagaccagccaccacagtgtgctccctcaagcctccaggatcccacctagctgtacttgcctcatagctggtgaaggattcttctgaacccccaccctaccccctaaaggtatctgtggtattggcaggatagggaatatgcattacagaaatgcaggatttgactctgggcatgaaagatggcagcagccctagggtgaccgtgaactatagacctcgcagtcttttcggtgaaagaagagacaagttgaccctctgcccatttccttatggacctcacccatcatgccagcagggtcataggaccctggccttgttccaaatcatctggga

SEQ ID NO: 143190 - DNA, 1419 bp, Homo sapiens
  Payload ID: 8288
  Gene Symbol: ITFG2
  Gene Name: integrin alpha FG-GAP repeat containing 2
  ENST ID: ENST00000537851
  CDS Start-End: 77-247
gctctggcggctgtcgcgacgggggttcagggaatatttactgggcctctccgctccctctgctcttggaggtgccatgaggtcagttagctacgtgcagcgcgtggcgctggagttcagcgggagcctcttcccgcacgcaatctgcctcggagacgttgataacgatacgatggagatgggtgtcgtgagctggtggtgggctacacagaccgtgtggtgcgagctttccgctgggaggagctaggtgagggtcctgaacatctgacagggcagctggtgtccctcaagaaatggatgctggagggtcaggtggacagcctctcagtgactctggggccactgggtcttcctgaactgatggtgtctcagccaggttgtgcgtatgcaattctactgtgtacctggaaaaaggacactgggtcccctcctgcctctgaagggcccacggatggtagtagggagaccccagctgcccgagacgtggtgctgcaccagacatctggccgtatccacaacaagaatgtctccactcacctaattggcaacatcaaacaaggccacggcactgagagtagtggctctggcctctttgccctgtgcaccctggatgggacactgaagctcatggaagaaatggaagaagcagacaagctgctgtggtcagtgcaggtggatcaccagctctttgccctggagaaactggatgtcaccggcaacgggcatgaggaggtagttgcatgcgcctgggatggacagacatatatcattgatcacaaccgcaccgtcgtccgcttccaagtggatgaaaatatccgtgccttctgtgcaggcctgtacgcctgcaaagagggccgcaacagcccctgcctcgtatatgtcactttcaaccagaagatctatgtgtactgggaggtgcagctggagcggatggagtctaccaatctggtgaaactgctggagaccaagccggagtaccacagcctgctgcaggagctgggcgtggatcctgacgacctccctgtgactcgtgccctgcttcaccaaacgctctaccatccagaccagccaccacagtgtgctccctcaagcctccaggatcccacctagctgtacttgcctcatagctggtgaaggattcttctgaacccccaccctaccccctaaaggtatctgtggtattggcaggatagggaatatgcattacagaaatgcaggatttgactctgggcatgaaagatggcagcagccctagggtgaccgtgaactatagacctcgcagtcttttcggtgaaagaagagacaagttgaccctctgcccatttccttatggacctcacccatcatgccagcagggtcataggaccctggccttgttccaaatcatctgggacatgacccactccccactgtcactgt

SEQ ID NO: 143191 - DNA, 1296 bp, Homo sapiens
  Payload ID: 8289
  Gene Symbol: ITGB1BP2
  Gene Name: integrin beta 1 binding protein (melusin) 2
  Uniprot ID: Q9UKP3
  ENST ID: ENST00000373829
  CDS Start-End: 74-1117
ctaagaggtgttccccattcggcagccagactccttgaaataccctttcagtaatcattcaaccaacgcttccatgtctctactctgtcgtaacaaaggctgtgggcagcactttgaccctaataccaaccttcctgattcctgttgccatcaccctggggtcccaatcttccatgatgcacttaagggttggtcctgctgccgaaagcgaactgtagatttctctgagttcttaaacatcaagggctgtactatgggaccacactgtgctgagaagcttcctgaggcccctcaacctgaaggccctgctacaagcagttcacttcaggagcaaaaacctctgaatgtgattccaaagtcagcagagaccttgcgccgggagaggcccaagtcagagttgcctctgaagctgctgccgctaaatatatcccaagccctggaaatggcattggaacagaaggaattagaccaggaacctggggcaggacttgacagtctgatccggactggttccagctgccagaacccaggatgtgatgctgtttaccaaggccctgagagtgatgctactccatgtacctaccacccaggagcaccccgattccatgaggggatgaagtcttggagctgttgtggcatccagaccctggattttggggcattcttggcacaaccagggtgcagagtcggtagacatgactgggggaagcagctcccagcatcttgccgccatgattggcaccagacagattccttagtagtggtgactgtatatggccagattccacttcctgcgtttaactgggtgaaggccagtcaaactgagcttcatgtccacattgtctttgatggtaaccgtgtgttccaagcacagatgaagctctggggggtcataaacgtggagcagagctctgtcttcttgatgccatctcgggttgaaatctccctggtcaaggctgacccaggatcctgggcccagctggagcaccctgatgcactagctaagaaggctagggcaggggttgtgttagagatggatgaggaagaatctgacgattcagatgatgatctgagctggacagaggaggaggaagaggaggaagcaatgggggaatagtgacaccagacagttgatgtctagataggacctcaatgattcccttagaatcttagataccaggatattgttggccatgtggcatcattgagcagcaggaggctgaaggaggggagaacaaaattgtccaaaccatgctgtttttttcccttaaataaatcttgtattcttcagtttca

SEQ ID NO: 143192 - DNA, 1439 bp, Homo sapiens
  Payload ID: 8289
  Gene Symbol: ITGB1BP2
  Gene Name: integrin beta 1 binding protein (melusin) 2
  Uniprot ID: Q9UKP3
  ENST ID: ENST00000538820
  CDS Start-End: 341-1330
atcattcaaccaacgcttccatgtctctactctgtcgtaacaaaggctgtgggcagcactttgaccctaataccaaccttcctggtgagtaaagaatcctgacctggccaggggctctgtgtgggtgttggggactggtcagctggggggcagtgtgtttgaggagcggggaaagaaactacctgccctagtttaattggtctgagtgatcttacagcctttgctggcttttttttttttcttcacattatatgggaagaaaccataaatagaaacccggggaagaggtgaaaaatgatacttggtatagttatcttcccttccttgataacttctactgatgtccacagattcctgttgccatcaccctggggtcccaatcttccatgatgcacttaagggttggtcctgctgccgaaagcgaactgtagatttctctgagttcttaaacatcaagggctgtactatgggaccacactgtgctgagaagcttcctgaggcccctcaacctgaaggccctgctacaagcagttcacttcaggagcaaaaacctctgaatgtgattccaaagtcagcagagaccttgcgccgggagaggcccaagtcagagttgcctctgaagctgctgccgctaaatatatcccaagccctggaaatggcattggaacagaaggaattagaccaggaacctggggcaggacttgacagtctgatccggactggttccagctgccagaacccaggatgtgatgctgtttaccaaggccctgagagtgatgctactccatgtacctaccacccaggagcaccccgattccatgaggggatgaagtcttggagctgttgtggcatccagaccctggattttggggcattcttggcacaaccagggtgcagagtcggtagacatgactgggggaagcagctcccagcatcttgccgccatgattggcaccagacagattccttagtagtggtgactgtatatggccagattccacttcctgcgtttaactgggtgaaggccagtcaaactgagcttcatgtccacattgtctttgatggtaaccgtgtgttccaagcacagatgaagctctggggggtcataaacgtggagcagagctctgtcttcttgatgccatctcgggttgaaatctccctggtcaaggctgacccaggatcctgggcccagctggagcaccctgatgcactagctaagaaggctagggcaggggttgtgttagagatggatgaggaagaatctgacgattcagatgatgatctgagctggacagaggaggaggaagaggaggaagcaatgggggaatagtgacaccagacagttgatgtctagataggacctcaatgattcccttagaatcttagataccaggatattgttggccatgtggcatcattgagcagcaggaggctgaagg

SEQ ID NO: 143193 - DNA, 1772 bp, Homo sapiens
  Payload ID: 8290
  Gene Symbol: ITGB1BP1
  Gene Name: integrin beta 1 binding protein 1
  Uniprot ID: O14713
  ENST ID: ENST00000238091
  CDS Start-End: 170-622
gcggacgtgggcaggagggctggaaaagccggcgctggagcgggaacgggagtagctgcctgggcgccaaaggccgcggcactcccacgcggaccccgaagtccgcaacccggggatgggcccgcggctgcgaggggatcttctctggatcaagcaatggtggtgaaaaatgtttcgcaagggcaaaaaacgacacagtagtagcagttcccaaagtagcgaaatcagtactaagagcaagtctgtggattctagccttgggggtctttcacgatccagcactgtggccagcctcgacacagattccaccaaaagctcaggacaaagcaacaataattcagatacctgtgcagaatttcgaataaaatatgttggtgccattgagaaactgaaactctccgagggaaaaggccttgaagggccattagacctgataaattatatagacgttgcccagcaagatggaaagttgccttttgttcctccggaggaagaatttattatgggagtttccaagtatggcataaaagtatcaacatcagatcaatatgaacaagcacaagccatttgcaaggttttatccaccgcttttgactctgtattaacatctgagaaaccctgaatcctgcaatcaagtagaagtcaacttcatctgaaagttcagctgttttcaaactgcaatgctgaaatgttatgcaaataatgaagttatcccttgctctagattttctgaagaaaatggattgtgtaaaatgctgatcatttgtttattaaaatgtgtcctattacacagtgagttaactctcaatgaagtcatctattttctgggctaaaaaacttcatttgtctttttcaacttctaataagcttaacctaagtgtcacagaagcctaggtgtcacagaggtccactcagtgacaaacacacactgaaggcctgaggaagacgagatgtcacagaggtccactcagtgacaaacacacactgaaggcctgaggaagactagatgtcacagaggtccactcagtgacaaacacacactgaaggcctgaggaagacgagatgtcacagaggtccactcagtgacaaacacacactgaaggcctgaggaagactagatgtcacagaggtccactcagtgacaaacacacactgaaggcctgaggaagacgagatgtcacagaggtccactcagtgacaaacacacactgaaggcctgaggaagacgagatgtcacagaggtccactcagtgacaaacacacactgaaggcctgaggaagactagatgtcacagaggtccactcagtgacaaacacacactgaaggcctgaggaagacgagatgtcacagaggtccactcagtgacaaacacacactgaaggcctgaggaagacgagatgtcacagaggtccactcagtgacacacactgaaggcctgaggaagactgaggacatgggctcagtggtggcttcccagtcatggtatcactggcatggacctctgtccggcagaggtgtggactggagaccaggattcatgctggtctggaacagtgacattgccaacttaagacacacaaagcagattttcagaagtgtctggtcaagataacatgctggccaaccacaattcctagagttaagagaaccttaaaagattaccgctcatgctaaaagtatgtaaagatcccatgtacagtatgatagtgtactttttttaaaggactgtcaatatacaaaactttaaagattaaaaacattaaaaataaaa

SEQ ID NO: 143194 - DNA, 1963 bp, Homo sapiens
  Payload ID: 8290
  Gene Symbol: ITGB1BP1
  Gene Name: integrin beta 1 binding protein 1
  Uniprot ID: O14713
  ENST ID: ENST00000355346
  CDS Start-End: 211-813
gtcaggactgcgcctgcgcatagtcttggaggcgcggcccggcggacgtgggcaggagggctggaaaagccggcgctggagcgggaacgggagtagctgcctgggcgccaaaggccgcggcactcccacgcggaccccgaagtccgcaacccggggatgggcccgcggctgcgaggggatcttctctggatcaagcaatggtggtgaaaaatgtttcgcaagggcaaaaaacgacacagtagtagcagttcccaaagtagcgaaatcagtactaagagcaagtctgtggattctagccttgggggtctttcacgatccagcactgtggccagcctcgacacagattccaccaaaagctcaggacaaagcaacaataattcagatacctgtgcagaatttcgaataaaatatgttggtgccattgagaaactgaaactctccgagggaaaaggccttgaagggccattagacctgataaattatatagacgttgcccagcaagatggaaagttgccttttgttcctccggaggaagaatttattatgggagtttccaagtatggcataaaagtatcaacatcagatcaatatgatgttttgcacaggcatgctctctacttaataatccggatggtgtgttacgatgacggtctgggggcgggaaaaagcttactggctctgaagaccacagatgcaagcaatgaggaatacagcctgtgggtttatcagtgcaacagcctggaacaagcacaagccatttgcaaggttttatccaccgcttttgactctgtattaacatctgagaaaccctgaatcctgcaatcaagtagaagtcaacttcatctgaaagttcagctgttttcaaactgcaatgctgaaatgttatgcaaataatgaagttatcccttgctctagattttctgaagaaaatggattgtgtaaaatgctgatcatttgtttattaaaatgtgtcctattacacagtgagttaactctcaatgaagtcatctattttctgggctaaaaaacttcatttgtctttttcaacttctaataagcttaacctaagtgtcacagaagcctaggtgtcacagaggtccactcagtgacaaacacacactgaaggcctgaggaagacgagatgtcacagaggtccactcagtgacaaacacacactgaaggcctgaggaagactagatgtcacagaggtccactcagtgacaaacacacactgaaggcctgaggaagacgagatgtcacagaggtccactcagtgacaaacacacactgaaggcctgaggaagactagatgtcacagaggtccactcagtgacaaacacacactgaaggcctgaggaagacgagatgtcacagaggtccactcagtgacaaacacacactgaaggcctgaggaagacgagatgtcacagaggtccactcagtgacaaacacacactgaaggcctgaggaagactagatgtcacagaggtccactcagtgacaaacacacactgaaggcctgaggaagacgagatgtcacagaggtccactcagtgacaaacacacactgaaggcctgaggaagacgagatgtcacagaggtccactcagtgacacacactgaaggcctgaggaagactgaggacatgggctcagtggtggcttcccagtcatggtatcactggcatggacctctgtccggcagaggtgtggactggagaccaggattcatgctggtctggaacagtgacattgccaacttaagacacacaaagcagattttcagaagtgtctggtcaagataacatgctggccaaccacaattcctagagttaagagaaccttaaaagattaccgctcatgctaaaagtatgtaaagatcccatgtacagtatgatagtgtactttttttaaaggactgtcaatatacaaaactttaaagattaaaaacattaaaaataaaa

SEQ ID NO: 143195 - DNA, 2126 bp, Homo sapiens
  Payload ID: 8290
  Gene Symbol: ITGB1BP1
  Gene Name: integrin beta 1 binding protein 1
  ENST ID: ENST00000359712
  CDS Start-End: 808-1362
gatgcctgggctcgggcttggttccgggcggggccgcgctcccggggcgcgggtggaggagcttggaaccacgcagatcgggcgtgggcttgcggactgcagcttcccgagccgctgtcgccccggaggggcggcaaggcgggcggccgcgggccgtttccttgcctcttcctctgccccgcttcggccgcctcccgcctctcagggtcggggttgtctgtccccttcgctgtcacatcctccgcacccagcgcttggaaggtgctccatcacggtgacagacaggtgccaagcaggctggcgtctgggaggaacttcggagccggctctccctaggccccgagcttggccgcatccgtccttactctggtgaccctgggcaggtcactgactcttcgggcgctttggcatcctcgtttgaaaggggctgttatcctgcagccttgctggtcggtgagggtgagggtgagagggatctgtgcacctagcaccgtgcatggcacgtggtaggcgtttggtacatgggaatcgctgttggggtgtcacctccccagaaagttctcggcttcagtaagcgcgtcccctgccaggcgccctggcaatgcagaggagtcaccgagctccgcctttgaccagcgtgcagctgggagagtgagatcagagaccacagcagatcgtggcgctgtgatcagggggtacactcaagctgtgggtcccttaccccagccttgagatcccaggaaggcctgcagcctgaaacgggccttgaaaggggatcttctctggatcaagcaatggtggtgaaaaatgtttcgcaagggcaaaaaacgacacagtagtagcagttcccaaagtagcgaaatcagtactaagagcaagtctgtggattctagccttgggggtctttcacgatccagcactgtggccagcctcgacacagattccaccaaaagctcaggacaaagcaacaataattcagatacctgtgcagaatttcgaataaaatatgttggtgccattgagaaactgaaactctccgagggaaaaggccttgaagggccattagacctgataaattatatagacgttgcccagcaagatggaaagttgccttttgttcctccggaggaagaatttattatgggagtttccaagtatggcataaaagtatcaacatcagatcaatatgatgttttgcacaggcatgctctctacttaataatccggatggtgtgttacgatgacggtctgggggcgggaaaaagcttactggctctgaagaccacagatgcaagcaatgaggaatacagcctgtgggtttatcagtgcaacagcctggtgagacttcgttactttggttagctgcttgcccatcaagtcgcaacacccagggactactgtttttgaaggctgaagaaatacaatccattatatatggaatatcttggcctggggatagtgaatgaatattaggccggaggtcagccggctggcaagacagtgcaggtttgtgaaatatttgttagggccagtggcagcactcgcttgtgccgggatttaaaaggtaaacaaagcagctgaggaaaaatgtatcctccaggggccgaaggcttcttccatttccgaacgttgttgccctcctagactgcgtgatcagcctttgcaggctgcagtcgctgtttgctttcctctgaaggagggcagaaagggcccacgtgcagggaagctcatagtatgggttccactgacccaggcaggcatgtgtggtcggcttgcttaggagaggtcttaagagggtcaggtgtgtgcctctgctagccaaattaagttcacgaagagacagatgaatgttgctcttactctatctttcatgtaatgtaggaacaagcacaagccatttgcaaggttttatccaccgcttttgactctgtattaacatctgagaaaccctgaatcctgcaatcaagtagaagtcaacttcatctgaaagttcagctgttttcaaactgcaatgctgaaatgttatgcaaataatgaagttatcccttgctctagattttctgaagaaaatggattgtgtaaaatgctgatcatttgtttattaaaatgtgtcctattacacagtg

SEQ ID NO: 143196 - DNA, 4859 bp, Homo sapiens
  Payload ID: 8290
  Gene Symbol: ITGB1BP1
  Gene Name: integrin beta 1 binding protein 1
  Uniprot ID: O14713
  ENST ID: ENST00000360635
  CDS Start-End: 898-1500
ttccgggcggggccgcgctcccggggcgcgggtggaggagcttggaaccacgcagatcgggcgtgggcttgcggactgcagcttcccgagccgctgtcgccccggaggggcggcaaggcgggcggccgcgggccgtttccttgcctcttcctctgccccgcttcggccgcctcccgcctctcagggtcggggttgtctgtccccttcgctgtcacatcctccgcacccagcgcttggaaggtgctccatcacggtgacagacaggtgccaagcaggctggcgtctgggaggaacttcggagccggctctccctaggccccgagcttggccgcatccgtccttactctggtgaccctgggcaggtcactgactcttcgggcgctttggcatcctcgtttgaaaggggctgttatcctgcagccttgctggtcggtgagggtgagggtgagagggatctgtgcacctagcaccgtgcatggcacgtggtaggcgtttggtacatgggaatcgctgttggggtgtcacctccccagaaagttctcggcttcagtaagcgcgtcccctgccaggcgccctggcaatgcagaggagtcaccgagctccgcctttgaccagcgtgcagctgggagagtgagatcagagaccacagcagatcgtggcgctgtgatcagggggtacactcaagctgtgggtcccttaccccagccttgagatcccaggaaggcctgcagcctgaaacgggccttgaaaggtgcgtagtttctctgaaaagcatcacccaggtcagaatgaaaggaaactctctgtgcagaccgctgtatgtgggacctttgaagacagtcaaatagtgttcaattctatagggatcttctctggatcaagcaatggtggtgaaaaatgtttcgcaagggcaaaaaacgacacagtagtagcagttcccaaagtagcgaaatcagtactaagagcaagtctgtggattctagccttgggggtctttcacgatccagcactgtggccagcctcgacacagattccaccaaaagctcaggacaaagcaacaataattcagatacctgtgcagaatttcgaataaaatatgttggtgccattgagaaactgaaactctccgagggaaaaggccttgaagggccattagacctgataaattatatagacgttgcccagcaagatggaaagttgccttttgttcctccggaggaagaatttattatgggagtttccaagtatggcataaaagtatcaacatcagatcaatatgatgttttgcacaggcatgctctctacttaataatccggatggtgtgttacgatgacggtctgggggcgggaaaaagcttactggctctgaagaccacagatgcaagcaatgaggaatacagcctgtgggtttatcagtgcaacagcctggaacaagcacaagccatttgcaaggttttatccaccgcttttgactctgtattaacatctgagaaaccctgaatcctgcaatcaagtagaagtcaacttcatctgaaagttcagctgttttcaaactgcaatgctgaaatgttatgcaaataatgaagttatcccttgctctagattttctgaagaaaatggattgtgtaaaatgctgatcatttgtttattaaaatgtgtcctattacacagtgagttaactctcaatgaagtcatctattttctgggctaaaaaacttcatttgtctttttcaacttctaataagcttaacctaagtgtcacagaagcctaggtgtcacagaggtccactcagtgacaaacacacactgaaggcctgaggaagacgagatgtcacagaggtccactcagtgacaaacacacactgaaggcctgaggaagactagatgtcacagaggtccactcagtgacaaacacacactgaaggcctgaggaagacgagatgtcacagaggtccactcagtgacaaacacacactgaaggcctgaggaagactagatgtcacagaggtccactcagtgacaaacacacactgaaggcctgaggaagacgagatgtcacagaggtccactcagtgacaaacacacactgaaggcctgaggaagacgagatgtcacagaggtccactcagtgacaaacacacactgaaggcctgaggaagactagatgtcacagaggtccactcagtgacaaacacacactgaaggcctgaggaagacgagatgtcacagaggtccactcagtgacaaacacacactgaaggcctgaggaagacgagatgtcacagaggtccactcagtgacacacactgaaggcctgaggaagactgaggacatgggctcagtggtggcttcccagtcatggtatcactggcatggacctctgtccggcagaggtgtggactggagaccaggattcatgctggtctggaacagtgacattgccaacttaagacacacaaagcagattttcagaagtgtctggtcaagataacatgctggccaaccacaattcctagagttaagagaaccttaaaagattaccgctcatgctaaaagtatgtaaagatcccatgtacagtatgatagtgtactttttttaaaggactgtcaatatacaaaactttaaagattaaaaacattaaaaataaaaccatgtccatttaaaagtattttatttttttccagtcaaatgactagttaacaagaagagtaaacttattaaacatgctctaattataaatcactgcattaaggacaatgaaaataatcaatttcggttatacaatatatacagttgtgctgcaaccaaagtaatcaggtgaatgaactgaatatcatacatctcaaaatagcatcctaagctgcatattatgttatccaccccttaacagatcacacagttactcttagtctgtgtacatgttctgagccatcatcccagatctgatggagaatggcatgcaaaatgccagaatcctgcagctgcagttcatgaaacataaactttaaatataaatagatatctacaatgtttttctttctcttagttgcttttttaatttgcaaggagcaaataactaagaaaggatattagcagggtcgttaatataatttctcctctggtaagagtactattagttactgcacaatagcaccaaattgtagactggaaaaatatttcctaggtatttatgtaccagtgaacctgacagattagtttgggactggagttctaatgttgatatgaatcaactttattccttatatagctggcaccaggtggtcaaaaggctgactataaaatacagatgcaggaggattgttaaaatagacataagtgcactgtgcaaaatacatctgtttacttaaatctatgagaaaattaaatgaagggttcaaacagaaattaacaattagtgaaaacagatgtagtgctttaaaaaaaaacaaaaacaaaaaactacagatataacacatttttacccggaactttgaaaggtaaaaagcgattgctatacaacatcataaaacattccagtttgttctgtcttcctttataacaaaaacaaaaagtacaatgccaaaaaaaaaaaaaactctacacagtcttgcataataaagacaagctgcttcaatcaaatgcaccatcacaacaaatgcagttaacagcattgctgcctcactttccaagcctatatgcaaatttattcctttacttttgttaaaagtccaagtgggtatcatatgcctatttattctcagagtgccaaaatttccaatattcctactatgaatcttaccctcgcaattactaaatagaggtatgacagtcaagttcattaaacgaatgagttttggttttataatagacaacctaatcctctactaccaccccaagtagcttaagaatgatatgatggcctgaaacagtaaaaagtgggatgtttgggagtattacctgggacctatatatttctgatatgttcttgattataaacagatggacagattcaatttcaagacagtgtgactaccattcctgttggagtattatagaaatacaagacactaaactgagtaaacattctcctgggctagaagggaaggcagtggtacactcagtaggaaacagcaagtgatgtgttaatacagcatggtctgcgccacagaattctactgtgtacagttgctttctgtgtgactcaggaagttcaagaaggcaaattccaaaacacctaaagcatataaactaatttaaaagaactgttttgcaatccatcatccttagtttttaaccaaattcaggaaatgcagttttatataacctggaacagaatgaactgtagttaccctacgttgtcataaaccatcagtagttttgttaagtatgattgttcacaacaggttatacatacatgcagaatataatgatagctgcaacctcacaaattagggctagaaagtacaatgctaatgtgtaaatttccaagttgctttttaaacactgggtggatttcaaaggaatgtgtgtctttaaaggtgaactgatggcattttatcgagaaagttcagagctgggctatggacttctgaagcagcagttcactggccgcctaaaataataattgtgataaaggtcaccaactccagaactgggccaaggaatgcaggaagaatttattcattaatgcaaacatttttaggtttagctaattccgtagaggcaggatcttgattatgtataatagttaaaataacttttcagttcacctgttgggaaattcagtttttcctaataaatgcatagcaatgtttcatgaaaaccacaaattataaaaacaattactgatatgtaaaaa

SEQ ID NO: 143197 - DNA, 1043 bp, Homo sapiens
  Payload ID: 8290
  Gene Symbol: ITGB1BP1
  Gene Name: integrin beta 1 binding protein 1
  ENST ID: ENST00000456913
  CDS Start-End: 94-648
cggcactcccacgcggaccccgaagtccgcaacccggggatgggcccgcggctgcgaggggatcttctctggatcaagcaatggtggtgaaaaatgtttcgcaagggcaaaaaacgacacagtagtagcagttcccaaagtagcgaaatcagtactaagagcaagtctgtggattctagccttgggggtctttcacgatccagcactgtggccagcctcgacacagattccaccaaaagctcaggacaaagcaacaataattcagatacctgtgcagaatttcgaataaaatatgttggtgccattgagaaactgaaactctccgagggaaaaggccttgaagggccattagacctgataaattatatagacgttgcccagcaagatggaaagttgccttttgttcctccggaggaagaatttattatgggagtttccaagtatggcataaaagtatcaacatcagatcaatatgatgttttgcacaggcatgctctctacttaataatccggatggtgtgttacgatgacggtctgggggcgggaaaaagcttactggctctgaagaccacagatgcaagcaatgaggaatacagcctgtgggtttatcagtgcaacagcctggtgagacttcgttactttggttagctgcttgcccatcaagtcgcaacacccagggactactgtttttgaaggctgaagaaatacaatccattatatatggaatatcttggcctggggatagtgaatgaatattaggccggaggtcagccggctggcaagacagtgcaggtttgtgaaatatttgttagggccagtggcagcactcgcttgtgccgggatttaaaaggtaaacaaagcagctgaggaaaaatgtatcctccaggggccgaaggcttcttccatttccgaacgttgttgccctcctagactgcgtgatcagcctttgcaggctgcagtcgctgtttgctttcctctgaaggagggcagaaagggcccacgtgcagggaagctcatagtatgggttccactgacccaggcag

SEQ ID NO: 143198 - DNA, 663 bp, Homo sapiens
  Payload ID: 8290
  Gene Symbol: ITGB1BP1
  Gene Name: integrin beta 1 binding protein 1
  ENST ID: ENST00000460001
  CDS Start-End: 411-663
agatcgggcgtgggcttgcggactgcagcttcccgagccgctgtcgccccggaggggcggcaaggcgggcggccgcgggccgtttccttgcctcttcctctgccccgcttcggccgcctcccgcctctcagggtcggggttgtctgtccccttcgctgtcacatcctccgcacccagcgcttggaaggtgctccatcacggtgacagacaggtgccaagcaggctggcgtctgggaggaacttcggagccggctctccctaggccccgagcttggccgcatccgtccttactctggtgaccctgggcaggtcactgactcttcgggcgctttggcatcctcgtttgaaaggggctgttatcctgcagccttgctggggatcttctctggatcaagcaatggtggtgaaaaatgtttcgcaagggcaaaaaacgacacagtagtagcagttcccaaagtagcgaaatcagtactaagagcaagtctgtggattctagccttgggggtctttcacgatccagcactgtggccagcctcgacacagattccaccaaaagctcaggacaaagcaacaataattcagatacctgtgcagaatttcgaataaaatatgttggtgccattgagaaactgaaactctccgagggaaaaggccttgaagggc

SEQ ID NO: 143199 - DNA, 699 bp, Homo sapiens
  Payload ID: 8290
  Gene Symbol: ITGB1BP1
  Gene Name: integrin beta 1 binding protein 1
  ENST ID: ENST00000494563
  CDS Start-End: 358-699
agatcgggcgtgggcttgcggactgcagcttcccgagccgctgtcgccccggaggggcggcaaggcgggcggccgcgggccgtttccttgcctcttcctctgccccgcttcggccgcctcccgcctctcagggtcggggttgtctgtccccttcgctgtcacatcctccgcacccagcgcttggaaggtgctccatcacggtgacagacaggtgcgtagtttctctgaaaagcatcacccaggtcagaatgaaaggaaactctctgtgcagaccgctgtatgtgggacctttgaagacagtcaaatagtgttcaattctatagggatcttctctggatcaagcaatggtggtgaaaaatgtttcgcaagggcaaaaaacgacacagtagtagcagttcccaaagtagcgaaatcagtactaagagcaagtctgtggattctagccttgggggtctttcacgatccagcactgtggccagcctcgacacagattccaccaaaagctcaggacaaagcaacaataattcagatacctgtgcagaatttcgaataaaatatgttggtgccattgagaaactgaaactctccgagggaaaaggccttgaagggccattagacctgataaattatatagacgttgcccagcaagatggaaagttgccttttgttcctccggaggaagaatttattatgggagtt

SEQ ID NO: 143200 - DNA, 540 bp, Homo sapiens
  Payload ID: 8290
  Gene Symbol: ITGB1BP1
  Gene Name: integrin beta 1 binding protein 1
  ENST ID: ENST00000484735
  CDS Start-End: 281-540
gagctcgcggaggcctgacgggaacacggtcccgagagcggcgcggacggccaggaaggatgggcgccctggcaatgcagaggagtcaccgagctccgcctttgaccagcgtgcagctgggagagtgagatcagagaccacagcagatcgtggcgctgtgatcagggggtacactcaagctgtgggtcccttaccccagccttgagatcccaggaaggcctgcagcctgaaacgggccttgaaaggggatcttctctggatcaagcaatggtggtgaaaaatgtttcgcaagggcaaaaaacgacacagtagtagcagttcccaaagtagcgaaatcagtactaagagcaagtctgtggattctagccttgggggtctttcacgatccagcactgtggccagcctcgacacagattccaccaaaagctcaggacaaagcaacaataattcagatacctgtgcagaatttcgaataaaatatgttggtgccattgagaaactgaaactctccgagggaaaaggccttgaagggccattaga

SEQ ID NO: 143201 - DNA, 659 bp, Homo sapiens
  Payload ID: 8290
  Gene Symbol: ITGB1BP1
  Gene Name: integrin beta 1 binding protein 1
  ENST ID: ENST00000497105
  CDS Start-End: 463-659
tccgggcggggccgcgctcccggggcgcgggtggaggagcttggaaccacgcagatcgggcgtgggcttgcggactgcagcttcccgagccgctgtcgccccggaggggcggcaaggcgggcggccgcgggccgtttccttgcctcttcctctgccccgcttcggccgcctcccgcctctcagggtcggggttgtctgtccccttcgctgtcacatcctccgcacccagcgcttggaaggtgctccatcacggtgacagacaggtgccaagcaggctggcgtctgggaggaacttcggagccggctctccctaggccccgagcttggccgcatccgtccttactctggtgaccctgggcaggtcactgactcttcgggcgctttggcatcctcgtttgaaaggggctgttatcctgcagccttgctggggatcttctctggatcaagcaatggtggtgaaaaatgtttcgcaagggcaaaaaacgacacagtagtagcagttcccaaagtagcgaaatcagtactaagagcaagtctgtggattctagccttgggggtctttcacgatccagcactgtggccagcctcgacacagattccaccaaaagctcaggacaaagcaacaataattcagatacctgtgcagaatttcgaataaa

SEQ ID NO: 143202 - DNA, 861 bp, Homo sapiens
  Payload ID: 8290
  Gene Symbol: ITGB1BP1
  Gene Name: integrin beta 1 binding protein 1
  ENST ID: ENST00000464228
  CDS Start-End: 164-280
gtgggcaggagggctggaaaagccggcgctggagcgggaacgggagtagctgcctgggcgccaaaggccgcggcactcccacgcggaccccgaagtccgcaacccggggatgggcccgcggctgcgaggggatcttctctggatcaagcaatggtggtgaaaaatgtttcgcaagggcaaaaaacgacacagtagtagcagttcccaaagtagcgaaatcagtactaagagcaaggacaaagcaacaataattcagatacctgtgcagaatttcgaataaaatatgttggtgccattgagaaactgaaactctccgagggaaaaggccttgaagggccattagacctgataaattatatagacgttgcccagcaagatggaaagttgccttttgttcctccggaggaagaatttattatgggagtttccaagtatggcataaaagtatcaacatcagatcaatatgatgttttgcacaggcatgctctctacttaataatccggatggtgtgttacgatgacggtctgggggcgggaaaaagcttactggctctgaagaccacagatgcaagcaatgaggaatacagcctgtgggtttatcagtgcaacagcctggaacaagcacaagccatttgcaaggttttatccaccgcttttgactctgtattaacatctgagaaaccctgaatcctgcaatcaagtagaagtcaacttcatctgaaagttcagctgttttcaaactgcaatgctgaaatgttatgcaaataatgaagttatcccttgctctagattttctgaagaaaatggattgtgtaaaatgctgatcatttgtttattaaaatgtgtcctattacacagtga

SEQ ID NO: 143203 - DNA, 874 bp, Homo sapiens
  Payload ID: 8290
  Gene Symbol: ITGB1BP1
  Gene Name: integrin beta 1 binding protein 1
  Uniprot ID: O14713
  ENST ID: ENST00000488451
  CDS Start-End: 255-707
agccggcgctggagcgggaacgggagtagctgcctgggcgccaaaggccgcggcactcccacgcggaccccgaagtccgcaacccggggatgggcccgcggctgcgaggtgcgtagtttctctgaaaagcatcacccaggtcagaatgaaaggaaactctctgtgcagaccgctgtatgtgggacctttgaagacagtcaaatagtgttcaattctatagggatcttctctggatcaagcaatggtggtgaaaaatgtttcgcaagggcaaaaaacgacacagtagtagcagttcccaaagtagcgaaatcagtactaagagcaagtctgtggattctagccttgggggtctttcacgatccagcactgtggccagcctcgacacagattccaccaaaagctcaggacaaagcaacaataattcagatacctgtgcagaatttcgaataaaatatgttggtgccattgagaaactgaaactctccgagggaaaaggccttgaagggccattagacctgataaattatatagacgttgcccagcaagatggaaagttgccttttgttcctccggaggaagaatttattatgggagtttccaagtatggcataaaagtatcaacatcagatcaatatgaacaagcacaagccatttgcaaggttttatccaccgcttttgactctgtattaacatctgagaaaccctgaatcctgcaatcaagtagaagtcaacttcatctgaaagttcagctgttttcaaactgcaatgctgaaatgttatgcaaataatgaagttatcccttgctctagattttctgaagaaaatggattgtgtaaaatgctgatcatttgtttattaaaatgtgtcctattac

SEQ ID NO: 143204 - DNA, 445 bp, Homo sapiens
  Payload ID: 8290
  Gene Symbol: ITGB1BP1
  Gene Name: integrin beta 1 binding protein 1
  ENST ID: ENST00000467606
  CDS Start-End: 158-445
gcctcttcctctgccccgcttcggccgcctcccgcctctcagggtcggggttgtctgtccccttcgctgtcacatcctccgcacccagcgcttggaaggtgctccatcacggtgacagacaggggatcttctctggatcaagcaatggtggtgaaaaatgtttcgcaagggcaaaaaacgacacagtagtagcagttcccaaagtagcgaaatcagtactaagagcaagtctgtggattctagccttgggggtctttcacgatccagcactgtggccagcctcgacacagattccaccaaaagctcaggacaaagcaacaataattcagatacctgtgcagaatttcgaataaaatatgttggtgccattgagaaactgaaactctccgagggaaaaggccttgaagggccattagacctgataaattatatagacgttgcccag

SEQ ID NO: 143205 - DNA, 748 bp, Homo sapiens
  Payload ID: 8290
  Gene Symbol: ITGB1BP1
  Gene Name: integrin beta 1 binding protein 1
  ENST ID: ENST00000492079
  CDS Start-End: 341-748
aaatatagaagtaaattggatgatgaggctgattaaaaagcttgggctcagtggtcagacttgggcaagtggcctaatgtcgtcccctagtaagtggacttagagtggggtctccaaatacggagaatctttgggttgcagcaggagctttcactgactgctgcgtgagttgctcgttctttttccttcatcaggtgcgtagtttctctgaaaagcatcacccaggtcagaatgaaaggaaactctctgtgcagaccgctgtatgtgggacctttgaagacagtcaaatagtgttcaattctatagggatcttctctggatcaagcaatggtggtgaaaaatgtttcgcaagggcaaaaaacgacacagtagtagcagttcccaaagtagcgaaatcagtactaagagcaagtctgtggattctagccttgggggtctttcacgatccagcactgtggccagcctcgacacagattccaccaaaagctcaggacaaagcaacaataattcagatacctgtgcagaatttcgaataaaatatgttggtgccattgagaaactgaaactctccgagggaaaaggccttgaagggccattagacctgataaattatatagacgttgcccagcaagatggaaagttgccttttgttcctccggaggaagaatttattatgggagtttccaagtatggcataaaagtatcaacatcagatcaatatgatgttttgcacaggcatgctctctac

SEQ ID NO: 143206 - DNA, 1913 bp, Homo sapiens
  Payload ID: 8290
  Gene Symbol: ITGB1BP1
  Gene Name: integrin beta 1 binding protein 1
  ENST ID: ENST00000483795
  CDS Start-End: 120-443
agtagctgcctgggcgccaaaggccgcggcactcccacgcggaccccgaagtccgcaacccggggatgggcccgcggctgcgaggggatcttctctggatcaagcaatggtggtgaaaaatgtttcgcaagggcaaaaaacgacacagtagtagcagttcccaaagtagcgaaatcagtactaagagcaagtctgtggattctagccttgggggtctttcacgatccagcactgtggccagcctcgacacagattccaccaaaagctcaggacaaagcaacaataattcagatacctgtgcagaatttcgaataaaatatgttggtgccattgagaaactgaaactctccgagggaaaaggccttgaagggccattagacctgataaattatatagacgttgcccaggtaaaaaaaaaaaattccgtaactctctggttatgagagtctggggagccaactcatggctttggggcaaaatgctcactcctcgggtccactgggtgccgctccgcttgctctcgactgaagtccccgcatcaccaccgcacatgtgcgtgagcgctgagctgcatgggaacacaggcgctgttcctcccttcaaacacgcaagatggaaagttgccttttgttcctccggaggaagaatttattatgggagtttccaagtatggcataaaagtatcaacatcagatcaatatgaacaagcacaagccatttgcaaggttttatccaccgcttttgactctgtattaacatctgagaaaccctgaatcctgcaatcaagtagaagtcaacttcatctgaaagttcagctgttttcaaactgcaatgctgaaatgttatgcaaataatgaagttatcccttgctctagattttctgaagaaaatggattgtgtaaaatgctgatcatttgtttattaaaatgtgtcctattacacagtgagttaactctcaatgaagtcatctattttctgggctaaaaaacttcatttgtctttttcaacttctaataagcttaacctaagtgtcacagaagcctaggtgtcacagaggtccactcagtgacaaacacacactgaaggcctgaggaagacgagatgtcacagaggtccactcagtgacaaacacacactgaaggcctgaggaagactagatgtcacagaggtccactcagtgacaaacacacactgaaggcctgaggaagacgagatgtcacagaggtccactcagtgacaaacacacactgaaggcctgaggaagactagatgtcacagaggtccactcagtgacaaacacacactgaaggcctgaggaagacgagatgtcacagaggtccactcagtgacaaacacacactgaaggcctgaggaagacgagatgtcacagaggtccactcagtgacaaacacacactgaaggcctgaggaagactagatgtcacagaggtccactcagtgacaaacacacactgaaggcctgaggaagacgagatgtcacagaggtccactcagtgacaaacacacactgaaggcctgaggaagacgagatgtcacagaggtccactcagtgacacacactgaaggcctgaggaagactgaggacatgggctcagtggtggcttcccagtcatggtatcactggcatggacctctgtccggcagaggtgtggactggagaccaggattcatgctggtctggaacagtgacattgccaacttaagacacacaaagcagattttcagaagtgtctggtcaagataacatgctggccaaccacaattcctagagttaagagaaccttaaaagattaccgctcatgctaaaagtatgtaaagatcccatgtacagtatgatagtgtactttttttaaaggactgtcaatatacaaaactttaaagattaaaaacatt

SEQ ID NO: 143207 - DNA, 948 bp, Homo sapiens
  Payload ID: 8291
  Gene Symbol: ITGB3BP
  Gene Name: integrin beta 3 binding protein (beta3-endonexin)
  Uniprot ID: Q13352
  ENST ID: ENST00000271002
  CDS Start-End: 83-616
gtttcctttggcggattttctgttttcggaagttgctgggttcgttttattcagcggcagtggtgctttcccgaatctcagaatgcctgttaaaagatcactgaagttggatggtctgttagaagaaaattcatttgatccttcaaaaatcacaaggaagaaaagtgttataacttattctccaacaactggaacttgtcaaatgagtctatttgcttctcccacaagttctgaagagcaaaagcacagaaatggactatcaaatgaaaagagaaaaaaattgaatcaccccagtttaactgaaagcaaagaatctacaacaaaagacaatgatgaattcatgatgttgctatcaaaagttgagaaattgtcagaagaaatcatggagataatgcaaaatttaagtagtatacaggctttggagggcagtagagagcttgaaaatctcattggaatctcctgtgcatcacatttcttaaaaagagaaatgcagaaaaccaaagaactaatgacaaaagtgaataaacaaaaactgtttgaaaagagtacaggacttcctcacaaagcatcacgtcatcttgacagctatgaattccttaaagccattttaaactgaggcattaagaagaaatgcactcaccatgagcaccaacttctgcatctgcctgatcatatttaaaggaacagagaaatatttgtaattaatctgcccagtaaataccagctcgtagcagttggcaggtgcatgtctagataaaatttcttgcagctaatttaaactttctacacgcaccagtagataatctcaatgtaaataatacatttcttcttggctctttaatgtaagccaacatggagaggaagatcttgacttatattctgtaccacatacacttctgtggacttttagcatttgtgggtagacttaataaagcatgtataaaagtg

SEQ ID NO: 143208 - DNA, 1044 bp, Homo sapiens
  Payload ID: 8291
  Gene Symbol: ITGB3BP
  Gene Name: integrin beta 3 binding protein (beta3-endonexin)
  Uniprot ID: Q13352
  ENST ID: ENST00000371092
  CDS Start-End: 62-712
gttttcggaagttgctgggttcgttttattcagcggcagtggtgctttcccgaatctcagaatgccttttgctcccgttgcccaggctagagtgcaatggcacgatttccgttcactgcaacatctgcttcccgcgttcaagcgattctcctgcctcagccttgggagtagttgggattacagtgttaaaagatcactgaagttggatggtctgttagaagaaaattcatttgatccttcaaaaatcacaaggaagaaaagtgttataacttattctccaacaactggaacttgtcaaatgagtctatttgcttctcccacaagttctgaagagcaaaagcacagaaatggactatcaaatgaaaagagaaaaaaattgaatcaccccagtttaactgaaagcaaagaatctacaacaaaagacaatgatgaattcatgatgttgctatcaaaagttgagaaattgtcagaagaaatcatggagataatgcaaaatttaagtagtatacaggctttggagggcagtagagagcttgaaaatctcattggaatctcctgtgcatcacatttcttaaaaagagaaatgcagaaaaccaaagaactaatgacaaaagtgaataaacaaaaactgtttgaaaagagtacaggacttcctcacaaagcatcacgtcatcttgacagctatgaattccttaaagccattttaaactgaggcattaagaagaaatgcactcaccatgagcaccaacttctgcatctgcctgatcatatttaaaggaacagagaaatatttgtaattaatctgcccagtaaataccagctcgtagcagttggcaggtgcatgtctagataaaatttcttgcagctaatttaaactttctacacgcaccagtagataatctcaatgtaaataatacatttcttcttggctctttaatgtaagccaacatggagaggaagatcttgacttatattctgtaccacatacacttctgtggacttttagcatttgtgggtagacttaataaagcatgtataaaagtg

SEQ ID NO: 143209 - DNA, 1285 bp, Homo sapiens
  Payload ID: 8291
  Gene Symbol: ITGB3BP
  Gene Name: integrin beta 3 binding protein (beta3-endonexin)
  Uniprot ID: Q13352
  ENST ID: ENST00000489099
  CDS Start-End: 370-882
aagatgcagagcccttctccaaacgatccggctagaaatctaggaagcgctgatccggagcgcacagagacagctgtgttgctcctctatcgcgggggtggtatggccagagtagtgagagaaggtgctctgttacaccagcaggaaataggtgctgtcctgggcctagaactccccgctcgctcctttgctcgcgcacacccggatccttcgtcgcggggaggatgtttccgcccggccgcggtgggcttgacgcaacgtccagcgcgcgcttttcatgccttggcgtttcctttggcggattttctgttttcggaagttgctgggttcgttttattcagcggcagtggtgctttcccgaatctcagaatgcctgttaaaagatcactgaagttggatggtctgttagaagaaaattcatttgatccttcaaaaatcacaaggaagaaaagtgttataacttattctccaacaactggaacttgtcaaatgagtctatttgcttctcccacaagttctgaagagcaaaagcacagaaatggactatcaaatgaaaagagaaaaaaattgaatcaccccagtttaactgaaagcaaagaatctacaacaaaagacaatgatgaattcatgatgttgctatcaaaagttgagaaattgtcagaagaaatcatggagataatgcaaaatttaagtagtatacaggctttggagggcagtagagagcttgaaaatctcattggaatctcctgtgcatcacatttcttaaaaagagaaatgcagaaaaccaaagaactaatgacaaaagtgaataaacaaaaactgtttgaaaagagtacaggacttcctcacaaaggtcagcctcagatgtcacaacctctgtgaagctctccccagctctcctagcatcacgtcatcttgacagctatgaattccttaaagccattttaaactgaggcattaagaagaaatgcactcaccatgagcaccaacttctgcatctgcctgatcatatttaaaggaacagagaaatatttgtaattaatctgcccagtaaataccagctcgtagcagttggcaggtgcatgtctagataaaatttcttgcagctaatttaaactttctacacgcaccagtagataatctcaatgtaaataatacatttcttcttggctctttaatgtaagccaacatggagaggaagatcttgacttatattctgtaccacatacacttctgtggacttttagcatttgtgggtagacttaataaagcatgtataaaagtg

SEQ ID NO: 143210 - DNA, 10757 bp, Homo sapiens
  Payload ID: 8292
  Gene Symbol: ITGA1
  Gene Name: integrin, alpha 1
  Uniprot ID: P56199
  ENST ID: ENST00000282588
  CDS Start-End: 459-3998
ctcccgaaggtccagcccttacccgccttcctaccaccttaggggatttggcccggagaacgagatcaccctctcaatgaaaggcagatgtccctttaaggtttgcttctacagcccgtggactttagcctaaacacggacccgcgaagctggctttatttgtccatgtctcggacagagcctgggaagctgccagtgagatttcagagaccaagagcgcgaaggggcgggcgatgtggcaatccgtctgggatgtgaaaagcgtggagcgcatttagaggaattcgacgaaaacacaggaaatcactcctctcccgctcctgggcgccgctgccactggggcagaggactgggaaccgcggcagcgggataagtggcccagccagagagcgcagctcccgcgcccggtcctgccctgcgaaccagcgcggccccctggcgctgaggctgctccggccatggcccctcggccccgcgcccgcccaggggtcgctgtcgcctgctgctggctcctcactgttgttctacgctgctgcgtatcattcaatgttgatgtgaaaaattcaatgactttcagcggcccggtggaagacatgtttggatatactgttcaacaatatgaaaatgaagaaggaaaatgggtgcttattggttctccgttagttggccaacccaaaaacagaactggagatgtctataagtgtccagttgggagaggtgaatcattaccttgtgtaaagttggatctaccagttaatacatcaattcccaatgtcacagaagtaaaggagaacatgacatttggatcaactttagtcaccaacccaaatggaggatttctggcttgtgggcccttatatgcctatagatgtggacatttgcattacacaactggaatctgttctgacgtcagccccacatttcaagtcgtgaattccattgcccctgtacaagaatgcagcactcaactggacatagtcatagtgctggatggttccaacagtatttacccatgggacagtgttacagcttttttaaatgaccttcttgaaagaatggatattggtcctaaacagacacaggttggaattgtacagtatggagaaaacgtgacccatgagttcaacctcaataagtattcttccaccgaagaggtacttgttgcagcaaagaaaatagtccagagaggtggccgccagactatgacagctcttggaatagacacagcaagaaaggaggcattcacggaagcccggggtgcccgaagaggagttaaaaaagtcatggttattgtgacagatggagagtctcatgacaatcatcgactgaagaaggtcatccaagactgtgaagatgaaaacattcaacggttttccatagctattcttggcagctataaccgaggaaatttaagcactgaaaaatttgtggaggaaataaaatcaattgcaagtgaacccactgaaaagcatttcttcaatgtctctgatgaattggctctagtcaccattgttaaaactctgggagaaagaatatttgccctggaagccacagctgaccagtcagcagcttcatttgaaatggaaatgtctcagactggcttcagtgctcattattcacaggactgggtcatgcttggagcagtaggagcctatgattggaatggaacagttgtcatgcagaaggctagtcaaatcataatccctcgaaacacaacctttaatgttgagtctaccaaaaagaatgaaccgcttgcttcttatttaggttacactgtaaactctgctactgcttcttctggagatgtgctctatattgctggacagcctcggtacaatcatacaggccaggtcattatctacaggatggaagatggaaacatcaaaattctccagacgctcagtggagaacagattggttcctactttggcagtattttaacaacaactgacattgacaaggattctaatactgacattcttctagtcggagcccctatgtacatgggaacagagaaggaggagcaaggaaaagtgtatgtgtatgctctcaatcagacaaggtttgaatatcaaatgagcctggaacctattaagcagacgtgctgttcatctcggcagcacaattcatgcacaacagaaaacaaaaatgagccatgcggggctcgttttggaactgcaattgctgctgtaaaagacctcaatcttgatggatttaatgacatcgtgataggagctccgctggaagatgatcacgggggagctgtgtacatttatcatggaagtggcaagactataaggaaagagtatgcacaacgtattccatcaggtggggatggtaagacactgaaattttttggccagtctatccacggagaaatggatttaaatggtgacggtctgacagatgtgactattgggggccttggtggtgctgccctcttctggtcccgagatgtggccgtagttaaagtgaccatgaattttgagccaaataaagtgaatattcaaaagaaaaactgccatatggagggaaaggaaacagtatgcataaatgctacagtgtgttttgatgtgaaattaaagtctaaagaagacacgatttatgaagctgatttgcagtaccgtgtcaccctagattcactaagacaaatatcacgaagttttttctctggaactcaagagagaaaggttcaaaggaacatcacagttcgaaaatcagaatgcactaagcactccttctacatgttggacaagcatgactttcaggactctgtgagaataacgttggactttaatcttaccgatccagaaaatgggcctgttcttgatgattctctaccaaactcagtacatgaatatattccctttgccaaagattgtggaaataaggaaaaatgtatctcagacctcagcctgcatgtcgccaccactgaaaaggacctgctgattgtccgatcccagaatgataagttcaacgttagcctcacagtcaaaaatacaaaggacagtgcctataacaccaggacaatagtgcattattctccaaatctagttttttcaggaattgaggctatccaaaaagacagttgtgaatctaatcataatatcacatgtaaagttggatatcccttcctgagaagaggagagatggtaactttcaaaatattgtttcagtttaacacatcctatctcatggaaaatgtgaccatttatttaagtgcaacaagtgacagcgaagaacctcctgaaaccctttctgataatgtagtaaacatttctatcccggtaaaatatgaagttggactacagttttacagctctgcaagtgaataccacatttcaattgctgccaatgagacagtccctgaagttattaattctactgaggacattggaaatgaaattaatatcttctacttgattagaaaaagtggatcttttccaatgccagagcttaagctgtcaatttcattccccaatatgacatcaaatggttaccctgtgctgtacccaactggattgtcatcttctgagaatgcaaactgcagaccccatatctttgaggatcctttcagtatcaactctggaaagaaaatgactacatcaactgaccatctcaaacgaggcacaattctggactgcaatacatgtaaatttgctaccatcacatgtaatctcacttcttctgacatcagccaagtcaatgtttcgcttatcttgtggaaaccaacttttataaaatcatatttttccagcttaaatcttactataaggggagaacttcggagtgaaaatgcatctctggttttaagtagcagcaatcaaaaaagagagcttgctattcaaatatccaaagatgggctaccgggcagagtgccattatgggtcatcctgctgagtgcttttgccggattgttgctgttaatgctgctcattttagcactgtggaagattggattcttcaaaagaccactgaaaaagaaaatggagaaatgaaatattttatgaaagaaaataataacaattattcaataatctatcctcaggtttgcctcaaatatgtgacaagaaatgtataattcatgacatagtcatgtaactatgtaatccatcagggattcattacttggaaaatgacaggtcatgcattatccaaaaacaataccaaaaagacatattttataaaatgacaaaaaatattttacataattactcatttttgttgagtaagcaaaattacaaagtgtttttaaaaaaacctgtacaaatatgtttatgtattaaatcaccatccaaaatatttaaggaatatataaaaagatttttatgatcatagaaacatctattttcaaaacaatataaattaagcttttccccttgattcctgttggatatccatgttcagcatgacagtcagcactcgtaaatgccaagaaaagaattacctgaaaaagatcatttctccctattcaaatgagaatattttcccttggtagaatccatatacaatatggattgaaaattaagtcaccaagaatacatttagcatctttgtgttgggttctatacctaaaaattttccctccctgcccaaggtgattggaaagtactgcaattgagctaaaattttatctaggatggaaaatcaggatagactcgtttaaaaacaagtatattaaatgggttaaattaagcttttacagaacatgcttaattttgatattgagctctaaatgcaaaactcttttatactgaaaaaacacttaaagtagttttgtgtggcatcacagtgatttgtcatgaaaagccatatatgggggacatgctaaaatggcttctgaatgaaatacgacagcagagaaagatgccactgaaatgctgaaattatctttgctgagcagcttttgaatgctaagggttccagtatgtgacccaaagaaagagttgtctcaactccttggtacagggttcattcaaacccccaagctgtgagagtgtgtttatttttaattttttaaaaggtatttaatttccaaccacacttcttatttttttgaaaagacaattttccatttcagtattacattttaccaagaagtcactgctttttaggtgtgttgcatcaatatttaaataaaatcccagaaatgtattttaaagaatttcaggtttgaaaactcaaaccaacaggaagatatcacacctttgtatgtgcttctttgttcttgaagtagtcattatggttcattggaatctactgtagcataagctcctaggttgctccatttcttaggaaaatagcaatgaatgaatgtatagtagctgcatgtgtgaactactgctgtaaagtttgctgacatttctgcaacaacatttctccatctgatttaccagaacctgtaacaagaccagaacatgtattcatccagaaactcctgggctctgctttgttcaaagaggagcaaatccacatagaaattaaatgttataaatttatttttttaaactaatttccaaagaatttagctgaagactcagagtcagcctacctcttgactctccacatccgcatctaagatcctgaaggccaaaggaatgcgcctgtgggatgccaaagccatcagtagctggaagaaagaatacctctttctagaggtttggtgtcctcttgctggcctgtcattatttggaaatacgcgcttttggaatttccttcattttcgctatttccaggttcagaaatcatacctaccacttgttctttctttgcccagtaaaactcagggtttctcttattcagagttaccatgttgcacacccccagtgctcagcctgcccagaagcccttctctgatctcagcaagatcttagtagtaaagctaacggatccattgaaattcatactcagcatctgtgactactagacaaagcccatttactgaaccataagtgtgcacttttaaactaaattgttaactgaaagggaaaaaatagaaatgagggcattttgaagtttttagaaaagagaggaagagctgttggccagatcaaagagatacttataagcccggcacaatttttaacataagtcattcctggctattaagtaaaatatttcatgaaccagaagtcctgtttctctaatattataatttgttgaggtttgtgtgtgtgtgtgtgtgcatgtgcagacacatgtacacatataaattgaatacaaaaatagctctataacaccaaaaaacagagtttacagaaaataaacacaaaagctatatctgcaagacaagtttgattcatctagtttcatatagtttcatatagtttcatttttattaatatttaggtttaacttatagttctgcaattatttaaaaaacaagtacagagcgtttgattaaaaaaagtcaacaaatgtttcaaaacagctttgtacaaatgttataaaacatatttaatgattaagaaatgtactagactctatcatttacttttaaaacatttaattagaaaaacaggtgatatttaagactatttataaacttattggccaaattgccaaaaagtttctttttctctaactttggtattctaaataattgattattgctcccattgtaaactgaaccatgtatgcactctcttttctgaccaaactacaatggtatattggtaaattatttaacaacacactgtccaggagggaaaaaaaaaacagtctctgatttgtatcatttgccaatttccatggtccaaatattctctctccattttcaaactaccaaagtgaccctaatcagcttacaaaattcctggaaatgtatctgccacctcttaccaaccagtgtgagctgacttcagcacaccactgagacagattacacgatagacagatagatagatagatagatagatagatagatagatagatagatagatattgatagagaacatgttgtgtctatatacatatccaatgacacacagtataatcatgttttaaattatgccaaaagtactgattatatcaagcccagtaaacataatgctacacagcacccattctttaattttgatttctaaaattataaccttcctttgatattaataaaatgttatgaacttgcaggagaaggaaggagttgaaagaaggaaaatataaagggtgatccacagtgaaaatcagacctacacaagccacaaaaaaattgtctcattttcccaaggaattcaaagtcctgtgatacacattacaaaagatgacactttgtaaatattttgaacttctatgatccaatttcaacttcattggtccaatttgtcaaactattttcctctgagcactagattcatgggcaatttaatctctgaatattttctgtgtcataagtgtgcttgaaaagaggcttgtagtaaacagatatttttacaaaatttgatgcttctgcaaccataataattttatctataaatgcgtatatacatatatatatatatatatatacacatacactcacatgcagatatttacatatatagatattctcttttccttttataaaatcaaagtctaggctcaattggaaaatggaaatatttgcaccaaaagaaaaaagtgccattgttgtgatcaatggagtaaagctggggtatagtagaggctggggaatccctgcccatgttctctccaaggccacagcttgcacaccgtgaatggtggccccactggctccatggagtgtgccttcacgcgggggaatgtccttgtccaacacgctgtaatctactccatgggaactgactgtcctgcttttcacaacattgagaaacaggcccagagcctgtctcatgtgccaggtgcagtcacattattgttaaaataaagtggcttctgacaaatcagtttttcaaaatagcatcctatgtacttttcatttcttccaacaaccctcaggcccccttttgccagttttctcccccaggggagattttcaagactactggagaaaaatctgttaataaaacatttgctctgagtaccagcttcagtgactcaatcatttatacaggatttcagtgttttgttctgcagcggtgttctaaagggttcacatagtataatggaggagggacaaagcagaatatacttccaagctggaacatctttaagacatttacaaactgttatgggacactatcagcaactacgcctggggaagctagcaggatttagctcttcaatggccctccaaatgcacccaacaatcgccaacctcacccatggaaatcatctaaaaaatgaaaagaagggccttaaagtcctcacatggatgctgtatttataactaaaatgtacagtttaattctaaatagcaggcttttaaatgcaaacagcttccaggtgagtcctctggctgccaatcagactgctgattctaaaccattctcacacagaatttctgaaaccaacaccaggtattaattgttaactgcagtgaaaggaaaccaaggcacattacaaaaggctaaatgctgctgtttctaagtggaagcactgttgaacaacactcttaggtggaataagaaaattagggttaaactgtaacattgtaatcggacgaacaaatcagcatctttgatcctcaggttaaaatttaatcttaaatttagaaattcaaagtaacagcctttaaccattaaccttgaggaaaatgtgaagtagcatctggagtctcttaagccccagccctgttgtcccctacagcatctccacccaggaagtccagttcctaactaatgggaatggatccttttcccattataaagggccgatgcttaacccttgaacccactactgttcttatgccccaagatctgcaccttacatcaggcacccgggaatgcttctcattgaaattttaccataccaaaaaatatgtaagggtgactcatcactcctaactttggactccttgctttgagatcggtatttttttctctctctttacatatagcaaaagctttccccagtagctgatgaatttagaactttatacaagactccctagcattttcctcctcccacaggctggagaatttcagtgctatgagactgggcagtaggagccagagccaatttgcaggatctcttttccttctgccttccagttggcttctcttctcagctgcgtggtggggatgatttggggtttcctcagcaaggccattctctgccttgtgcccatagcagggccttgggtggtgacatgttatctttgttggtgagcagacactcagagatcctttaattatctgacacaccagggaaatcttggcaatcaactaaggacctgtgacactcataactatgtttacatttggctttagcatatttcaggtaatatctttatgaaaaaaagatgaagtatggaattgtaggaactcttttgcaatagactgagatccaatgtttaaatctttttatttcagtttgatctgtgcctttagattggggacaaaattttaaaaacaaatcttccaaatgacaccacaatgaaagccagttgtggtcttgaaaaatctctctattgcattacttatcctcacccttgttttttaagaggtagagagagattactgggaagcagtgagccaacataattgtcctttcctctacagaatagctgtgcagaaggggaccaccacacttaggaccagtgccaggtgacaatctttccgtcatgctgctgcagcattttgcaccttgagagacaggaaaaaaaatgggggtgagggagtggaagatgatgaaactatttctcttttatgtctacatccttactcctcaaaatactttaagctcactcagaccccatataccctgcccacaatactaacacatgtactttgcataagtaaattgttgattaaataagagcaaaactatattcttatgtgtagattaaccaaggctaatttcctggagtttaatacactttggattcaagtaaaaacaatcacttaatgcagcaacatctcagaccctcttcactctagaaccgttttatacaagagaactcaacatttactgttttatttctgatattgcctgccattactcaggatgcaagagatgctctgcattccttattaggaaaaattggcctgtaaggagaatggtatactgcgtattactactgtgagactgtaaaattgttaatggacagtgtaaagaattgtattcattttattagcaagaaaaatattgcatacaagaactactgccctgaaatatccatcactccaatgaactgttctgcctgatctaacataaagttatatttcattgctcatttttttttgcctcactaaaatgactaacttaagggaatgtgcatttctacaagactttaattggataaactcattagaagaaaatgtttcgattgcattcaggaacaaagaagcataacctttgttgactcttgtaatttattatatgcttcatttaaacccattttgtaaagaaatcaggtaacagtcatttaatctgatataattagaaatagctgagagagtaaaaaagcattttgaatgtcctatgtatggcatatcctgtacaccaattgaaggtcagagctttggtatttttgtataattctgtcttatctggtgcatcagctgtgtattttacgtcaaggtaaatgagcatcctgttttatatgttaaattttaaaaatgactttttcaaagaag

SEQ ID NO: 143211 - DNA, 5269 bp, Homo sapiens
  Payload ID: 8293
  Gene Symbol: ITGA10
  Gene Name: integrin, alpha 10
  Uniprot ID: O75578
  ENST ID: ENST00000369304
  CDS Start-End: 176-3679
gttttccttggtctggggctccccacagttccccaccatcactcctcccattccttccaactttatttttagctgccattgggagggggcaggatgggagggaaagtgaagaaaacagaaaaggagagggacagaggccagaggacttctcatactggacagaaaccgatcaggcatggaactccccttcgtcactcacctgttcttgcccctggtgttcctgacaggtctctgctccccctttaacctggatgaacatcacccacgcctattcccagggccaccagaagctgaatttggatacagtgtcttacaacatgttgggggtggacagcgatggatgctggtgggcgccccctgggatgggccttcaggcgaccggaggggggacgtttatcgctgccctgtagggggggcccacaatgccccatgtgccaagggccacttaggtgactaccaactgggaaattcatctcatcctgctgtgaatatgcacctggggatgtctctgttagagacagatggtgatgggggattcatggcctgtgcccctctctggtctcgtgcttgtggcagctctgtcttcagttctgggatatgtgcccgtgtggatgcttcattccagcctcagggaagcctggcacccactgcccaacgctgcccaacatacatggatgttgtcattgtcttggatggctccaacagcatctacccctggtctgaagttcagaccttcctacgaagactggtagggaaactgtttattgacccagaacagatacaggtgggactggtacagtatggggagagccctgtacatgagtggtccctgggagatttccgaacgaaggaagaagtggtgagagcagcaaagaacctcagtcggcgggagggacgagaaacaaagactgcccaagcaataatggtggcctgcacagaagggttcagtcagtcccatgggggccgacccgaggctgccaggctactggtggttgtcactgatggagagtcccatgatggagaggagcttcctgcagcactaaaggcctgtgaggctggaagagtgacacgctatgggattgcagtccttggtcactacctccggcggcagcgagatcccagctctttcctgagagaaattagaactattgccagtgatccagatgagcgattcttcttcaatgtcacagatgaggctgctctgactgacattgtggatgcactaggagatcggatttttggccttgaagggtcccatgcagaaaacgaaagctcctttgggctggaaatgtctcagattggtttctccactcatcggctaaaggatgggattctttttgggatggtgggggcctatgactggggaggctctgtgctatggcttgaaggaggccaccgccttttccccccacgaatggcactggaagacgagttcccccctgcattgcagaaccatgcagcctacctgggttactctgtttcttccatgcttttgcggggtggacgccgcctgtttctctctggggctcctcgatttagacatcgaggaaaagtcatcgccttccagcttaagaaagatggggctgtgagggttgcccagagcctccagggggagcagattggttcatactttggcagtgagctctgcccattggatacagatagggatggaacaactgatgtcttacttgtggctgcccccatgttcctgggaccccagaacaaggaaacaggacgtgtttatgtgtatctggtaggccagcagtccttgctgaccctccaaggaacacttcagccagaacccccccaggatgctcggtttggctttgccatgggagctcttcctgatctgaaccaagatggttttgctgatgtggctgtgggggcgcctctggaagatgggcaccagggagcactgtacctgtaccatggaacccagagtggagtcaggccccatcctgcccagaggattgctgctgcctccatgccacatgccctcagctactttggccgaagtgtggatggtcggctagatctggatggagatgatctggtcgatgtggctgtgggtgcccagggggcagccatcctgctcagctcccggcccattgtccatctgaccccatcactggaggtgaccccacaggccatcagtgtggttcagagggactgtaggcggcgaggccaagaggcagtctgtctgactgcagccctttgcttccaagtgacctcccgtactcctggtcgctgggatcaccaattctacatgaggttcaccgcatcactggatgaatggactgctggggcacgtgcagcatttgatggctctggccagaggttgtcccctcggaggctccggctcagtgtggggaatgtcacttgtgagcagctacacttccatgtgctggatacatcagattacctccggccagtggccttgactgtgacctttgccttggacaatactacaaagccagggcctgtgctgaatgagggctcacccacctctatacaaaagctggtccccttctcaaaggattgtggccctgacaatgaatgtgtcacagacctggtgcttcaagtgaatatggacatcagaggctccaggaaggccccatttgtggttcgaggtggccggcggaaagtgctggtatctacaactctggagaacagaaaggaaaatgcttacaatacgagcctgagtctcatcttctctagaaacctccacctggccagtctcactcctcagagagagagcccaataaaggtggaatgtgccgccccttctgctcatgcccggctctgcagtgtggggcatcctgtcttccagactggagccaaggtgacctttctgctagagtttgagtttagctgctcctctctcctgagccaggtcttcgtgaagctgactgccagcagtgacagcctggagagaaatgggacccttcaagataacacagcccagacctcagcctacatccaatatgagccccacctcctgttctctagtgagtctaccctgcaccgctatgaggttcacccatatgggaccctcccagtgggtcctggcccagaattcaaaaccactctcagggttcagaacctaggctgctatgtggtcagtggcctcatcatctcagccctccttccagctgtggcccatgggggcaattacttcctatcactgtctcaagtcatcactaacaatgcaagctgcatagtgcagaacctgactgaacccccaggcccacctgtgcatccagaggagcttcaacacacaaacagactgaatgggagcaatactcagtgtcaggtggtgaggtgccaccttgggcagctggcaaaggggactgaggtctctgttggactattgaggctggttcacaatgaatttttccgaagagccaagttcaagtccctgacggtggtcagcacctttgagctgggaaccgaagagggcagtgtcctacagctgactgaagcctcccgttggagtgagagcctcttggaggtggttcagacccggcctatcctcatctccctgtggatcctcataggcagtgtcctgggagggttgctcctgcttgctctccttgtcttctgcctgtggaagcttggcttctttgcccataagaaaatccctgaggaagaaaaaagagaagagaagttggagcaatgaatgtagaataagggtctagaaagtcctccctggcagcttcttcaagagacttgcataaaagcagaggtttgggggctcagatgggacaagaagccgcctctggactatctccccagaccagcagcctgacttgacttttgagtcctagggatgctgctggctagagatgaggctttacctcagacaagaagagctggcaccaaaactagccatgctcccaccctctgcttccctcctcctcgtgatcctggttccatagccaacactggggcttttgtttggggtccttttatccccaggaatcaataatttttttgcctaggtgcctgactcctttcagattccctctttatcttccctcacagtttggaaaggatgagggttatcttcctcgattcttccaccctctcactttcctgcctgttccccactccacaggagggagctgacgttggcttgaaaggagtaaagtcaacatctgctgctttcctgtggactctggtgattcatagagccggatggggagagtcaacaggaaaaaaggagggaggaggaaaagccacaagagacattctgtacaattccaaggaacagagaagcctttagacaggcaactgccatcccccctgaaacctgagacctgtagtgcactcgaccgccctcaggtgttggtgaaacagagctgcccccaggctcgctgggcataggcttcctgattccaagccttttctgggagcaaagccagggcctggtgcctgattttctgaagccaggagccctcaggtggctggagctggaatagcagggaggactgggtgtacctaggcagtattttctctacttctctcaagtcttatactcactcttgagccctccttggggcctgcttagaaagcagacaggagagagagtactgctacttgatgatgggaaatgctttcactttaccagctttgggaagcagcagccccatgggatctaaaagtgtggagtctgcattaagaaacctacatgggtggcatggggctctggggagcaagcccttacttgctcagcactggttatgtagcacaaatagctcctaggaaaatgtttctggggcaaccctagaaccctggtcatattttgcagggtttctctggtggaatcagtttgccagcccttgcttgatgcttactggaaatctccaggttaatttctatctctgatccctccccaacccactccatatttgggtcatggacagtaaaggcagttggattctcatagacaactgggtaacttatatttctttgtaatcaagacttgagatatcgaagtcagttattggtctccagagtgcagctctgggagccttttgaagaatcagcactcattaagagctgagaagagagaagacctgattgggtggttgactagcagtcacagaacctgtcctcccaggctgttcctgaggcctgaccacagtatttattttggcatgtctctggccttctgcagaggcccaccctcatgggcattgtctctgtttcccagtggggtggacagtatatcagatggtcagaacaaataaagttcagtgtcaaatga

SEQ ID NO: 143212 - DNA, 4735 bp, Homo sapiens
  Payload ID: 8293
  Gene Symbol: ITGA10
  Gene Name: integrin, alpha 10
  Uniprot ID: O75578
  ENST ID: ENST00000539363
  CDS Start-End: 77-3151
gggaaagtgaagaaaacagaaaaggagagggacagaggccagaggacttctcatactggacagaaaccgatcaggcatggaactccccttcgtcactcacctgttcttgcccctggtgttcctgacaggctgcccaacatacatggatgttgtcattgtcttggatggctccaacagcatctacccctggtctgaagttcagaccttcctacgaagactggtagggaaactgtttattgacccagaacagatacaggtgggactggtacagtatggggagagccctgtacatgagtggtccctgggagatttccgaacgaaggaagaagtggtgagagcagcaaagaacctcagtcggcgggagggacgagaaacaaagactgcccaagcaataatggtggcctgcacagaagggttcagtcagtcccatgggggccgacccgaggctgccaggctactggtggttgtcactgatggagagtcccatgatggagaggagcttcctgcagcactaaaggcctgtgaggctggaagagtgacacgctatgggattgcagtccttggtcactacctccggcggcagcgagatcccagctctttcctgagagaaattagaactattgccagtgatccagatgagcgattcttcttcaatgtcacagatgaggctgctctgactgacattgtggatgcactaggagatcggatttttggccttgaagggtcccatgcagaaaacgaaagctcctttgggctggaaatgtctcagattggtttctccactcatcggctaaaggatgggattctttttgggatggtgggggcctatgactggggaggctctgtgctatggcttgaaggaggccaccgccttttccccccacgaatggcactggaagacgagttcccccctgcattgcagaaccatgcagcctacctgggttactctgtttcttccatgcttttgcggggtggacgccgcctgtttctctctggggctcctcgatttagacatcgaggaaaagtcatcgccttccagcttaagaaagatggggctgtgagggttgcccagagcctccagggggagcagattggttcatactttggcagtgagctctgcccattggatacagatagggatggaacaactgatgtcttacttgtggctgcccccatgttcctgggaccccagaacaaggaaacaggacgtgtttatgtgtatctggtaggccagcagtccttgctgaccctccaaggaacacttcagccagaacccccccaggatgctcggtttggctttgccatgggagctcttcctgatctgaaccaagatggttttgctgatgtggctgtgggggcgcctctggaagatgggcaccagggagcactgtacctgtaccatggaacccagagtggagtcaggccccatcctgcccagaggattgctgctgcctccatgccacatgccctcagctactttggccgaagtgtggatggtcggctagatctggatggagatgatctggtcgatgtggctgtgggtgcccagggggcagccatcctgctcagctcccggcccattgtccatctgaccccatcactggaggtgaccccacaggccatcagtgtggttcagagggactgtaggcggcgaggccaagaggcagtctgtctgactgcagccctttgcttccaagtgacctcccgtactcctggtcgctgggatcaccaattctacatgaggttcaccgcatcactggatgaatggactgctggggcacgtgcagcatttgatggctctggccagaggttgtcccctcggaggctccggctcagtgtggggaatgtcacttgtgagcagctacacttccatgtgctggatacatcagattacctccggccagtggccttgactgtgacctttgccttggacaatactacaaagccagggcctgtgctgaatgagggctcacccacctctatacaaaagctggtccccttctcaaaggattgtggccctgacaatgaatgtgtcacagacctggtgcttcaagtgaatatggacatcagaggctccaggaaggccccatttgtggttcgaggtggccggcggaaagtgctggtatctacaactctggagaacagaaaggaaaatgcttacaatacgagcctgagtctcatcttctctagaaacctccacctggccagtctcactcctcagagagagagcccaataaaggtggaatgtgccgccccttctgctcatgcccggctctgcagtgtggggcatcctgtcttccagactggagccaaggtgacctttctgctagagtttgagtttagctgctcctctctcctgagccaggtcttcgtgaagctgactgccagcagtgacagcctggagagaaatgggacccttcaagataacacagcccagacctcagcctacatccaatatgagccccacctcctgttctctagtgagtctaccctgcaccgctatgaggttcacccatatgggaccctcccagtgggtcctggcccagaattcaaaaccactctcagggttcagaacctaggctgctatgtggtcagtggcctcatcatctcagccctccttccagctgtggcccatgggggcaattacttcctatcactgtctcaagtcatcactaacaatgcaagctgcatagtgcagaacctgactgaacccccaggcccacctgtgcatccagaggagcttcaacacacaaacagactgaatgggagcaatactcagtgtcaggtggtgaggtgccaccttgggcagctggcaaaggggactgaggtctctgttggactattgaggctggttcacaatgaatttttccgaagagccaagttcaagtccctgacggtggtcagcacctttgagctgggaaccgaagagggcagtgtcctacagctgactgaagcctcccgttggagtgagagcctcttggaggtggttcagacccggcctatcctcatctccctgtggatcctcataggcagtgtcctgggagggttgctcctgcttgctctccttgtcttctgcctgtggaagcttggcttctttgcccataagaaaatccctgaggaagaaaaaagagaagagaagttggagcaatgaatgtagaataagggtctagaaagtcctccctggcagcttcttcaagagacttgcataaaagcagaggtttgggggctcagatgggacaagaagccgcctctggactatctccccagaccagcagcctgacttgacttttgagtcctagggatgctgctggctagagatgaggctttacctcagacaagaagagctggcaccaaaactagccatgctcccaccctctgcttccctcctcctcgtgatcctggttccatagccaacactggggcttttgtttggggtccttttatccccaggaatcaataatttttttgcctaggtgcctgactcctttcagattccctctttatcttccctcacagtttggaaaggatgagggttatcttcctcgattcttccaccctctcactttcctgcctgttccccactccacaggagggagctgacgttggcttgaaaggagtaaagtcaacatctgctgctttcctgtggactctggtgattcatagagccggatggggagagtcaacaggaaaaaaggagggaggaggaaaagccacaagagacattctgtacaattccaaggaacagagaagcctttagacaggcaactgccatcccccctgaaacctgagacctgtagtgcactcgaccgccctcaggtgttggtgaaacagagctgcccccaggctcgctgggcataggcttcctgattccaagccttttctgggagcaaagccagggcctggtgcctgattttctgaagccaggagccctcaggtggctggagctggaatagcagggaggactgggtgtacctaggcagtattttctctacttctctcaagtcttatactcactcttgagccctccttggggcctgcttagaaagcagacaggagagagagtactgctacttgatgatgggaaatgctttcactttaccagctttgggaagcagcagccccatgggatctaaaagtgtggagtctgcattaagaaacctacatgggtggcatggggctctggggagcaagcccttacttgctcagcactggttatgtagcacaaatagctcctaggaaaatgtttctggggcaaccctagaaccctggtcatattttgcagggtttctctggtggaatcagtttgccagcccttgcttgatgcttactggaaatctccaggttaatttctatctctgatccctccccaacccactccatatttgggtcatggacagtaaaggcagttggattctcatagacaactgggtaacttatatttctttgtaatcaagacttgagatatcgaagtcagttattggtctccagagtgcagctctgggagccttttgaagaatcagcactcattaagagctgagaagagagaagacctgattgggtggttgactagcagtcacagaacctgtcctcccaggctgttcctgaggcctgaccacagtatttattttggcatgtctctggccttctgcagaggcccaccctcatgggcattgtctctgtttcccagtggggtggacagtatatcagatggtcagaacaaataaagttcagtgtc

SEQ ID NO: 143213 - DNA, 3955 bp, Homo sapiens
  Payload ID: 8294
  Gene Symbol: ITGA11
  Gene Name: integrin, alpha 11
  Uniprot ID: Q9UKX5
  ENST ID: ENST00000315757
  CDS Start-End: 97-3663
gtgcaggctgcaggcgccgcgccgaggaggctgccgctctggcttgccgccccccgccgccgctgcacaccggacccagccgccgtgccgcgggccatggacctgcccaggggcctggtggtggcctgggcgctcagcctgtggccagggttcacggacaccttcaacatggacaccaggaagccccgggtcatccctggctccaggaccgccttctttggctacacagtgcagcagcacgacatcagtggcaataagtggctggtcgtgggcgccccactggaaaccaatggctaccagaagacgggagacgtgtacaagtgtccagtgatccacgggaactgcaccaaactcaacctgggaagggtcaccctgtccaacgtgtccgagcggaaagacaacatgcgcctcggccttagtctcgccaccaaccccaaggacaacagcttcctggcctgcagccccctctggtctcatgagtgtgggagctcctactacaccacagggatgtgttcaagagtcaactccaacttcaggttctccaagaccgtggccccagctctccaaaggtgccagacctacatggacatcgtcattgtcctggatggctccaacagcatctacccctgggtggaggttcagcacttcctcatcaacatcctgaaaaagttttacattggcccagggcagatccaggttggagttgtgcagtatggcgaagatgtggtgcatgagtttcacctcaacgactacaggtctgtaaaagatgtggtggaagctgccagccacattgagcagagaggaggaacagagacccggacggcatttggcattgaatttgcacgctcagaggctttccagaagggtggaaggaaaggagccaagaaggtgatgattgtcatcacagatggggagtcccacgacagcccagacctggagaaggtgatccagcaaagcgaaagagacaacgtaacaagatatgcggtggccgtcctgggctactacaaccgcagggggatcaatccagaaacttttctaaatgaaatcaaatacatcgccagtgaccctgatgacaagcacttcttcaatgtcactgatgaggctgccttgaaggacattgtcgatgccctgggggacagaatcttcagcctggaaggcaccaacaagaacgagacctcctttgggctggagatgtcacagacgggcttttcctcgcacgtggtggaggatggggttctgctgggagccgtcggtgcctatgactggaatggagctgtgctaaaggagacgagtgccgggaaggtcattcctctccgcgagtcctacctgaaagagttccccgaggagctcaagaaccatggtgcatacctggggtacacagtcacatcggtcgtgtcctccaggcaggggcgggtgtacgtggccggagccccccggttcaaccacacgggcaaggtcatcctgttcaccatgcacaacaaccggagcctcaccatccaccaggctatgcggggccagcagataggctcttactttgggagtgaaatcacctcggtggacatcgacggcgacggcgtgactgatgtcctgctggtgggcgcacccatgtacttcaacgagggccgtgagcgaggcaaggtgtacgtctatgagctgagacagaacctgtttgtttataacggaacgctaaaggattcacacagttaccagaatgcccgatttgggtcctccattgcctcagttcgagacctcaaccaggattcctacaatgacgtggtggtgggagcccccctggaggacaaccacgcaggagccatctacatcttccacggcttccgaggcagcatcctgaagacacctaagcagagaatcacagcctcagagctggctaccggcctccagtattttggctgcagcatccacgggcaattggacctcaatgaggatgggctcatcgacctggcagtgggagcccttggcaacgctgtgattctgtggtcccgcccagtggttcagatcaatgccagcctccactttgagccatccaagatcaacatcttccacagagactgcaagcgcagtggcagggatgccacctgcctggccgccttcctctgcttcacgcccatcttcctggcaccccatttccaaacaacaactgttggcatcagatacaacgccaccatggatgagaggcggtatacaccgagggcccacctggacgagggcggggaccgattcaccaacagagccgtactgctctcctccggccaggagctctgtgagcggatcaacttccatgtcctggacactgctgactacgtgaagccagtgaccttctcagtcgagtattccctggaggaccctgaccatggccccatgctggacgacggctggcccaccactctcagagtctcggtgcccttctggaacggctgcaatgaggatgagcactgtgtccctgaccttgtgttggatgcccggagtgacctgcccacggccatggagtactgccagagggtgctgaggaagcctgcgcaggactgctccgcatacacgctgtccttcgacaccacagtcttcatcatagagagcacacgccagcgagtggcggtggaggccacactggagaacaggggcgagaacgcctacagcacggtcctaaatatctcgcagtcagcaaacctgcagtttgccagcttgatccagaaggaggactcagacggtagcattgagtgtgtgaacgaggagaggaggctccagaagcaagtctgcaacgtcagctatcccttcttccgggccaaggccaaggtggctttccgtcttgattttgagttcagcaaatccatcttcctacaccacctggagatcgagctcgctgcaggcagtgacagtaatgagcgggacagcaccaaggaagacaacgtggcccccttacgcttccacctcaaatacgaggctgacgtcctcttcaccaggagcagcagcctgagccactacgaggtcaagcccaacagctcgctggagagatacgatggtatcgggcctcccttcagctgcatcttcaggatccagaacttgggcttgttccccatccacgggatgatgatgaagatcaccattcccatcgccaccaggagcggcaaccgcctactgaagctgagggacttcctcacggacgaggcgaacacgtcctgtaacatctggggcaatagcactgagtaccggcccaccccagtggaggaagacttgcgtcgtgctccacagctgaatcacagcaactctgatgtcgtctccatcaactgcaatatacggctggtccccaaccaggaaatcaatttccatctactggggaacctgtggttgaggtccctaaaagcactcaagtacaaatccatgaaaatcatggtcaacgcagccttgcagaggcagttccacagccccttcatcttccgtgaggaggatcccagccgccagatcgtgtttgagatctccaagcaagaggactggcaggtccccatctggatcattgtaggcagcaccctggggggcctcctactgctggccctgctggtcctggcactgtggaagctcggcttctttagaagtgccaggcgcaggagggagcctggtctggaccccacccccaaagtgctggagtgaggctccagaggagactttgagttgatgggggccaggacaccagtccaggtagtgttgagacccaggcctgtggccccaccgagctggagcggagaggaagccagctggctttgcacttgacctcatctcccgagcaatggcgcctgctccctccagaatggaactcaagctggttttaagtggaactgccctactgggagactgggacacctttaacacagacccctagggatttaaagggacacccctacacacacccaggcccatgccaaggcctccctcaggctctgtg

SEQ ID NO: 143214 - DNA, 10192 bp, Homo sapiens
  Payload ID: 8294
  Gene Symbol: ITGA11
  Gene Name: integrin, alpha 11
  Uniprot ID: Q9UKX5
  ENST ID: ENST00000423218
  CDS Start-End: 97-3666
gtgcaggctgcaggcgccgcgccgaggaggctgccgctctggcttgccgccccccgccgccgctgcacaccggacccagccgccgtgccgcgggccatggacctgcccaggggcctggtggtggcctgggcgctcagcctgtggccagggttcacggacaccttcaacatggacaccaggaagccccgggtcatccctggctccaggaccgccttctttggctacacagtgcagcagcacgacatcagtggcaataagtggctggtcgtgggcgccccactggaaaccaatggctaccagaagacgggagacgtgtacaagtgtccagtgatccacgggaactgcaccaaactcaacctgggaagggtcaccctgtccaacgtgtccgagcggaaagacaacatgcgcctcggccttagtctcgccaccaaccccaaggacaacagcttcctggcctgcagccccctctggtctcatgagtgtgggagctcctactacaccacagggatgtgttcaagagtcaactccaacttcaggttctccaagaccgtggccccagctctccaaaggtgccagacctacatggacatcgtcattgtcctggatggctccaacagcatctacccctgggtggaggttcagcacttcctcatcaacatcctgaaaaagttttacattggcccagggcagatccaggttggagttgtgcagtatggcgaagatgtggtgcatgagtttcacctcaacgactacaggtctgtaaaagatgtggtggaagctgccagccacattgagcagagaggaggaacagagacccggacggcatttggcattgaatttgcacgctcagaggctttccagaagggtggaaggaaaggagccaagaaggtgatgattgtcatcacagatggggagtcccacgacagcccagacctggagaaggtgatccagcaaagcgaaagagacaacgtaacaagatatgcggtggccgtcctgggctactacaaccgcagggggatcaatccagaaacttttctaaatgaaatcaaatacatcgccagtgaccctgatgacaagcacttcttcaatgtcactgatgaggctgccttgaaggacattgtcgatgccctgggggacagaatcttcagcctggaaggcaccaacaagaacgagacctcctttgggctggagatgtcacagacgggcttttcctcgcacgtggtggaggatggggttctgctgggagccgtcggtgcctatgactggaatggagctgtgctaaaggagacgagtgccgggaaggtcattcctctccgcgagtcctacctgaaagagttccccgaggagctcaagaaccatggtgcatacctggggtacacagtcacatcggtcgtgtcctccaggcaggggcgggtgtacgtggccggagccccccggttcaaccacacgggcaaggtcatcctgttcaccatgcacaacaaccggagcctcaccatccaccaggctatgcggggccagcagataggctcttactttgggagtgaaatcacctcggtggacatcgacggcgacggcgtgactgatgtcctgctggtgggcgcacccatgtacttcaacgagggccgtgagcgaggcaaggtgtacgtctatgagctgagacagaacctgtttgtttataacggaacgctaaaggattcacacagttaccagaatgcccgatttgggtcctccattgcctcagttcgagacctcaaccaggattcctacaatgacgtggtggtgggagcccccctggaggacaaccacgcaggagccatctacatcttccacggcttccgaggcagcatcctgaagacacctaagcagagaatcacagcctcagagctggctaccggcctccagtattttggctgcagcatccacgggcaattggacctcaatgaggatgggctcatcgacctggcagtgggagcccttggcaacgctgtgattctgtggtcccgcccagtggttcagatcaatgccagcctccactttgagccatccaagatcaacatcttccacagagactgcaagcgcagtggcagggatgccacctgcctggccgccttcctctgcttcacgcccatcttcctggcaccccatttccaaacaacaactgttggcatcagatacaacgccaccatggatgagaggcggtatacaccgagggcccacctggacgagggcggggaccgattcaccaacagagccgtactgctctcctccggccaggagctctgtgagcggatcaacttccatgtcctggacactgctgactacgtgaagccagtgaccttctcagtcgagtattccctggaggaccctgaccatggccccatgctggacgacggctggcccaccactctcagagtctcggtgcccttctggaacggctgcaatgaggatgagcactgtgtccctgaccttgtgttggatgcccggagtgacctgcccacggccatggagtactgccagagggtgctgaggaagcctgcgcaggactgctccgcatacacgctgtccttcgacaccacagtcttcatcatagagagcacacgccagcgagtggcggtggaggccacactggagaacaggggcgagaacgcctacagcacggtcctaaatatctcgcagtcagcaaacctgcagtttgccagcttgatccagaaggaggactcagacggtagcattgagtgtgtgaacgaggagaggaggctccagaagcaagtctgcaacgtcagctatcccttcttccgggccaaggccaaggtggctttccgtcttgattttgagttcagcaaatccatcttcctacaccacctggagatcgagctcgctgcaggcagtgacagtaatgagcgggacagcaccaaggaagacaacgtggcccccttacgcttccacctcaaatacgaggctgacgtcctcttcaccaggagcagcagcctgagccactacgaggtcaagcccaacagctcgctggagagatacgatggtatcgggcctcccttcagctgcatcttcaggatccagaacttgggcttgttccccatccacgggatgatgatgaagatcaccattcccatcgccaccaggagcggcaaccgcctactgaagctgagggacttcctcacggacgaggtggcgaacacgtcctgtaacatctggggcaatagcactgagtaccggcccaccccagtggaggaagacttgcgtcgtgctccacagctgaatcacagcaactctgatgtcgtctccatcaactgcaatatacggctggtccccaaccaggaaatcaatttccatctactggggaacctgtggttgaggtccctaaaagcactcaagtacaaatccatgaaaatcatggtcaacgcagccttgcagaggcagttccacagccccttcatcttccgtgaggaggatcccagccgccagatcgtgtttgagatctccaagcaagaggactggcaggtccccatctggatcattgtaggcagcaccctggggggcctcctactgctggccctgctggtcctggcactgtggaagctcggcttctttagaagtgccaggcgcaggagggagcctggtctggaccccacccccaaagtgctggagtgaggctccagaggagactttgagttgatgggggccaggacaccagtccaggtagtgttgagacccaggcctgtggccccaccgagctggagcggagaggaagccagctggctttgcacttgacctcatctcccgagcaatggcgcctgctccctccagaatggaactcaagctggttttaagtggaactgccctactgggagactgggacacctttaacacagacccctagggatttaaagggacacccctacacacacccaggcccatgccaaggcctccctcaggctctgtggagggcatttgctgccccagctactaaggtgctaggaattcgtaatcatccccatcctccagagaaacccagggaggaagactgtaaatacgaacccaatctgcacactccaggcctctagttccagaaggatccaagacaaaacagatctgaattctgcccttttctctcacccatcccacccctccattggctcccaagtcacacccactcccttccccatagataggcccctggggctcccgaagaatgaacccaagagcaagggcttgatggtgacagctgcaagccagggatgaagaaagactctgagatgtggagactgatggccaggcaagtgggaccaggatactggacgctgtcctgagatgagaggtagccgggctctgcacccacgtgcattcacattgaccgcaactcacacattcccccaccagctgcagccccttgctctcagctgccaaccctcccgggtcacttttgttcccaggtacctcatgggaagcatgtggatgacacaatccctggggctgtgcattcccacgtcttcttgctgcagcctgcccctagacatggacgcaccggcctggctgcagctgggcagcaggggtaggggtagggagcctcccctccctgtatcaccccctccctacacacacacacacacacacacacacacacacacacacacacacacacacacacacacactgcctcccatccttccctcatgcccgccagtgcacagggaagggcttggccagcgctgttgaggggtcccctctggaatgcactgaataaagcacgtgcaaggactcccggagcctgtgcagccttggtggcaaatatctcatctgccggcccccaggacaagtggtatgaccagtgataatgccccaaggacaaggggcgtgcctggcgcccagtggagtaatttatgccttagtcttgttttgaggtagaaatgcaagggggacacatgaaaggcatcagtccccctgtgcatagtacgacctttactgtcgtatttttgaaaaattaaaaatacagtgtttaaaaacaaccaagcactgacatcccattctgtgggcagagcatatcacagtgagccatactcccctttgaaggagaggaagtagaatgagggagttccttgcttcctcccccctacctctacatgtcagaagggactcatccaccatttgctgcccacaacatgccctcctagtggctgcctggcctccgtgtgacgtctccagtggtggagcgctccctctcccaagatcacccttccatctatggccagtgtggacggttaggacctaaatgtttcactgtagcttctgcccttggttccagctcttccctctcacgcctcccagacttctccaggccggtttcattgttaaccgtcttacactctgacatcagccaaggcgtctccattctgttcttgtgccattcatgtcttggattcccagtaagtagaaccttggaaataatttgatcttgtttttgcataaatgaggacactcagaaccaggaagagccctaggctcccacagcaaaaccaaaactaaacccaggactgctatttcccaagccagattctgttattcgagcccagccttagaagggcttgatgtggagcaaaaggtgaaaatggtgaaactaaaatttgagtatcaaaacccattgccttctaatagaatcagaaggaaatgttgctaaatcatattccatttccgtcatcactcttatgaatggggtaacctggctaaatgagaattaatgaacccacactcataagttttcattgacttagcaccaagtcgtccatcaaatatcatcagatctgagaatgctcttatggatatctgatttttagaggctggcattcatatttttaaaaactgccacctgtgaccacactgcaggccaaacagaatgtacctgctggtcagatgcagcccagaggtcactgaattgcaacctctggactctcggtcagaggcaagcagcccttattccagaactccacagtccttcacacccttccccagacctacaccaagaccaactaagtggtcaaaaggtggacaaactgagagttgtatcaaggcccttagcctctcaatttgttatcaagtttccctttctgaatctatttaccctgaagtataaatacccaagatgagccttaagagtgcctggtagagcaaacaaagatgcatcttatagggagcaaagtctatgctaacgcagtgtttctcaatcctggctgcacctttgaaccacgggagctttaaaagtgaccactgcaagggccctacccactatggatcccaatttcattggttgggagaggggccaagtttgtttccaacttccccagatgactctaatggctgagagttgcaatcaacaggtaagtgaatatccaggctgtaagatgaagaaagagggggttgtgcccaagcccactgtgcctcataaagcagatgatctctgcagcgctgcgcttctcaaagagtggtcccaggactgcctcagtcagaccacagactcctaagttcctcctcagacttcatggatccaagctctgtgaggtaattctaagcacattaaacttgtagaacagccatctggatttaatattacataatagctataatattctgctattctctaatcttcaatgtcagtttcttaaactgtcaggcctgtctttagatgcccttcaactgtgctggggactatcttgatggcagccagcaaagaaaatcagcaaaaaccccagtggagtttctgggttttacttttgttaaggaaggtgatggtttcttgacatgacaggtatctaggtggaaagggcaaagtgctaatgcaaacacaatggagacactatggaatagctctgcctagggacatgtggaagagcttctaggagacagtgtggacctttccatccctagaggtcttcacaagataaattcctacctccgtcagtattcaaaaggttttagcatcaatactgtctgagaataagacattagacttgagtcagtcccctggcttcaatcccaggatgccaagcagcctctaatggagaccgctggcttaatcgtgctcctttcctggcataacaactcactgcacccatgcctcaccaccacgaagcagtctcctcaccacccaaatgtgccttgggtgacttaaatacagccattagtatgaatggtcccctgtttttattcaacaccacaccagtctttgcttttaccttcggctaatgtggttccagccttttatcctgcactccttcttataatttaaaaaaaaaaaaaactcccctactatctttatgttaatattaacatcaactaggttcttctcaaaggacagccaggcctaactggccacgttaaaatctgcacagtgcttttgtgtcactgtctattctattagtttcaacatcatgctaaaataggacagcatgttccaaaactgaaactgaaacaggaacggagccttgctgatttagcatgaggagggaattgtaagccttgcacctggacactaaaacttttcaataagatgtatgctaagccgtacctagcaaacttaccaggtccaaagtagagtacaagcagaaagttatttttaaaggatgggcactatccttgagggacttaccctttctaatcagctttgcatggtttgttttgagacagtgtctcactctgttgcccaggctagagtgcagcggcaccatcacagctcacggcagcctctgcctcccgggctcaagcaatcccacctcagtttcccaagtagctgggactacaggcacacaccacactcagctaattttagtattttttgtagagacagggtctcgccatgttgcccaggctggtctcaaactcctggattatctccctggccctgcattaaaaaagatgtgcaacaacttagtgatgtgtctgaaatgttttcagaaggtggcccaagtcagagtcaaaaaatttttttatttggaaaattagaggaaatacagaaaatcaaatttcaaatagatgcatctaaatggagaacaagcttatcaaggacagagtccatctttcttatttttatttttgagacagggtcttgctctgtcacccaggctagagtgcagcggcacaatcacagctccctgcagcctcgacctcctggacttcagtgatcctcccacctcagcctcttgagtagctgggactacagacatgcaccaccatgcccagctaattttttttttaattttgtgcagagagggggtctcactttgttgcccacactggtctctcttatttttgtatgcatatctgtggtgcagtgcctgaaatacagtaggtgttcaataagcgccaacatgcaagagtatcttgccattgattaaggcaaaagcaaaaccccagtccgcccctctgatggactgagcacaccaaatttctaaagcacaggcaaattagaaaatataattttgtctaaacttgccaacaagctaaggttttgtgaaccacctaaaatttgcctctctcatactgaaattttctaggtcaagtatctgaaggaatacactactgccagtattttctttggtgatctgtcatatacagcagacattacttgaaacaaagaaaaaaatgttttaaaacctgtctggatgatttccgcagtctcactaggttattgcagccagggagtgacctagcagagatctgaaggtgagcttccctagtactggcatctcacagtgaaagagcactgttcagtgggtcaagagacccagagcctactctcagttacgacacacatagtccttgtgtggcctttctgggcttgtgtcctgaactataaaatgagagggtggcactaaatgtttttttcagatctctatagaggctggaatggccacagagaatctaaatttgaaaacaaacatgtcctgagggtgtgctccaataccaccctttaatactctcctgagatgtgaaggctggaaatgagaatgccatattattgttacttgcaaacgattagtgtatctgggacatccaaaagaagtaactgaaaatttatttctttaaaaacaaaaaaaaccattacagtgcttttgtaaaaacattaatatttagaagtacgtagtggtaataaaaggaaaatagttgtaagaccttcattaaaaagaaaaacctaaaaaaaaaaacaaaacaaaactctggatacaggtgtatgatttacctaaccagacatagctttcttttggataaaaaaaaaaaaaaaaaaaaagctcagaagtgcagaactgtacagatgtccctaaatctattaattcaatgctaaacgaaataatctcttaacatgataaaattacaccaaacttcatctggaaaaataaacacgtaataatgaaaaaagttagccactcccacctccccacttaaaaaagacaaatgaagaaatactagtccaaggccaggtgtggtggctcacatctgtaatcccaacactttgagaggctgaggtgggaggactgcttgaacccaggagttcaagaccagcctaggcatcatggcaaaaccccatctctacaaaaaataccaaaataaaaagaattagctgggcatggtggcacatacctgtagtcccagctacttgggaggctgaggtgagaggatcacttgagcccggaagatcaaggcgacagtaagccatgatggcaccactgcactccagcctgggtgacagaatgaaaccctgtctcaaaaaacaaacaaacaaaaaccaaacaaattataggaaaatcaacattttaaaccaaagaagagaaggagaaagaagggaagggaagccataaaagtgtctttttcaaatagatcatgggggaaaaaaaaaaaaagtatgacttggaatagagacagccttacaagcaggatctaaaactcagaatccatttttttaaattgtgataaatttgactatagaaaaatgtaaactttggatacaaaagtaccatatttaaagtaaataagctacaactattacatgacagagaaaatgtcctcaaacttctaaggaacttctaacaagtagaaaaaaaacacacacaaccccaaagcaaacaccaatagtcaataaatatatgaaagtgttcaatgttactcataataaaggcatacaaatcaaacc

SEQ ID NO: 143215 - DNA, 7869 bp, Homo sapiens
  Payload ID: 8295
  Gene Symbol: ITGA2
  Gene Name: integrin, alpha 2 (CD49B, alpha 2 subunit of VLA-2 receptor)
  Uniprot ID: P17301
  ENST ID: ENST00000296585
  CDS Start-End: 144-3689
ttttccctgctctcaccgggcgggggagagaagccctctggacagcttctagagtgtgcaggttctcgtatccctcggccaagggtatcctctgcaaacctctgcaaacccagcgcaactacggtcccccggtcagacccaggatggggccagaacggacaggggccgcgccgctgccgctgctgctggtgttagcgctcagtcaaggcattttaaattgttgtttggcctacaatgttggtctcccagaagcaaaaatattttccggtccttcaagtgaacagtttggctatgcagtgcagcagtttataaatccaaaaggcaactggttactggttggttcaccctggagtggctttcctgagaaccgaatgggagatgtgtataaatgtcctgttgacctatccactgccacatgtgaaaaactaaatttgcaaacttcaacaagcattccaaatgttactgagatgaaaaccaacatgagcctcggcttgatcctcaccaggaacatgggaactggaggttttctcacatgtggtcctctgtgggcacagcaatgtgggaatcagtattacacaacgggtgtgtgttctgacatcagtcctgattttcagctctcagccagcttctcacctgcaactcagccctgcccttccctcatagatgttgtggttgtgtgtgatgaatcaaatagtatttatccttgggatgcagtaaagaattttttggaaaaatttgtacaaggcctggatataggccccacaaagacacaggtggggttaattcagtatgccaataatccaagagttgtgtttaacttgaacacatataaaaccaaagaagaaatgattgtagcaacatcccagacatcccaatatggtggggacctcacaaacacattcggagcaattcaatatgcaagaaaatatgcttattcagcagcttctggtgggcgacgaagtgctacgaaagtaatggtagttgtaactgacggtgaatcacatgatggttcaatgttgaaagctgtgattgatcaatgcaaccatgacaatatactgaggtttggcatagcagttcttgggtacttaaacagaaacgcccttgatactaaaaatttaataaaagaaataaaagcaatcgctagtattccaacagaaagatactttttcaatgtgtctgatgaagcagctctactagaaaaggctgggacattaggagaacaaattttcagcattgaaggtactgttcaaggaggagacaactttcagatggaaatgtcacaagtgggattcagtgcagattactcttctcaaaatgatattctgatgctgggtgcagtgggagcttttggctggagtgggaccattgtccagaagacatctcatggccatttgatctttcctaaacaagcctttgaccaaattctgcaggacagaaatcacagttcatatttaggttactctgtggctgcaatttctactggagaaagcactcactttgttgctggtgctcctcgggcaaattataccggccagatagtgctatatagtgtgaatgagaatggcaatatcacggttattcaggctcaccgaggtgaccagattggctcctattttggtagtgtgctgtgttcagttgatgtggataaagacaccattacagacgtgctcttggtaggtgcaccaatgtacatgagtgacctaaagaaagaggaaggaagagtctacctgtttactatcaaagagggcattttgggtcagcaccaatttcttgaaggccccgagggcattgaaaacactcgatttggttcagcaattgcagctctttcagacatcaacatggatggctttaatgatgtgattgttggttcaccactagaaaatcagaattctggagctgtatacatttacaatggtcatcagggcactatccgcacaaagtattcccagaaaatcttgggatccgatggagcctttaggagccatctccagtactttgggaggtccttggatggctatggagatttaaatggggattccatcaccgatgtgtctattggtgcctttggacaagtggttcaactctggtcacaaagtattgctgatgtagctatagaagcttcattcacaccagaaaaaatcactttggtcaacaagaatgctcagataattctcaaactctgcttcagtgcaaagttcagacctactaagcaaaacaatcaagtggccattgtatataacatcacacttgatgcagatggattttcatccagagtaacctccagggggttatttaaagaaaacaatgaaaggtgcctgcagaagaatatggtagtaaatcaagcacagagttgccccgagcacatcatttatatacaggagccctctgatgttgtcaactctttggatttgcgtgtggacatcagtctggaaaaccctggcactagccctgcccttgaagcctattctgagactgccaaggtcttcagtattcctttccacaaagactgtggtgaggacggactttgcatttctgatctagtcctagatgtccgacaaataccagctgctcaagaacaaccctttattgtcagcaaccaaaacaaaaggttaacattttcagtaacgctgaaaaataaaagggaaagtgcatacaacactggaattgttgttgatttttcagaaaacttgttttttgcatcattctccctgccggttgatgggacagaagtaacatgccaggtggctgcatctcagaagtctgttgcctgcgatgtaggctaccctgctttaaagagagaacaacaggtgacttttactattaactttgacttcaatcttcaaaaccttcagaatcaggcgtctctcagtttccaagccttaagtgaaagccaagaagaaaacaaggctgataatttggtcaacctcaaaattcctctcctgtatgatgctgaaattcacttaacaagatctaccaacataaatttttatgaaatctcttcggatgggaatgttccttcaatcgtgcacagttttgaagatgttggtccaaaattcatcttctccctgaaggtaacaacaggaagtgttccagtaagcatggcaactgtaatcatccacatccctcagtataccaaagaaaagaacccactgatgtacctaactggggtgcaaacagacaaggctggtgacatcagttgtaatgcagatatcaatccactgaaaataggacaaacatcttcttctgtatctttcaaaagtgaaaatttcaggcacaccaaagaattgaactgcagaactgcttcctgtagtaatgttacctgctggttgaaagacgttcacatgaaaggagaatactttgttaatgtgactaccagaatttggaacgggactttcgcatcatcaacgttccagacagtacagctaacggcagctgcagaaatcaacacctataaccctgagatatatgtgattgaagataacactgttacgattcccctgatgataatgaaacctgatgagaaagccgaagtaccaacaggagttataataggaagtataattgctggaatccttttgctgttagctctggttgcaattttatggaagctcggcttcttcaaaagaaaatatgaaaagatgaccaaaaatccagatgagattgatgagaccacagagctcagtagctgaaccagcagacctacctgcagtgggaaccggcagcatcccagccagggtttgctgtttgcgtgaatggatttctttttaaatcccatattttttttatcatgtcgtaggtaaactaacctggtattttaagagaaaactgcaggtcagtttggaatgaagaaattgtggggggtgggggaggtgcggggggcaggtagggaaataatagggaaaatacctattttatatgatgggggaaaaaaagtaatctttaaactggctggcccagagtttacattctaatttgcattgtgtcagaaacatgaaatgcttccaagcatgacaacttttaaagaaaaatatgatactctcagattttaagggggaaaactgttctctttaaaatatttgtctttaaacagcaactacagaagtggaagtgcttgatatgtaagtacttccacttgtgtatattttaatgaatattgatgttaacaagaggggaaaacaaaacacaggttttttcaatttatgctgctcatccaaagttgccacagatgatacttccaagtgataattttatttataaactaggtaaaatttgttgttggttccttttagaccacggctgccccttccacaccccatcttgctctaatgatcaaaacatgcttgaataactgagcttagagtatacctcctatatgtccatttaagttaggagagggggcgatatagagaataaggcacaaaattttgtttaaaactcagaatataacatgtaaaatcccatctgctagaagcccatcctgtgccagaggaaggaaaaggaggaaatttcctttctcttttaggaggcacaacagttctcttctaggatttgtttggctgactggcagtaacctagtgaatttctgaaagatgagtaatttctttggcaaccttcctcctcccttactgaaccactctcccacctcctggtggtaccattattatagaagccctctacagcctgactttctctccagcggtccaaagttatcccctcctttacccctcatccaaagttcccactccttcaggacagctgctgtgcattagatattaggggggaaagtcatctgtttaatttacacacttgcatgaattactgtatataaactccttaacttcagggagctattttcatttagtgctaaacaagtaagaaaaataagctcgagtgaatttctaaatgttggaatgttatgggatgtaaacaatgtaaagtaagacatctcaggatttcaccagaagttacagatgaggcactggaagccaccaaattagcaggtgcaccttctgtggctgtcttgtttctgaagtacttaaacttccacaagagtgaatttgacctaggcaagtttgttcaaaaggtagatcctgagatgatttggtcagattgggataaggcccagcaatctgcattttaacaagcaccccagtcactaggatgcagatggaccacactttgagaaacaccacccatttctactttttgcaccttattttctctgttcctgagcccccacattctctaggagaaacttagaggaaaagggcacagacactacatatctaaagctttggacaagtccttgacctctataaacttcagagtcctcattataaaatgggaagactgagctggagttcagcagtgatgcttttagttttaaaagtctatgatctggacttcctataatacaaatacacaatcctccaagaatttgacttggaaaaaaatgtcaaaggaaaacaggttatctgcccatgtgcatatggacaaccttgactaccctggcctggcccgtggtggcagtccagggctatctgtactgtttacagaattactttgtagttgacaacacaaaacaaacaaaaaaggcataaaatgccagcggtttatagaaaaaacagcatggtattctccagttaggtatgccagagtccaattcttttaacagctgtgagaatttgctgcttcattccaacaaaattttatttaaaaaaaaaaaaaaaagactggagaaactagtcattagcttgataaagaatatttaacagctagtggtgctggtgtgtacctgaagctccagctacttgagagactgagacaggaagatcgcttgagcccaggagttcaagtccagcctaagcaacatagcaagaccctgtctcaaaaaaatgactatttaaaaagacaatgtggccaggcacggtggctcacacctgtaatcccaacactttgggaggctgaggccggtggatcacgaggtcaggagtttgagactagcctggccaacatggtgaaaccccatctctaataatataaaaattagctgggcgtagtagcaggtgcctgtaatcccagttactcgggaagctgaggcaggagaatcacttgaacccgggaggcagaggtttcagtgagccgagatcgcgccactgcactccagcctgggtgacagggcaagactctgtctcaaacaaacaaacaaaaaaaaagttagtactgtatatgtaaatactagcttttcaatgtgctatacaaacaattatagcacatccttccttttactctgtctcacctcctttaggtgagtacttccttaaataagtgctaaacatacatatacggaacttgaaagctttggttagccttgccttaggtaatcagcctagtttacactgtttccagggagtagttgaattactataaaccattagccacttgtctctgcaccatttatcacaccaggacagggtctctcaacctgggcgctactgtcatttggggccaggtgattcttccttgcaggggctgtcctgtaccttgtaggacagcagccctgtcctagaaggtatgtttagcagcattcctggcctctagctacccgatgccagagcatgctccccccgcagtcatgacaatcaaaaaatgtctccagacattgtcaaatgcctcctggggggcagtatttctcaagcacttttaagcaaaggtaagtattcatacaagaaatttagggggaaaaaacattgtttaaataaaagctatgtgttcctattcaacaatatttttgctttaaaagtaagtagagggcataaaagatgtcatattcaaatttccatttcataaatggtgtacagacaaggtctatagaatgtggtaaaaacttgactgcaacacaaggcttataaaatagtaagatagtaaaatagcttatgaagaaactacagagatttaaaattgtgcatgactcatttcagcagcaaaataagaactcctaactgaacagaaatttttctacctagcaatgttattcttgtaaaatagttacctattaaaactgtgaagagtaaaactaaagccaatttattatagtcacacaagtgattatactaaaaattattataaaggttataattttataatgtatttacctgtcctgatatatagctataacccaatatatgaaaatctcaaaaattaagacatcatcatacagaaggcaggattccttaaactgagatccctgatccatctttaatatttcaatttgcacacataaaacaatgcccttttgtgtacattcaggcatacccattttaatcaatttgaaaggttaatttaaacctctagaggtgaatgagaaacatgggggaaaagtatgaaataggtgaaaatcttaactatttctttgaactctaaagactgaaactgtagccattatgtaaataaagtttcatatgtacctgtttattttggcagattaagtcaaaatatgaatgtatatattgcataactatgttagaattgtatatattttaaagaaattgtcttggatattttcctttatacataatagataagtcttttttcaaatgtggtgtttgatgtttttgattaaatgtgttttgcctctttccacaaaaactgtaaaaataaatgcatgtttgtacaaaaagttgcagaattcatttgatttatgagaaacaaaaattaaattgtagtcaacagttagtagtttttctcatatccaagtataacaaacagaaaagtttcattattgtaacccacttttttcataccacattattgaatattgttacaattgttttgaaaataaagccattttctttgggcttttataagtta

SEQ ID NO: 143216 - DNA, 3501 bp, Homo sapiens
  Payload ID: 8295
  Gene Symbol: ITGA2
  Gene Name: integrin, alpha 2 (CD49B, alpha 2 subunit of VLA-2 receptor)
  ENST ID: ENST00000513685
  CDS Start-End: 30-194
gcaactacggtcccccggtcagacccaggatggggccagaacggacaggggccgcgccgctgccgctgctgctggtgttagcgctcagtcaaggttactggttggttcaccctggagtggctttcctgagaaccgaatgggagatgtgtataaatgtcctgttgacctatccactgccacatgtgaaaaactaaatttgcaaacttcaacaagcattccaaatgttactgagatgaaaaccaacatgagcctcggcttgatcctcaccaggaacatgggaactggaggttttctcacatgtggtcctctgtgggcacagcaatgtgggaatcagtattacacaacgggtgtgtgttctgacatcagtcctgattttcagctctcagccagcttctcacctgcaactcagccctgcccttccctcatagatgttgtggttgtgtgtgatgaatcaaatagtatttatccttgggatgcagtaaagaattttttggaaaaatttgtacaaggcctggatataggccccacaaagacacaggtggggttaattcagtatgccaataatccaagagttgtgtttaacttgaacacatataaaaccaaagaagaaatgattgtagcaacatcccagacatcccaatatggtggggacctcacaaacacattcggagcaattcaatatgcaagaaaatatgcttattcagcagcttctggtgggcgacgaagtgctacgaaagtaatggtagttgtaactgacggtgaatcacatgatggttcaatgttgaaagctgtgattgatcaatgcaaccatgacaatatactgaggtttggcatagcagttcttgggtacttaaacagaaacgcccttgatactaaaaatttaataaaagaaataaaagcaatcgctagtattccaacagaaagatactttttcaatgtgtctgatgaagcagctctactagaaaaggctgggacattaggagaacaaattttcagcattgaaggtactgttcaaggaggagacaactttcagatggaaatgtcacaagtgggattcagtgcagattactcttctcaaaatgatattctgatgctgggtgcagtgggagcttttggctggagtgggaccattgtccagaagacatctcatggccatttgatctttcctaaacaagcctttgaccaaattctgcaggacagaaatcacagttcatatttaggttactctgtggctgcaatttctactggagaaagcactcactttgttgctggtgctcctcgggcaaattataccggccagatagtgctatatagtgtgaatgagaatggcaatatcacggttattcaggctcaccgaggtgaccagattggctcctattttggtagtgtgctgtgttcagttgatgtggataaagacaccattacagacgtgctcttggtaggtgcaccaatgtacatgagtgacctaaagaaagaggaaggaagagtctacctgtttactatcaaagagggcattttgggtcagcaccaatttcttgaaggccccgagggcattgaaaacactcgatttggttcagcaattgcagctctttcagacatcaacatggatggctttaatgatgtgattgttggttcaccactagaaaatcagaattctggagctgtatacatttacaatggtcatcagggcactatccgcacaaagtattcccagaaaatcttgggatccgatggagcctttaggagccatctccagtactttgggaggtccttggatggctatggagatttaaatggggattccatcaccgatgtgtctattggtgcctttggacaagtggttcaactctggtcacaaagtattgctgatgtagctatagaagcttcattcacaccagaaaaaatcactttggtcaacaagaatgctcagataattctcaaactctgcttcagtgcaaagttcagacctactaagcaaaacaatcaagtggccattgtatataacatcacacttgatgcagatggattttcatccagagtaacctccagggggttatttaaagaaaacaatgaaaggtgcctgcagaagaatatggtagtaaatcaagcacagagttgccccgagcacatcatttatatacaggagccctctgatgttgtcaactctttggatttgcgtgtggacatcagtctggaaaaccctggcactagccctgcccttgaagcctattctgagactgccaaggtcttcagtattcctttccacaaagactgtggtgaggacggactttgcatttctgatctagtcctagatgtccgacaaataccagctgctcaagaacaaccctttattgtcagcaaccaaaacaaaaggttaacattttcagtaacgctgaaaaataaaagggaaagtgcatacaacactggaattgttgttgatttttcagaaaacttgttttttgcatcattctccctgccggttgatgggacagaagtaacatgccaggtggctgcatctcagaagtctgttgcctgcgatgtaggctaccctgctttaaagagagaacaacaggtgacttttactattaactttgacttcaatcttcaaaaccttcagaatcaggcgtctctcagtttccaagccttaagtgaaagccaagaagaaaacaaggctgataatttggtcaacctcaaaattcctctcctgtatgatgctgaaattcacttaacaagatctaccaacataaatttttatgaaatctcttcggatgggaatgttccttcaatcgtgcacagttttgaagatgttggtccaaaattcatcttctccctgaaggtaacaacaggaagtgttccagtaagcatggcaactgtaatcatccacatccctcagtataccaaagaaaagaacccactgatgtacctaactggggtgcaaacagacaaggctggtgacatcagttgtaatgcagatatcaatccactgaaaataggacaaacatcttcttctgtatctttcaaaagtgaaaatttcaggcacaccaaagaattgaactgcagaactgcttcctgtagtaatgttacctgctggttgaaagacgttcacatgaaaggagaatactttgttaatgtgactaccagaatttggaacgggactttcgcatcatcaacgttccagacagtacagctaacggcagctgcagaaatcaacacctataaccctgagatatatgtgattgaagataacactgttacgattcccctgatgataatgaaacctgatgagaaagccgaagtaccaacaggagttataataggaagtataattgctggaatccttttgctgttagctctggttgcaattttatggaagctcggcttcttcaaaagaaaatatgaaaagatgaccaaaaatccagatgagattgatgagaccacagagctcagtagctgaaccagcagacctacctgcagtgggaaccggcagcatcccagccaggg

SEQ ID NO: 143217 - DNA, 3530 bp, Homo sapiens
  Payload ID: 8295
  Gene Symbol: ITGA2
  Gene Name: integrin, alpha 2 (CD49B, alpha 2 subunit of VLA-2 receptor)
  ENST ID: ENST00000510722
  CDS Start-End: 30-2858
gcaactacggtcccccggtcagacccaggatggggccagaacggacaggggccgcgccgctgccgctgctgctggtgttagcgctcagtcaaggcattttaaattgttgtttggcctacaatgttggtctcccagaagcaaaaatattttccggtccttcaagtgaacagtttggctatgcagtgcagcagtttataaatccaaaaggcaactggttactggttggttcaccctggagtggctttcctgagaaccgaatgggagatgtgtataaatgtcctgttgacctatccactgccacatgtgaaaaactaaatttgcaaacttcaacaagcattccaaatgttactgagatgaaaaccaacatgagcctcggcttgatcctcaccaggaacatgggaactggaggttttctcacatgtggtcctctgtgggcacagcaatgtgggaatcagtattacacaacgggtgtgtgttctgacatcagtcctgattttcagctctcagccagcttctcacctgcaactcagccctgcccttccctcatagatgttgtggttgtgtgtgatgaatcaaatagtatttatccttgggatgcagtaaagaattttttggaaaaatttgtacaaggcctggatataggccccacaaagacacaggtggggttaattcagtatgccaataatccaagagttgtgtttaacttgaacacatataaaaccaaagaagaaatgattgtagcaacatcccagacatcccaatatggtggggacctcacaaacacattcggagcaattcaatatgcaagaaaatatgcttattcagcagcttctggtgggcgacgaagtgctacgaaagtaatggtagttgtaactgacggtgaatcacatgatggttcaatgttgaaagctgtgattgatcaatgcaaccatgacaatatactgaggtttggcatagcagttcttgggtacttaaacagaaacgcccttgatactaaaaatttaataaaagaaataaaagcaatcgctagtattccaacagaaagatactttttcaatgtgtctgatgaagcagctctactagaaaaggctgggacattaggagaacaaattttcagcattgaaggtactgttcaaggaggagacaactttcagatggaaatgtcacaagtgggattcagtgcagattactcttctcaaaatgatattctgatgctgggtgcagtgggagcttttggctggagtgggaccattgtccagaagacatctcatggccatttgatctttcctaaacaagcctttgaccaaattctgcaggacagaaatcacagttcatatttaggttactctgtggctgcaatttctactggagaaagcactcactttgttgctggtgctcctcgggcaaattataccggccagatagtgctatatagtgtgaatgagaatggcaatatcacggttattcaggctcaccgaggtgaccagattggctcctattttggtagtgtgctgtgttcagttgatgtggataaagacaccattacagacgtgctcttggtaggtgcaccaatgtacatgagtgacctaaagaaagaggaaggaagagtctacctgtttactatcaaagagggcattttgggtcagcaccaatttcttgaaggccccgagggcattgaaaacactcgatttggttcagcaattgcagctctttcagacatcaacatggatggctttaatgatgtgattgttggttcaccactagaaaatcagaattctggagctgtatacatttacaatggtcatcagggcactatccgcacaaagtattcccagaaaatcttgggatccgatggagcctttaggagccatctccagtactttgggaggtccttggatggctatggagatttaaatggggattccatcaccgatgtgtctattggtgcctttggacaagtggttcaactctggtcacaaagtattgctgatgtagctatagaagcttcattcacaccagaaaaaatcactttggtcaacaagaatgctcagataattctcaaactctgcttcagtgcaaagttcagacctactaagcaaaacaatcaagtggccattgtatataacatcacacttgatgcagatggattttcatccagagtaacctccagggggttatttaaagaaaacaatgaaaggtgcctgcagaagaatatggtagtaaatcaagcacagagttgccccgagcacatcatttatatacaggagccctctgatgttgtcaactctttggatttgcgtgtggacatcagtctggaaaaccctggcactagccctgcccttgaagcctattctgagactgccaaggtcttcagtattcctttccacaaagactgtggtgaggacggactttgcatttctgatctagtcctagatgtccgacaaataccagctgctcaagaacaaccctttattgtcagcaaccaaaacaaaaggttaacattttcagtaacgctgaaaaataaaagggaaagtgcatacaacactggaattgttgttgatttttcagaaaacttgttttttgcatcattctccctgccggttgatgggacagaagtaacatgccaggtggctgcatctcagaagtctgttgcctgcgatgtaggctaccctgctttaaagagagaacaacaggtgacttttactattaactttgacttcaatcttcaaaaccttcagaatcaggcgtctctcagtttccaagccttaagtgaaagccaagaagaaaacaaggctgataatttggtcaacctcaaaattcctctcctgtatgatgctgaaattcacttaacaaggtaacaacaggaagtgttccagtaagcatggcaactgtaatcatccacatccctcagtataccaaagaaaagaacccactgatgtacctaactggggtgcaaacagacaaggctggtgacatcagttgtaatgcagatatcaatccactgaaaataggacaaacatcttcttctgtatctttcaaaagtgaaaatttcaggcacaccaaagaattgaactgcagaactgcttcctgtagtaatgttacctgctggttgaaagacgttcacatgaaaggagaatactttgttaatgtgactaccagaatttggaacgggactttcgcatcatcaacgttccagacagtacagctaacggcagctgcagaaatcaacacctataaccctgagatatatgtgattgaagataacactgttacgattcccctgatgataatgaaacctgatgagaaagccgaagtaccaacaggagttataataggaagtataattgctggaatccttttgctgttagctctggttgcaattttatggaagctcggcttcttcaaaagaaaatatgaaaagatgaccaaaaatccagatgagattgatgagaccacagagctcagtagctgaaccagcagacctacctgcagtgggaaccggcagcatcccagccagggtttgctgtttg

SEQ ID NO: 143218 - DNA, 3487 bp, Homo sapiens
  Payload ID: 8295
  Gene Symbol: ITGA2
  Gene Name: integrin, alpha 2 (CD49B, alpha 2 subunit of VLA-2 receptor)
  ENST ID: ENST00000509814
  CDS Start-End: 30-2477
gcaactacggtcccccggtcagacccaggatggggccagaacggacaggggccgcgccgctgccgctgctgctggtgttagcgctcagtcaaggcattttaaattgttgtttggcctacaatgttggtctcccagaagcaaaaatattttccggtccttcaagtgaacagtttggctatgcagtgcagcagtttataaatccaaaaggcaactggttactggttggttcaccctggagtggctttcctgagaaccgaatgggagatgtgtataaatgtcctgttgacctatccactgccacatgtgaaaaactaaatttgcaaacttcaacaagcattccaaatgttactgagatgaaaaccaacatgagcctcggcttgatcctcaccaggaacatgggaactggaggttttctcacatgtggtcctctgtgggcacagcaatgtgggaatcagtattacacaacgggtgtgtgttctgacatcagtcctgattttcagctctcagccagcttctcacctgcaactcagccctgcccttccctcatagatgttgtggttgtgtgtgatgaatcaaatagtatttatccttgggatgcagtaaagaattttttggaaaaatttgtacaaggcctggatataggccccacaaagacacaggtggggttaattcagtatgccaataatccaagagttgtgtttaacttgaacacatataaaaccaaagaagaaatgattgtagcaacatcccagacatcccaatatggtggggacctcacaaacacattcggagcaattcaatatgcaagaaaatatgcttattcagcagcttctggtgggcgacgaagtgctacgaaagtaatggtagttgtaactgacggtgaatcacatgatggttcaatgttgaaagctgtgattgatcaatgcaaccatgacaatatactgaggtttggcatagcagttcttgggtacttaaacagaaacgcccttgatactaaaaatttaataaaagaaataaaagcaatcgctagtattccaacagaaagatactttttcaatgtgtctgatgaagcagctctactagaaaaggctgggacattaggagaacaaattttcagcattgaaggtactgttcaaggaggagacaactttcagatggaaatgtcacaagtgggattcagtgcagattactcttctcaaaatgatattctgatgctgggtgcagtgggagcttttggctggagtgggaccattgtccagaagacatctcatggccatttgatctttcctaaacaagcctttgaccaaattctgcaggacagaaatcacagttcatatttaggttactctgtggctgcaatttctactggagaaagcactcactttgttgctggtgctcctcgggcaaattataccggccagatagtgctatatagtgtgaatgagaatggcaatatcacggttattcaggctcaccgaggtgaccagattggctcctattttggtagtgtgctgtgttcagttgatgtggataaagacaccattacagacgtgctcttggtaggtgcaccaatgtacatgagtgacctaaagaaagaggaaggaagagtctacctgtttactatcaaagagggcattttgggtcagcaccaatttcttgaaggccccgagggcattgaaaacactcgatttggttcagcaattgcagctctttcagacatcaacatggatggctttaatgatgtgattgttggttcaccactagaaaatcagaattctggagctgtatacatttacaatggtcatcagggcactatccgcacaaagtattcccagaaaatcttgggatccgatggagcctttaggagccatctccagtactttgggaggtccttggatggctatggagatttaaatggggattccatcaccgatgtgtctattggtgcctttggacaagtggttcaactctggtcacaaagtattgctgatgtagctatagaagcttcattcacaccagaaaaaatcactttggtcaacaagaatgctcagataattctcaaactctgcttcagtgcaaagttcagacctactaagcaaaacaatcaagtggccattgtatataacatcacacttgatgcagatggattttcatccagagtaacctccagggggttatttaaagaaaacaatgaaaggtgcctgcagaagaatatggtagtaaatcaagcacagagttgccccgagcacatcatttatatacaggagccctctgatgttgtcaactctttggatttgcgtgtggacatcagtctggaaaaccctggcactagccctgcccttgaagcctattctgagactgccaaggtcttcagtattcctttccacaaagactgtggtgaggacggactttgcatttctgatctagtcctagatgtccgacaaataccagctgctcagttgatgggacagaagtaacatgccaggtggctgcatctcagaagtctgttgcctgcgatgtaggctaccctgctttaaagagagaacaacaggtgacttttactattaactttgacttcaatcttcaaaaccttcagaatcaggcgtctctcagtttccaagccttaagtgaaagccaagaagaaaacaaggctgataatttggtcaacctcaaaattcctctcctgtatgatgctgaaattcacttaacaagatctaccaacataaatttttatgaaatctcttcggatgggaatgttccttcaatcgtgcacagttttgaagatgttggtccaaaattcatcttctccctgaaggtaacaacaggaagtgttccagtaagcatggcaactgtaatcatccacatccctcagtataccaaagaaaagaacccactgatgtacctaactggggtgcaaacagacaaggctggtgacatcagttgtaatgcagatatcaatccactgaaaataggacaaacatcttcttctgtatctttcaaaagtgaaaatttcaggcacaccaaagaattgaactgcagaactgcttcctgtagtaatgttacctgctggttgaaagacgttcacatgaaaggagaatactttgttaatgtgactaccagaatttggaacgggactttcgcatcatcaacgttccagacagtacagctaacggcagctgcagaaatcaacacctataaccctgagatatatgtgattgaagataacactgttacgattcccctgatgataatgaaacctgatgagaaagccgaagtaccaacaggagttataataggaagtataattgctggaatccttttgctgttagctctggttgcaattttatggaagctcggcttcttcaaaagaaaatatgaaaagatgaccaaaaatccagatgagattgatgagaccacagagctcagtagctgaaccagcagacctacctgcagtgggaaccggcagcatcccagccagggtttgctg

SEQ ID NO: 143219 - DNA, 3674 bp, Homo sapiens
  Payload ID: 8295
  Gene Symbol: ITGA2
  Gene Name: integrin, alpha 2 (CD49B, alpha 2 subunit of VLA-2 receptor)
  ENST ID: ENST00000509960
  CDS Start-End: 30-1955
gcaactacggtcccccggtcagacccaggatggggccagaacggacaggggccgcgccgctgccgctgctgctggtgttagcgctcagtcaaggcattttaaattgttgtttggcctacaatgttggtctcccagaagcaaaaatattttccggtccttcaagtgaacagtttggctatgcagtgcagcagtttataaatccaaaaggcaactggttactggttggttcaccctggagtggctttcctgagaaccgaatgggagatgtgtataaatgtcctgttgacctatccactgccacatgtgaaaaactaaatttgcaaacttcaacaagcattccaaatgttactgagatgaaaaccaacatgagcctcggcttgatcctcaccaggaacatgggaactggaggttttctcacatgtggtcctctgtgggcacagcaatgtgggaatcagtattacacaacgggtgtgtgttctgacatcagtcctgattttcagctctcagccagcttctcacctgcaactcagccctgcccttccctcatagatgttgtggttgtgtgtgatgaatcaaatagtatttatccttgggatgcagtaaagaattttttggaaaaatttgtacaaggcctggatataggccccacaaagacacaggtggggttaattcagtatgccaataatccaagagttgtgtttaacttgaacacatataaaaccaaagaagaaatgattgtagcaacatcccagacatcccaatatggtggggacctcacaaacacattcggagcaattcaatatgcaagaaaatatgcttattcagcagcttctggtgggcgacgaagtgctacgaaagtaatggtagttgtaactgacggtgaatcacatgatggttcaatgttgaaagctgtgattgatcaatgcaaccatgacaatatactgaggtttggcatagcagttcttgggtacttaaacagaaacgcccttgatactaaaaatttaataaaagaaataaaagcaatcgctagtattccaacagaaagatactttttcaatgtgtctgatgaagcagctctactagaaaaggctgggacattaggagaacaaattttcagcattgaaggtactgttcaaggaggagacaactttcagatggaaatgtcacaagtgggattcagtgcagattactcttctcaaaatgatattctgatgctgggtgcagtgggagcttttggctggagtgggaccattgtccagaagacatctcatggccatttgatctttcctaaacaagcctttgaccaaattctgcaggacagaaatcacagttcatatttaggttactctgtggctgcaatttctactggagaaagcactcactttgttgctggtgctcctcgggcaaattataccggccagatagtgctatatagtgtgaatgagaatggcaatatcacggttattcaggctcaccgaggtgaccagattggctcctattttggtagtgtgctgtgttcagttgatgtggataaagacaccattacagacgtgctcttggtaggtgcaccaatgtacatgagtgacctaaagaaagaggaaggaagagtctacctgtttactatcaaagagggcattttgggtcagcaccaatttcttgaaggccccgagggcattgaaaacactcgatttggttcagcaattgcagctctttcagacatcaacatggatggctttaatgatgtgattgttggttcaccactagaaaatcagaattctggagctgtatacatttacaatggtcatcagggcactatccgcacaaagtattcccagctgttgtgtactataatttcgtgtcaaacctgctcttttagaaaatcttgggatccgatggagcctttaggagccatctccagtactttgggaggtccttggatggctatggagatttaaatggggattccatcaccgatgtgtctattggtgcctttggacaagtggttcaactctggtcacaaagtattgctgatgtagctatagaagcttcattcacaccagaaaaaatcactttggtcaacaagaatgctcagataattctcaaactctgcttcagtgcaaagttcagacctactaagcaaaacaatcaagtggccattgtatataacatcacacttgatgcagatggattttcatccagagtaacctccagggggttatttaaagaaaacaatgaaaggtgcctgcagaagaatatggtagtaaatcaagcacagagttgccccgagcacatcatttatatacaggagccctctgatgttgtcaactctttggatttgcgtgtggacatcagtctggaaaaccctggcactagccctgcccttgaagcctattctgagactgccaaggtcttcagtattcctttccacaaagactgtggtgaggacggactttgcatttctgatctagtcctagatgtccgacaaataccagctgctcaagaacaaccctttattgtcagcaaccaaaacaaaaggttaacattttcagtaacgctgaaaaataaaagggaaagtgcatacaacactggaattgttgttgatttttcagaaaacttgttttttgcatcattctccctgccggttgatgggacagaagtaacatgccaggtggctgcatctcagaagtctgttgcctgcgatgtaggctaccctgctttaaagagagaacaacaggtgacttttactattaactttgacttcaatcttcaaaaccttcagaatcaggcgtctctcagtttccaagccttaagtgaaagccaagaagaaaacaaggctgataatttggtcaacctcaaaattcctctcctgtatgatgctgaaattcacttaacaagatctaccaacataaatttttatgaaatctcttcggatgggaatgttccttcaatcgtgcacagttttgaagatgttggtccaaaattcatcttctccctgaaggtaacaacaggaagtgttccagtaagcatggcaactgtaatcatccacatccctcagtataccaaagaaaagaacccactgatgtacctaactggggtgcaaacagacaaggctggtgacatcagttgtaatgcagatatcaatccactgaaaataggacaaacatcttcttctgtatctttcaaaagtgaaaatttcaggcacaccaaagaattgaactgcagaactgcttcctgtagtaatgttacctgctggttgaaagacgttcacatgaaaggagaatactttgttaatgtgactaccagaatttggaacgggactttcgcatcatcaacgttccagacagtacagctaacggcagctgcagaaatcaacacctataaccctgagatatatgtgattgaagataacactgttacgattcccctgatgataatgaaacctgatgagaaagccgaagtaccaacaggagttataataggaagtataattgctggaatccttttgctgttagctctggttgcaattttatggaagctcggcttcttcaaaagaaaatatgaaaagatgaccaaaaatccagatgagattgatgagaccacagagctcagtagctgaaccagcagacctacctgcagtgggaaccggcagcatcccagccagggtttgctgtttg

SEQ ID NO: 143220 - DNA, 3782 bp, Homo sapiens
  Payload ID: 8295
  Gene Symbol: ITGA2
  Gene Name: integrin, alpha 2 (CD49B, alpha 2 subunit of VLA-2 receptor)
  ENST ID: ENST00000503810
  CDS Start-End: 130-657
accgggcgggggagagaagccctctggacagcttctagagtgtgcaggttctcgtatccctcggccaagggtatcctctgcaaacctctgcaaacccagcgcaactacggtcccccggtcagacccaggatggggccagaacggacaggggccgcgccgctgccgctgctgctggtgttagcgctcagtcaaggcattttaaattgttgtttggcctacaatgttggtctcccagaagcaaaaatattttccggtccttcaagtgaacagtttggctatgcagtgcagcagtttataaatccaaaaggcaactggttactggttggttcaccctggagtggctttcctgagaaccgaatgggagatgtgtataaatgtcctgttgacctatccactgccacatgtgaaaaactaaatttgcaaacttcaacaagcattccaaatgttactgagatgaaaaccaacatgagcctcggcttgatcctcaccaggaacatgggaactggaggttttctcacatgtggtcctctgtgggcacagcaatgtgggaatcagtattacacaacgggtgtgtgttctgacatcagtcctgattttcagctctcagccagcttctcacctgcaactcagcgtggggttaattcagtatgccaataatccaagagttgtgtttaacttgaacacatataaaaccaaagaagaaatgattgtagcaacatcccagacatcccaatatggtggggacctcacaaacacattcggagcaattcaatatgcaagaaaatatgcttattcagcagcttctggtgggcgacgaagtgctacgaaagtaatggtagttgtaactgacggtgaatcacatgatggttcaatgttgaaagctgtgattgatcaatgcaaccatgacaatatactgaggtttggcatagcagttcttgggtacttaaacagaaacgcccttgatactaaaaatttaataaaagaaataaaagcaatcgctagtattccaacagaaagatactttttcaatgtgtctgatgaagcagctctactagaaaaggctgggacattaggagaacaaattttcagcattgaaggtactgttcaaggaggagacaactttcagatggaaatgtcacaagtgggattcagtgcagattactcttctcaaaatgatattctgatgctgggtgcagtgggagcttttggctggagtgggaccattgtccagaagacatctcatggccatttgatctttcctaaacaagcctttgaccaaattctgcaggacagaaatcacagttcatatttaggttactctgtggctgcaatttctactggagaaagcactcactttgttgctggtgctcctcgggcaaattataccggccagatagtgctatatagtgtgaatgagaatggcaatatcacggttattcaggctcaccgaggtgaccagattggctcctattttggtagtgtgctgtgttcagttgatgtggataaagacaccattacagacgtgctcttggtaggtgcaccaatgtacatgagtgacctaaagaaagaggaaggaagagtctacctgtttactatcaaagagggcattttgggtcagcaccaatttcttgaaggccccgagggcattgaaaacactcgatttggttcagcaattgcagctctttcagacatcaacatggatggctttaatgatgtgattgttggttcaccactagaaaatcagaattctggagctgtatacatttacaatggtcatcagggcactatccgcacaaagtattcccagaaaatcttgggatccgatggagcctttaggagccatctccagtactttgggaggtccttggatggctatggagatttaaatggggattccatcaccgatgtgtctattggtgcctttggacaagtggttcaactctggtcacaaagtattgctgatgtagctatagaagcttcattcacaccagaaaaaatcactttggtcaacaagaatgctcagataattctcaaactctgcttcagtgcaaagttcagacctactaagcaaaacaatcaagtggccattgtatataacatcacacttgatgcagatggattttcatccagagtaacctccagggggttatttaaagaaaacaatgaaaggtgcctgcagaagaatatggtagtaaatcaagcacagagttgccccgagcacatcatttatatacaggagccctctgatgttgtcaactctttggatttgcgtgtggacatcagtctggaaaaccctggcactagccctgcccttgaagcctattctgagactgccaaggtcttcagtattcctttccacaaagactgtggtgaggacggactttgcatttctgatctagtcctagatgtccgacaaataccagctgctcaagaacaaccctttattgtcagcaaccaaaacaaaaggttaacattttcagtaacgctgaaaaataaaagggaaagtgcatacaacactggaattgttgttgatttttcagaaaacttgttttttgcatcattctccctgccggttgatgggacagaagtaacatgccaggtggctgcatctcagaagtctgttgcctgcgatgtaggctaccctgctttaaagagagaacaacaggtgacttttactattaactttgacttcaatcttcaaaaccttcagaatcaggcgtctctcagtttccaagccttaagtgaaagccaagaagaaaacaaggctgataatttggtcaacctcaaaattcctctcctgtatgatgctgaaattcacttaacaagatctaccaacataaatttttatgaaatctcttcggatgggaatgttccttcaatcgtgcacagttttgaagatgttggtccaaaattcatcttctccctgaaggtaacaacaggaagtgttccagtaagcatggcaactgtaatcatccacatccctcagtataccaaagaaaagaacccactgatgtacctaactggggtgcaaacagacaaggctggtgacatcagttgtaatgcagatatcaatccactgaaaataggacaaacatcttcttctgtatctttcaaaagtgaaaatttcaggcacaccaaagaattgaactgcagaactgcttcctgtagtaatgttacctgctggttgaaagacgttcacatgaaaggagaatactttgttaatgtgactaccagaatttggaacgggactttcgcatcatcaacgttccagacagtacagctaacggcagctgcagaaatcaacacctataaccctgagatatatgtgattgaagataacactgttacgattcccctgatgataatgaaacctgatgagaaagccgaagtaccaacaggagttataataggaagtataattgctggaatccttttgctgttagctctggttgcaattttatggaagctcggcttcttcaaaagaaaatatgaaaagatgaccaaaaatccagatgagattgatgagaccacagagctcagtagctgaaccagcagacctacctgcagtgggaaccggcagcatcccagccagggtttgctgtttgcgtgaatggatttctttttaaatcccatattttttttatcatgtcgtaggtaaactaacctggtattttaagagaaaactgcaggtcagtttggaatgaagaaattgtggggggtgggggaggtgcggggggcaggtagggaaataatagggaaaatacctattttatatgatgggg

SEQ ID NO: 143221 - DNA, 3333 bp, Homo sapiens
  Payload ID: 8296
  Gene Symbol: ITGA2B
  Gene Name: integrin, alpha 2b (platelet glycoprotein IIb of IIb/IIIa complex, antigen CD41)
  Uniprot ID: P08514
  ENST ID: ENST00000262407
  CDS Start-End: 33-3152
attcctgcctgggaggttgtggaagaaggaagatggccagagctttgtgtccactgcaagccctctggcttctggagtgggtgctgctgctcttgggaccttgtgctgcccctccagcctgggccttgaacctggacccagtgcagctcaccttctatgcaggccccaatggcagccagtttggattttcactggacttccacaaggacagccatgggagagtggccatcgtggtgggcgccccgcggaccctgggccccagccaggaggagacgggcggcgtgttcctgtgcccctggagggccgagggcggccagtgcccctcgctgctctttgacctccgtgatgagacccgaaatgtaggctcccaaactttacaaaccttcaaggcccgccaaggactgggggcgtcggtcgtcagctggagcgacgtcattgtggcctgcgccccctggcagcactggaacgtcctagaaaagactgaggaggctgagaagacgcccgtaggtagctgctttttggctcagccagagagcggccgccgcgccgagtactccccctgtcgcgggaacaccctgagccgcatttacgtggaaaatgattttagctgggacaagcgttactgtgaagcgggcttcagctccgtggtcactcaggccggagagctggtgcttggggctcctggcggctattatttcttaggtctcctggcccaggctccagttgcggatattttctcgagttaccgcccaggcatccttttgtggcacgtgtcctcccagagcctctcctttgactccagcaacccagagtacttcgacggctactgggggtactcggtggccgtgggcgagttcgacggggatctcaacactacagaatatgtcgtcggtgcccccacttggagctggaccctgggagcggtggaaattttggattcctactaccagaggctgcatcggctgcgcggagagcagatggcgtcgtattttgggcattcagtggctgtcactgacgtcaacggggatgggaggcatgatctgctggtgggcgctccactgtatatggagagccgggcagaccgaaaactggccgaagtggggcgtgtgtatttgttcctgcagccgcgaggcccccacgcgctgggtgcccccagcctcctgctgactggcacacagctctatgggcgattcggctctgccatcgcacccctgggcgacctcgaccgggatggctacaatgacattgcagtggctgccccctacgggggtcccagtggccggggccaagtgctggtgttcctgggtcagagtgaggggctgaggtcacgtccctcccaggtcctggacagccccttccccacaggctctgcctttggcttctcccttcgaggtgccgtagacatcgatgacaacggatacccagacctgatcgtgggagcttacggggccaaccaggtggctgtgtacagagctcagccagtggtgaaggcctctgtccagctactggtgcaagattcactgaatcctgctgtgaagagctgtgtcctacctcagaccaagacacccgtgagctgcttcaacatccagatgtgtgttggagccactgggcacaacattcctcagaagctatccctaaatgccgagctgcagctggaccggcagaagccccgccagggccggcgggtgctgctgctgggctctcaacaggcaggcaccaccctgaacctggatctgggcggaaagcacagccccatctgccacaccaccatggccttccttcgagatgaggcagacttccgggacaagctgagccccattgtgctcagcctcaatgtgtccctaccgcccacggaggctggaatggcccctgctgtcgtgctgcatggagacacccatgtgcaggagcagacacgaatcgtcctggactgtggggaagatgacgtatgtgtgccccagcttcagctcactgccagcgtgacgggctccccgctcctagttggggcagataatgtcctggagctgcagatggacgcagccaacgagggcgagggggcctatgaagcagagctggccgtgcacctgccccagggcgcccactacatgcgggccctaagcaatgtcgagggctttgagagactcatctgtaatcagaagaaggagaatgagaccagggtggtgctgtgtgagctgggcaaccccatgaagaagaacgcccagataggaatcgcgatgttggtgagcgtggggaatctggaagaggctggggagtctgtgtccttccagctgcagatacggagcaagaacagccagaatccaaacagcaagattgtgctgctggacgtgccggtccgggcagaggcccaagtggagctgcgagggaactcctttccagcctccctggtggtggcagcagaagaaggtgagagggagcagaacagcttggacagctggggacccaaagtggagcacacctatgagctccacaacaatggccctgggactgtgaatggtcttcacctcagcatccaccttccgggacagtcccagccctccgacctgctctacatcctggatatacagccccaggggggccttcagtgcttcccacagcctcctgtcaaccctctcaaggtggactgggggctgcccatccccagcccctcccccattcacccggcccatcacaagcgggatcgcagacagatcttcctgccagagcccgagcagccctcgaggcttcaggatccagttctcgtaagctgcgactcggcgccctgtactgtggtgcagtgtgacctgcaggagatggcgcgcgggcagcgggccatggtcacggtgctggccttcctgtggctgcccagcctctaccagaggcctctggatcagtttgtgctgcagtcgcacgcatggttcaacgtgtcctccctcccctatgcggtgcccccgctcagcctgccccgaggggaagctcaggtgtggacacagctgctccgggccttggaggagagggccattccaatctggtgggtgctggtgggtgtgctgggtggcctgctgctgctcaccatcctggtcctggccatgtggaaggtcggcttcttcaagcggaaccggccacccctggaagaagatgatgaagagggggagtgatggtgcagcctacactattctagcaggagggttgggcgtgctacctgcaccgccccttctccaacaagttgcctccaagctttgggttggagctgttccattgggtcctcttggtgtcgtttccctcccaacagagctgggctaccccccctcctgctgcctaataaagagactgagccct

SEQ ID NO: 143222 - DNA, 281 bp, Homo sapiens
  Payload ID: 8296
  Gene Symbol: ITGA2B
  Gene Name: integrin, alpha 2b (platelet glycoprotein IIb of IIb/IIIa complex, antigen CD41)
  ENST ID: ENST00000588098
  CDS Start-End: 1-97
ggtgcccccgctcagcctgccccgaggggaagctcaggtcggcttcttcaagcggaaccggccacccctggaagaagatgatgaagagggggagtgatggtgcagcctacactattctagcaggagggttgggcgtgctacctgcaccgccccttctccaacaagttgcctccaagctttgggttggagctgttccattgggtcctcttggtgtcgtttccctcccaacagagctgggctaccccccctcctgctgcctaataaagagactgagccctgat

SEQ ID NO: 143223 - DNA, 496 bp, Homo sapiens
  Payload ID: 8296
  Gene Symbol: ITGA2B
  Gene Name: integrin, alpha 2b (platelet glycoprotein IIb of IIb/IIIa complex, antigen CD41)
  ENST ID: ENST00000587295
  CDS Start-End: 1-313
gaactcctttccagcctccctggtggtggcagcagaagaaggtgagagggagcagaacagcttggacagctggggacccaaagtggagcacacctatgagctccacaacaatggccctgggactgtgaatggtcttcacctcagcatccaccttccgggacagtcccagccctccgacctgctctacatcctggatatacagccccaggggggccttcagtgcttcccacagcctcctgtcaaccctctcaaggtcggcttcttcaagcggaaccggccacccctggaagaagatgatgaagagggggagtgatggtgcagcctacactattctagcaggagggttgggcgtgctacctgcaccgccccttctccaacaagttgcctccaagctttgggttggagctgttccattgggtcctcttggtgtcgtttccctcccaacagagctgggctaccccccctcctgctgcctaataaagagactgagccctga

SEQ ID NO: 143224 - DNA, 3665 bp, Homo sapiens
  Payload ID: 8297
  Gene Symbol: ITGA3
  Gene Name: integrin, alpha 3 (antigen CD49C, alpha 3 subunit of VLA-3 receptor)
  Uniprot ID: P26006
  ENST ID: ENST00000007722
  CDS Start-End: 1-3201
atgggccccggccccagccgcgcgccccgcgccccacgcctgatgctctgtgcgctcgccttgatggtggcggccggcggctgcgtcgtctccgccttcaacctggatacccgattcctggtagtgaaggaggccgggaacccgggcagcctcttcggctactcggtcgccctccatcggcagacagagcggcagcagcgctacctgctcctggctggtgccccccgggagctcgctgtgcccgatggctacaccaaccggactggtgctgtgtacctgtgcccactcactgcccacaaggatgactgtgagcggatgaacatcacagtgaaaaatgaccctggccatcacattattgaggacatgtggcttggagtgactgtggccagccagggccctgcaggcagagttctggtctgtgcccaccgctacacccaggtgctgtggtcagggtcagaagaccagcggcgcatggtgggcaagtgctacgtgcgaggcaatgacctagagctggactccagtgatgactggcagacctaccacaacgagatgtgcaatagcaacacagactacctggagacgggcatgtgccagctgggcaccagcggtggcttcacccagaacactgtgtacttcggcgcccccggtgcctacaactggaaaggaaacagctacatgattcagcgcaaggagtgggacttatctgagtatagttacaaggacccagaggaccaaggaaacctctatattgggtacacgatgcaggtaggcagcttcatcctgcaccccaaaaacatcaccattgtgacaggtgccccacggcaccgacatatgggcgcggtgttcttgctgagccaggaggcaggcggagacctgcggaggaggcaggtgctggagggctcgcaggtgggcgcctattttggcagcgccattgccctggcagacctgaacaatgatgggtggcaggacctcctggtgggcgccccctactacttcgagaggaaagaggaagtagggggtgccatctatgtcttcatgaaccaggcgggaacctccttccctgctcacccctcactccttcttcatggccccagtggctctgcctttggtttatctgtggccagcattggtgacatcaaccaggatggatttcaggatattgctgtgggagctccgtttgaaggcttgggcaaagtgtacatctatcacagtagctctaaggggctccttagacagccccagcaggtaatccatggagagaagctgggactgcctgggttggccaccttcggctattccctcagtgggcagatggatgtggatgagaacttctacccagaccttctagtgggaagcctgtcagaccacattgtgctgctgcgggcccggcccgtcatcaacatcgtccacaagaccttggtgcccaggccagctgtgctggaccctgcactttgcacggccacctcttgtgtgcaagtggagctgtgctttgcttacaaccagagtgccgggaaccccaactacaggcgaaacatcaccctggcctacactctggaggctgacagggaccgccggccgccccggctccgctttgccggcagtgagtccgctgtcttccacggcttcttctccatgcccgagatgcgctgccagaagctggagctgctcctgatggacaacctccgtgacaaactccgccccatcatcatctccatgaactactctttacctttgcggatgcccgatcgcccccggctggggctgcggtccctggacgcctacccgatcctcaaccaggcacaggctctggagaaccacactgaggtccagttccagaaggagtgcgggcctgacaacaagtgtgagagcaacttgcagatgcgggcagccttcgtgtcagagcagcagcagaagctgagcaggctccagtacagcagagacgtccggaaattgctcctgagcatcaacgtgacgaacacccggacctcggagcgctccggggaggacgcccacgaggcgctgctcaccctggtggtgcctcccgccctgctgctgtcctcagtgcgcccccccggggcctgccaagctaatgagaccatcttttgcgagctggggaaccccttcaaacggaaccagaggatggagctgctcatcgcctttgaggtcatcggggtgaccctgcacacaagggaccttcaggtgcagctgcagctctccacgtcgagtcaccaggacaacctgtggcccatgatcctcactctgctggtggactatacactccagacctcgcttagcatggtaaatcaccggctacaaagcttctttggggggacagtgatgggtgagtctggcatgaaaactgtggaggatgtaggaagccccctcaagtatgaattccaggtgggcccaatgggggaggggctggtgggcctggggaccctggtcctaggtctggagtggccctacgaagtcagcaatggcaagtggctgctgtatcccacggagatcaccgtccatggcaatgggtcctggccctgccgaccacctggagaccttatcaaccctctcaacctcactctttctgaccctggggacaggccatcatccccacagcgcaggcggcgacagctggatccagggggaggccagggccccccacctgtcactctggctgctgccaaaaaagccaagtctgagactgtgctgacctgtgccacagggcgtgcccactgtgtgtggctagagtgccccatccctgatgcccccgttgtcaccaacgtgactgtgaaggcacgagtgtggaacagcaccttcatcgaggattacagagactttgaccgagtccgggtaaatggctgggctaccctattcctccgaaccagcatccccaccatcaacatggagaacaagaccacgtggttctctgtggacattgactcggagctggtggaggagctgccggccgaaatcgagctgtggctggtgctggtggccgtgggtgcagggctgctgctgctggggctgatcatcctcctgctgtggaagtgtgacttctttaagcggacccgctattatcagatcatgcccaagtaccacgcagtgcggatccgggaggaggagcgctacccacctccagggagcaccctgcccaccaagaagcactgggtgaccagctggcagactcgggaccaatactactgacgtcctccctgatcccaccccctcctcccccagtgtcccctttcttcctatttatcataagttatgcctctgacagtccacaggggccaccacctttggctggtagcagcaggctcaggcacatacacctcgtcaagagcatgcacatgctgtctggccctggggatcttcccacaggagggccagcgctgtggaccttacaacgccgagtgcactgcattcctgtgccctagatgcacgtggggcccactgctcgtggactgtgctggtgcatcacggatggtgcatgggctcgccgtgtctcagcctctgccagcgccaaaacaagccaaagagcctcccaccagagccgggaggaaaaggcccctgcaatgtggtgacacctccccctttcacactggatccatcttgagccacagtcactggattgactttgctgtcaaaactactgacagggagcagcc

SEQ ID NO: 143225 - DNA, 4888 bp, Homo sapiens
  Payload ID: 8297
  Gene Symbol: ITGA3
  Gene Name: integrin, alpha 3 (antigen CD49C, alpha 3 subunit of VLA-3 receptor)
  Uniprot ID: P26006
  ENST ID: ENST00000320031
  CDS Start-End: 331-3486
agatccgccgcgaagccgggatcgaaggcgacagcgcggccaagggggcgcggccgggacaagctgggggccggttgcccggggcagggacggcggcgacccggccgctggggaggcaggaagatagacccacggatcttaggaagggatccgagagcgcagctgtgaaactggctggggctgggggcacgaaaccgatcagcgctacggagcgcagcggccggcgggttccagtgtcctccggcggcgcggggagcaggtgaacaggtcctcacgcccagctccgcgccctcacgcgctctcgccgggaccccgcttccgctggcagccatgggccccggccccagccgcgcgccccgcgccccacgcctgatgctctgtgcgctcgccttgatggtggcggccggcggctgcgtcgtctccgccttcaacctggatacccgattcctggtagtgaaggaggccgggaacccgggcagcctcttcggctactcggtcgccctccatcggcagacagagcggcagcagcgctacctgctcctggctggtgccccccgggagctcgctgtgcccgatggctacaccaaccggactggtgctgtgtacctgtgcccactcactgcccacaaggatgactgtgagcggatgaacatcacagtgaaaaatgaccctggccatcacattattgaggacatgtggcttggagtgactgtggccagccagggccctgcaggcagagttctggtctgtgcccaccgctacacccaggtgctgtggtcagggtcagaagaccagcggcgcatggtgggcaagtgctacgtgcgaggcaatgacctagagctggactccagtgatgactggcagacctaccacaacgagatgtgcaatagcaacacagactacctggagacgggcatgtgccagctgggcaccagcggtggcttcacccagaacactgtgtacttcggcgcccccggtgcctacaactggaaaggaaacagctacatgattcagcgcaaggagtgggacttatctgagtatagttacaaggacccagaggaccaaggaaacctctatattgggtacacgatgcaggtaggcagcttcatcctgcaccccaaaaacatcaccattgtgacaggtgccccacggcaccgacatatgggcgcggtgttcttgctgagccaggaggcaggcggagacctgcggaggaggcaggtgctggagggctcgcaggtgggcgcctattttggcagcgccattgccctggcagacctgaacaatgatgggtggcaggacctcctggtgggcgccccctactacttcgagaggaaagaggaagtagggggtgccatctatgtcttcatgaaccaggcgggaacctccttccctgctcacccctcactccttcttcatggccccagtggctctgcctttggtttatctgtggccagcattggtgacatcaaccaggatggatttcaggatattgctgtgggagctccgtttgaaggcttgggcaaagtgtacatctatcacagtagctctaaggggctccttagacagccccagcaggtaatccatggagagaagctgggactgcctgggttggccaccttcggctattccctcagtgggcagatggatgtggatgagaacttctacccagaccttctagtgggaagcctgtcagaccacattgtgctgctgcgggcccggcccgtcatcaacatcgtccacaagaccttggtgcccaggccagctgtgctggaccctgcactttgcacggccacctcttgtgtgcaagtggagctgtgctttgcttacaaccagagtgccgggaaccccaactacaggcgaaacatcaccctggcctacactctggaggctgacagggaccgccggccgccccggctccgctttgccggcagtgagtccgctgtcttccacggcttcttctccatgcccgagatgcgctgccagaagctggagctgctcctgatggacaacctccgtgacaaactccgccccatcatcatctccatgaactactctttacctttgcggatgcccgatcgcccccggctggggctgcggtccctggacgcctacccgatcctcaaccaggcacaggctctggagaaccacactgaggtccagttccagaaggagtgcgggcctgacaacaagtgtgagagcaacttgcagatgcgggcagccttcgtgtcagagcagcagcagaagctgagcaggctccagtacagcagagacgtccggaaattgctcctgagcatcaacgtgacgaacacccggacctcggagcgctccggggaggacgcccacgaggcgctgctcaccctggtggtgcctcccgccctgctgctgtcctcagtgcgcccccccggggcctgccaagctaatgagaccatcttttgcgagctggggaaccccttcaaacggaaccagaggatggagctgctcatcgcctttgaggtcatcggggtgaccctgcacacaagggaccttcaggtgcagctgcagctctccacgtcgagtcaccaggacaacctgtggcccatgatcctcactctgctggtggactatacactccagacctcgcttagcatggtaaatcaccggctacaaagcttctttggggggacagtgatgggtgagtctggcatgaaaactgtggaggatgtaggaagccccctcaagtatgaattccaggtgggcccaatgggggaggggctggtgggcctggggaccctggtcctaggtctggagtggccctacgaagtcagcaatggcaagtggctgctgtatcccacggagatcaccgtccatggcaatgggtcctggccctgccgaccacctggagaccttatcaaccctctcaacctcactctttctgaccctggggacaggccatcatccccacagcgcaggcggcgacagctggatccagggggaggccagggccccccacctgtcactctggctgctgccaaaaaagccaagtctgagactgtgctgacctgtgccacagggcgtgcccactgtgtgtggctagagtgccccatccctgatgcccccgttgtcaccaacgtgactgtgaaggcacgagtgtggaacagcaccttcatcgaggattacagagactttgaccgagtccgggtaaatggctgggctaccctattcctccgaaccagcatccccaccatcaacatggagaacaagaccacgtggttctctgtggacattgactcggagctggtggaggagctgccggccgaaatcgagctgtggctggtgctggtggccgtgggtgcagggctgctgctgctggggctgatcatcctcctgctgtggaagtgcggcttcttcaagcgagcccgcactcgcgccctgtatgaagctaagaggcagaaggcggagatgaagagccagccgtcagagacagagaggctgaccgacgactactgagggggcagccccccgcccccggcccacctggtgtgacttctttaagcggacccgctattatcagatcatgcccaagtaccacgcagtgcggatccgggaggaggagcgctacccacctccagggagcaccctgcccaccaagaagcactgggtgaccagctggcagactcgggaccaatactactgacgtcctccctgatcccaccccctcctcccccagtgtcccctttcttcctatttatcataagttatgcctctgacagtccacaggggccaccacctttggctggtagcagcaggctcaggcacatacacctcgtcaagagcatgcacatgctgtctggccctggggatcttcccacaggagggccagcgctgtggaccttacaacgccgagtgcactgcattcctgtgccctagatgcacgtggggcccactgctcgtggactgtgctggtgcatcacggatggtgcatgggctcgccgtgtctcagcctctgccagcgccaaaacaagccaaagagcctcccaccagagccgggaggaaaaggcccctgcaatgtggtgacacctccccctttcacactggatccatcttgagccacagtcactggattgactttgctgtcaaaactactgacagggagcagcccccgggccgctggctggtgggcccccaatgacacccatgccagagaggtggggatcctgcctaaggttgtctacgggggcacttggaggacctggcgtgctcagacccaacagcaaaggaactagaaagaaggacccagaacggcttgctttcctgcatctctgtgaagcctctctccttggccacagactgaactcgcagggaatgcagcaggaaggaacaaagacaggcaaacggcaacgtagcctgggctcactgtgctggggcacggcgggatcctccacagagaggaggggaccaattctggacagacagatgttgggaggatacagaggagatgccacttctcactcaccactaccagccagcctcagaaggccccagagagaccctgcaagaccacggagggagcgacacttgaatgtagaataggcagggggccctgccccaccccatccagccagaccccacgctgaccatgcgtcaggggcctagaggtggagttcttagctatccttggctttcagagccagcctggctctgccccctcccccatgggctgtgtcctaaggcccatttgagaagctgaggctagttccagaaaacctctcctgacccctgcctgttggcaggcccactccccagccccagccccttccatggtactgtagcaggggaattccctccccctccttgtgccttctttgtatataggcttctcacggcgaccaataaacagctcccagtttgt

SEQ ID NO: 143226 - DNA, 1817 bp, Homo sapiens
  Payload ID: 8297
  Gene Symbol: ITGA3
  Gene Name: integrin, alpha 3 (antigen CD49C, alpha 3 subunit of VLA-3 receptor)
  ENST ID: ENST00000506401
  CDS Start-End: 52-480
tttttctctttccccggaaggaaagcgcagcccgggctgggctcgcaagccatgggccccggccccagccgcgcgccccgcgccccacgcctgatgctctgtgcgctcgccttgatggtggcggccggcggctgcgtcgtctccgccttcaacctggatacccgattcctggtagtgaaggaggccgggaacccgggcagcctcttcggctactcggtcgccctccatcggcagacagagcggcagcagcgctacctgctcctggctggtgccccccgggagctcgctgtgcccgatggctacaccaaccggactggtgctgtgtacctgtgcccactcactgcccacaaggatgactgtgagcggatgaacatcacagtgaaaaatgaccctggccatcacattattgaggacatgtggcttggagtgactgtggccagccagggccctgcaggcagagttctggaaacagctacatgattcagcgcaaggagtgggacttatctgagtatagttacaaggacccagaggaccaaggaaacctctatattgggtacacgatgcaggtaggcagcttcatcctgcaccccaaaaacatcaccattgtgacaggtgccccacggcaccgacatatgggcgcggtgttcttgctgagccaggaggcaggcggagacctgcggaggaggcaggtgctggagggctcgcaggtgggcgcctattttggcagcgccattgccctggcagacctgaacaatgatgggtggcaggacctcctggtgggcgccccctactacttcgagaggaaagaggaagtagggggtgccatctatgtcttcatgaaccaggcgggaacctccttccctgctcacccctcactccttcttcatggccccagtggctctgcctttggtttatctgtggccagcattggtgacatcaaccaggatggatttcaggatattgctgtgggagctccgtttgaaggcttgggcaaagtgtacatctatcacagtagctctaaggggctccttagacagccccagcaggtaatccatggagagaagctgggactgcctgggttggccaccttcggctattccctcagtgggcagatggatgtggatgagaacttctacccagaccttctagtgggaagcctgtcagaccacattgtgctgctgcgggcccggcccgtcatcaacatcgtccacaagaccttggtgcccaggccagctgtgctggaccctgcactttgcacggccacctcttgtgtgcaagtggagctgtgctttgcttacaaccagagtgccgggaaccccaactacaggcgaaacatcagtgagtgctggggtgcagcgtaaaaggggtacgctcccctgtccccttgctgaccaccctgtctacctgtagccctggcctacactctggaggctgacagggaccgccggccgccccggctccgctttgccggcagtgagtccgctgtcttccacggcttcttctccatgcccgagatgcgctgccagaagctggagctgctcctgatggacaacctccgtgacaaactccgccccatcatcatctccatgaactactctttacctttgcggatgcccgatcgcccccggctggggctgcggtccctggacgcctacccgatcctcaaccaggcacaggctctggagaaccacactgaggtccagttccagaaggagtgcgggcctgacaacaagtgtgagagcaacttgcagatgcgggcagccttcgtgtcagagcagcagcagaagctgagcaggctccagtacagcagagacgtc

SEQ ID NO: 143227 - DNA, 518 bp, Homo sapiens
  Payload ID: 8297
  Gene Symbol: ITGA3
  Gene Name: integrin, alpha 3 (antigen CD49C, alpha 3 subunit of VLA-3 receptor)
  ENST ID: ENST00000510809
  CDS Start-End: 1-253
catcaaccaggatggatttcaggatattgctgtgggagctccgtttgaaggcttgggcaaagtgtacatctatcacagtagctctaaggggctccttagacagccccagcaggtaatccatggagagaagctgggactgcctgggttggccaccttcggctattccctcagtgggcagatggatgtggatgagaacttctacccagaccttctagtgggaagcctgtcagaccacattgtgctgctgcggtgagccaggagggcccggcccgtcatcaacatcgtccacaagaccttggtgcccaggccagctgtgctggaccctgcactttgcacggccacctcttgtgtgcaagtggagctgtgctttgcttacaaccagagtgccgggaaccccaactacaggcgaaacatcaccctggcctacactctggaggctgacagggaccgccggccgccccggctccgctttgccggcagtgagtccgctgtcttccacggcttcttctccatgcccg

SEQ ID NO: 143228 - DNA, 827 bp, Homo sapiens
  Payload ID: 8297
  Gene Symbol: ITGA3
  Gene Name: integrin, alpha 3 (antigen CD49C, alpha 3 subunit of VLA-3 receptor)
  ENST ID: ENST00000506827
  CDS Start-End: 1-664
gagcaacttgcagatgcgggcagccttcgtgtcagagcagcagcagaagctgagcaggctccagtacagcagagacgtccggaaattgctcctgagcatcaacgtgacgaacacccggacctcggagcgctccggggaggacgcccacgaggcgctgctcaccctggtggtgcctcccgccctgctgctgtcctcagtgcgcccccccggggcctgccaagctaatgagaccatcttttgcgagctggggaaccccttcaaacggaaccagaggatggagctgctcatcgcctttgaggtcatcggggtgaccctgcacacaagggaccttcaggtgcagctgcagctctccacgtcgagtcaccaggacaacctgtggcccatgatcctcactctgctggtggactatacactccagacctcgcttagcatggtaaatcaccggctacaaagcttctttggggggacagtgatgggtgagtctggcatgaaaactgtggaggatgtaggaagccccctcaagtatgaattccagccagaccccacgctgaccatgcgtcaggggcctagaggtggagttcttagctatccttggctttcagagccagcctggctctgccccctcccccatgggctgtgtcctaaggcccatttgagaagctgaggctagttccagaaaacctctcctgacccctgcctgttggcaggcccactccccagccccagccccttccatggtactgtagcaggggaattccctccccctccttgtgccttctttgtatataggcttctcacggcgaccaataaacagctcccagtttgta

SEQ ID NO: 143229 - DNA, 351 bp, Homo sapiens
  Payload ID: 8297
  Gene Symbol: ITGA3
  Gene Name: integrin, alpha 3 (antigen CD49C, alpha 3 subunit of VLA-3 receptor)
  ENST ID: ENST00000512553
  CDS Start-End: 1-351
tgggacttatctgagtatagttacaaggacccagaggaccaaggaaacctctatattgatattgctgtgggagctccgtttgaaggcttgggcaaagtgtacatctatcacagtagctctaaggggctccttagacagccccagcaggtaatccatggagagaagctgggactgcctgggttggccaccttcggctattccctcagtgggcagatggatgtggatgagaacttctacccagaccttctagtgggaagcctgtcagaccacattgtgctgctgcgggcccggcccgtcatcaacatcgtccacaagaccttggtgcccaggccagctgtgctggaccctgca

SEQ ID NO: 143230 - DNA, 227 bp, Homo sapiens
  Payload ID: 8297
  Gene Symbol: ITGA3
  Gene Name: integrin, alpha 3 (antigen CD49C, alpha 3 subunit of VLA-3 receptor)
  ENST ID: ENST00000504417
  CDS Start-End: 1-89
cccccgttgtcaccaacgtgactgtgaaggcacgagtgtggaacagcaccttcatcgagcatccagcacaggacctgacgcagaaatgaatgaacaaataaatgaatgatgcgcatttgtgtgtggaggggaggcctggctgacagatcctttggggattacagagactttgaccgagtccgggtaaatggctgggctaccctattcctccgaaccagcatccccac

SEQ ID NO: 143231 - DNA, 2070 bp, Homo sapiens
  Payload ID: 8298
  Gene Symbol: ITGA4
  Gene Name: integrin, alpha 4 (antigen CD49D, alpha 4 subunit of VLA-4 receptor)
  ENST ID: ENST00000233573
  CDS Start-End: 228-2070
ccgggagtggggccgggcgagtgcgcggcatcccaggccggcccgaacgctccgcccgcggtgggccgacttcccctcctcttccctctctccttcctttagcccgctggcgccggacacgctgcgcctcatctcttggggcgttcttccccgttggccaaccgtcgcatcccgtgcaactttggggtagtggccgtttagtgttgaatgttccccaccgagagcgcatggcttgggaagcgaggcgcgaacccggcccccgaagggccgccgtccgggagacggtgatgctgttgctgtgcctgggggtcccgaccggccgcccctacaacgtggacactgagagcgcgctgctttaccagggcccccacaacacgctgttcggctactcggtcgtgctgcacagccacggggcgaaccgatggctcctagtgggtgcgcccactgccaactggctcgccaacgcttcagtgatcaatcccggggcgatttacagatgcaggatcggaaagaatcccggccagacgtgcgaacagctccagctgggtagccctaatggagaaccttgtggaaagacttgtttggaagagagagacaatcagtggttgggggtcacactttccagacagccaggagaaaatggatccatcgtgacttgtgggcatagatggaaaaatatattttacataaagaatgaaaataagctccccactggtggttgctatggagtgccccctgatttacgaacagaactgagtaaaagaatagctccgtgttatcaagattatgtgaaaaaatttggagaaaattttgcatcatgtcaagctggaatatccagtttttacacaaaggatttaattgtgatgggggccccaggatcatcttactggactggctctctttttgtctacaatataactacaaataaatacaaggcttttttagacaaacaaaatcaagtaaaatttggaagttatttaggatattcagtcggagctggtcattttcggagccagcatactaccgaagtagtcggaggagctcctcaacatgagcagattggtaaggcatatatattcagcattgatgaaaaagaactaaatatcttacatgaaatgaaaggtaaaaagcttggatcgtactttggagcttctgtctgtgctgtggacctcaatgcagatggcttctcagatctgctcgtgggagcacccatgcagagcaccatcagagaggaaggaagagtgtttgtgtacatcaactctggctcgggagcagtaatgaatgcaatggaaacaaacctcgttggaagtgacaaatatgctgcaagatttggggaatctatagttaatcttggcgacattgacaatgatggctttgaagatgttgctatcggagctccacaagaagatgacttgcaaggtgctatttatatttacaatggccgtgcagatgggatctcgtcaaccttctcacagagaattgaaggacttcagatcagcaaatcgttaagtatgtttggacagtctatatcaggacaaattgatgcagataataatggctatgtagatgtagcagttggtgcttttcggtctgattctgctgtcttgctaaggacaagacctgtagtaattgttgacgcttctttaagccaccctgagtcagtaaatagaacgaaatttgactgtgttgaaaatggatggccttctgtgtgcatagatctaacactttgtttctcatataagggcaaggaagttccaggttacattgttttgttttataacatgagtttggatgtgaacagaaaggcagagtctccaccaagattctatttctcttctaatggaacttctgacgtgattacaggaagcatacaggtgtccagcagagaagctaactgtagaacacatcaagcatttatgcggaaagatgtgcgggacatcctcaccccaattcagattgaagctgcttaccaccttggtcctcatgtcatcagtaaacgaagtacagaggaattcccaccacttcagccaattcttcagcagaagaaagaaaaagacataatgaaaaaaa

SEQ ID NO: 143232 - DNA, 1403 bp, Homo sapiens
  Payload ID: 8298
  Gene Symbol: ITGA4
  Gene Name: integrin, alpha 4 (antigen CD49D, alpha 4 subunit of VLA-4 receptor)
  Uniprot ID: P13612
  ENST ID: ENST00000339307
  CDS Start-End: 449-1036
gctcttgctgagcccagagccatcccgcgctctgcgggctgggaggcccgggccaggacgcgagtcctgcgcagccgaggttccccagcgccccctgcagccgcgcgtaggcagagacggagcccggccctgcgcctccgcaccacgcccgggaccccacccagcggcccgtacccggagaagcagcgcgagcacccgaagctcccggctggcggcagaaaccgggagtggggccgggcgagtgcgcggcatcccaggccggcccgaacgctccgcccgcggtgggccgacttcccctcctcttccctctctccttcctttagcccgctggcgccggacacgctgcgcctcatctcttggggcgttcttccccgttggccaaccgtcgcatcccgtgcaactttggggtagtggccgtttagtgttgaatgttccccaccgagagcgcatggcttgggaagcgaggcgcgaacccggcccccgaagggccgccgtccgggagacggtgatgctgttgctgtgcctgggggtcccgaccggccgcccctacaacgtggacactgagagcgcgctgctttaccagggcccccacaacacgctgttcggctactcggtcgtgctgcacagccacggggcgaaccgatggctcctagtgggtgcgcccactgccaactggctcgccaacgcttcagtgatcaatcccggggcgatttacagatgcaggatcggaaagaatcccggccagacgtgcgaacagctccagctgggtagccctaatggagaaccttgtggaaagacttgtttggaagagagagacaatcagtggttgggggtcacactttccagacagccaggagaaaatggatccatcgtgacttgtgggcatagatggaaaaatatattttacataaagaatgaaaataagctccccactggtggttgctatggagtgccccctgatttacgaacagaactgagtaaaagaatagctccgtgttatcaaggtagcatcagcaagtacagagctaggacataacagaagtgagcagaattggggtgaatgtcaacagagcatgtcagaggatatctgcagcaaaactaaaatccaacaatgcgtctttaggagctaagaaacatatgaatgcaaattcataattttctaaccaccctcactcaaaaaaaatccctcagcacgcaaagaaaaattttattggttggcaaaactttggccaagtatttgagttcaattatgggtgctaataagactttggtctttcttccttggaatgtgatgtcacagagcagcttatattacatatattcctattttgccttcggatacccaaaagataaaaaagtgaatattgattctcagttgcaataaaactcagtcttgatttctg

SEQ ID NO: 143233 - DNA, 4189 bp, Homo sapiens
  Payload ID: 8298
  Gene Symbol: ITGA4
  Gene Name: integrin, alpha 4 (antigen CD49D, alpha 4 subunit of VLA-4 receptor)
  Uniprot ID: P13612
  ENST ID: ENST00000397033
  CDS Start-End: 431-3529
gccatcccgcgctctgcgggctgggaggcccgggccaggacgcgagtcctgcgcagccgaggttccccagcgccccctgcagccgcgcgtaggcagagacggagcccggccctgcgcctccgcaccacgcccgggaccccacccagcggcccgtacccggagaagcagcgcgagcacccgaagctcccggctggcggcagaaaccgggagtggggccgggcgagtgcgcggcatcccaggccggcccgaacgctccgcccgcggtgggccgacttcccctcctcttccctctctccttcctttagcccgctggcgccggacacgctgcgcctcatctcttggggcgttcttccccgttggccaaccgtcgcatcccgtgcaactttggggtagtggccgtttagtgttgaatgttccccaccgagagcgcatggcttgggaagcgaggcgcgaacccggcccccgaagggccgccgtccgggagacggtgatgctgttgctgtgcctgggggtcccgaccggccgcccctacaacgtggacactgagagcgcgctgctttaccagggcccccacaacacgctgttcggctactcggtcgtgctgcacagccacggggcgaaccgatggctcctagtgggtgcgcccactgccaactggctcgccaacgcttcagtgatcaatcccggggcgatttacagatgcaggatcggaaagaatcccggccagacgtgcgaacagctccagctgggtagccctaatggagaaccttgtggaaagacttgtttggaagagagagacaatcagtggttgggggtcacactttccagacagccaggagaaaatggatccatcgtgacttgtgggcatagatggaaaaatatattttacataaagaatgaaaataagctccccactggtggttgctatggagtgccccctgatttacgaacagaactgagtaaaagaatagctccgtgttatcaagattatgtgaaaaaatttggagaaaattttgcatcatgtcaagctggaatatccagtttttacacaaaggatttaattgtgatgggggccccaggatcatcttactggactggctctctttttgtctacaatataactacaaataaatacaaggcttttttagacaaacaaaatcaagtaaaatttggaagttatttaggatattcagtcggagctggtcattttcggagccagcatactaccgaagtagtcggaggagctcctcaacatgagcagattggtaaggcatatatattcagcattgatgaaaaagaactaaatatcttacatgaaatgaaaggtaaaaagcttggatcgtactttggagcttctgtctgtgctgtggacctcaatgcagatggcttctcagatctgctcgtgggagcacccatgcagagcaccatcagagaggaaggaagagtgtttgtgtacatcaactctggctcgggagcagtaatgaatgcaatggaaacaaacctcgttggaagtgacaaatatgctgcaagatttggggaatctatagttaatcttggcgacattgacaatgatggctttgaagatgttgctatcggagctccacaagaagatgacttgcaaggtgctatttatatttacaatggccgtgcagatgggatctcgtcaaccttctcacagagaattgaaggacttcagatcagcaaatcgttaagtatgtttggacagtctatatcaggacaaattgatgcagataataatggctatgtagatgtagcagttggtgcttttcggtctgattctgctgtcttgctaaggacaagacctgtagtaattgttgacgcttctttaagccaccctgagtcagtaaatagaacgaaatttgactgtgttgaaaatggatggccttctgtgtgcatagatctaacactttgtttctcatataagggcaaggaagttccaggttacattgttttgttttataacatgagtttggatgtgaacagaaaggcagagtctccaccaagattctatttctcttctaatggaacttctgacgtgattacaggaagcatacaggtgtccagcagagaagctaactgtagaacacatcaagcatttatgcggaaagatgtgcgggacatcctcaccccaattcagattgaagctgcttaccaccttggtcctcatgtcatcagtaaacgaagtacagaggaattcccaccacttcagccaattcttcagcagaagaaagaaaaagacataatgaaaaaaacaataaactttgcaaggttttgtgcccatgaaaattgttctgctgatttacaggtttctgcaaagattgggtttttgaagccccatgaaaataaaacatatcttgctgttgggagtatgaagacattgatgttgaatgtgtccttgtttaatgctggagatgatgcatatgaaacgactctacatgtcaaactacccgtgggtctttatttcattaagattttagagctggaagagaagcaaataaactgtgaagtcacagataactctggcgtggtacaacttgactgcagtattggctatatatatgtagatcatctctcaaggatagatattagctttctcctggatgtgagctcactcagcagagcggaagaggacctcagtatcacagtgcatgctacctgtgaaaatgaagaggaaatggacaatctaaagcacagcagagtgactgtagcaatacctttaaaatatgaggttaagctgactgttcatgggtttgtaaacccaacttcatttgtgtatggatcaaatgatgaaaatgagcctgaaacgtgcatggtggagaaaatgaacttaactttccatgttatcaacactggcaatagtatggctcccaatgttagtgtggaaataatggtaccaaattcttttagcccccaaactgataagctgttcaacattttggatgtccagactactactggagaatgccactttgaaaattatcaaagagtgtgtgcattagagcagcaaaagagtgcaatgcagaccttgaaaggcatagtccggttcttgtccaagactgataagaggctattgtactgcataaaagctgatccacattgtttaaatttcttgtgtaattttgggaaaatggaaagtggaaaagaagccagtgttcatatccaactggaaggccggccatccattttagaaatggatgagacttcagcactcaagtttgaaataagagcaacaggttttccagagccaaatccaagagtaattgaactaaacaaggatgagaatgttgcgcatgttctactggaaggactacatcatcaaagacccaaacgttatttcaccatagtgattatttcaagtagcttgctacttggacttattgtacttctattgatctcatatgttatgtggaaggctggcttctttaaaagacaatacaaatctatcctacaagaagaaaacagaagagacagttggagttatatcaacagtaaaagcaatgatgattaaggacttctttcaaattgagagaatggaaaacagactcaggttgtagtaaagaaatttaaaagacactgtttacaagaaaaaatgaattttgtttggacttcttttactcatgatcttgtgacatattatgtcttcatgcaaggggaaaatctcagcaatgattactctttgagatagaagaactgcaaaggtaataatacagccaaagataatctctcagcttttaaatgggtagagaaacactaaagcattcaatttattcaagaaaagtaagcccttgaagatatcttgaaatgaaagtataactgagttaaattatactggagaagtcttagacttgaaatactacttaccatatgtgcttgcctcagtaaaatgaaccccactgggtgggcagaggttcatttcaaatacatctttgatacttgttcaaaatatgttctttaaaaatataattttttagagagctgttcccaaattttctaacgagtggaccattatcactttaaagccctttatttataatacatttcctacgggctgtgttccaacaaccattttttttcagcagactatgaatattatagtattataggccaaactggcaaacttcagactgaacatgtacactggtttgagcttagtgaaattacttctgga

SEQ ID NO: 143234 - DNA, 4444 bp, Homo sapiens
  Payload ID: 8299
  Gene Symbol: ITGA5
  Gene Name: integrin, alpha 5 (fibronectin receptor, alpha polypeptide)
  Uniprot ID: P08648
  ENST ID: ENST00000293379
  CDS Start-End: 263-3412
agtccagacaaccggcttccagctggggctggggaaagggggttggaggggtgcgccccccccccacgccccttaggggtgggggacgcgggctcagagttccagggacccaggaatgcccccccgccagccccctcggcaggcggggggagggctcagccgggagtttggcaaactcctccccgcgttgagtcattcgcctctgggaggtttaggaagcggctccgggtcggtggccccaggacagggaagagcgggcgctatggggagccggacgccagagtcccctctccacgccgtgcagctgcgctggggcccccggcgccgacccccgctgctgccgctgctgttgctgctgctgccgccgccacccagggtcgggggcttcaacttagacgcggaggccccagcagtactctcggggcccccgggctccttcttcggattctcagtggagttttaccggccgggaacagacggggtcagtgtgctggtgggagcacccaaggctaataccagccagccaggagtgctgcagggtggtgctgtctacctctgtccttggggtgccagccccacacagtgcacccccattgaatttgacagcaaaggctctcggctcctggagtcctcactgtccagctcagagggagaggagcctgtggagtacaagtccttgcagtggttcggggcaacagttcgagcccatggctcctccatcttggcatgcgctccactgtacagctggcgcacagagaaggagccactgagcgaccccgtgggcacctgctacctctccacagataacttcacccgaattctggagtatgcaccctgccgctcagatttcagctgggcagcaggacagggttactgccaaggaggcttcagtgccgagttcaccaagactggccgtgtggttttaggtggaccaggaagctatttctggcaaggccagatcctgtctgccactcaggagcagattgcagaatcttattaccccgagtacctgatcaacctggttcaggggcagctgcagactcgccaggccagttccatctatgatgacagctacctaggatactctgtggctgttggtgaattcagtggtgatgacacagaagactttgttgctggtgtgcccaaagggaacctcacttacggctatgtcaccatccttaatggctcagacattcgatccctctacaacttctcaggggaacagatggcctcctactttggctatgcagtggccgccacagacgtcaatggggacgggctggatgacttgctggtgggggcacccctgctcatggatcggacccctgacgggcggcctcaggaggtgggcagggtctacgtctacctgcagcacccagccggcatagagcccacgcccacccttaccctcactggccatgatgagtttggccgatttggcagctccttgacccccctgggggacctggaccaggatggctacaatgatgtggccatcggggctccctttggtggggagacccagcagggagtagtgtttgtatttcctgggggcccaggagggctgggctctaagccttcccaggttctgcagcccctgtgggcagccagccacaccccagacttctttggctctgcccttcgaggaggccgagacctggatggcaatggatatcctgatctgattgtggggtcctttggtgtggacaaggctgtggtatacaggggccgccccatcgtgtccgctagtgcctccctcaccatcttccccgccatgttcaacccagaggagcggagctgcagcttagaggggaaccctgtggcctgcatcaaccttagcttctgcctcaatgcttctggaaaacacgttgctgactccattggtttcacagtggaacttcagctggactggcagaagcagaagggaggggtacggcgggcactgttcctggcctccaggcaggcaaccctgacccagaccctgctcatccagaatggggctcgagaggattgcagagagatgaagatctacctcaggaacgagtcagaatttcgagacaaactctcgccgattcacatcgctctcaacttctccttggacccccaagccccagtggacagccacggcctcaggccagccctacattatcagagcaagagccggatagaggacaaggctcagatcttgctggactgtggagaagacaacatctgtgtgcctgacctgcagctggaagtgtttggggagcagaaccatgtgtacctgggtgacaagaatgccctgaacctcactttccatgcccagaatgtgggtgagggtggcgcctatgaggctgagcttcgggtcaccgcccctccagaggctgagtactcaggactcgtcagacacccagggaacttctccagcctgagctgtgactactttgccgtgaaccagagccgcctgctggtgtgtgacctgggcaaccccatgaaggcaggagccagtctgtggggtggccttcggtttacagtccctcatctccgggacactaagaaaaccatccagtttgacttccagatcctcagcaagaatctcaacaactcgcaaagcgacgtggtttcctttcggctctccgtggaggctcaggcccaggtcaccctgaacggtgtctccaagcctgaggcagtgctattcccagtaagcgactggcatccccgagaccagcctcagaaggaggaggacctgggacctgctgtccaccatgtctatgagctcatcaaccaaggccccagctccattagccagggtgtgctggaactcagctgtccccaggctctggaaggtcagcagctcctatatgtgaccagagttacgggactcaactgcaccaccaatcaccccattaacccaaagggcctggagttggatcccgagggttccctgcaccaccagcaaaaacgggaagctccaagccgcagctctgcttcctcgggacctcagatcctgaaatgcccggaggctgagtgtttcaggctgcgctgtgagctcgggcccctgcaccaacaagagagccaaagtctgcagttgcatttccgagtctgggccaagactttcttgcagcgggagcaccagccatttagcctgcagtgtgaggctgtgtacaaagccctgaagatgccctaccgaatcctgcctcggcagctgccccaaaaagagcgtcaggtggccacagctgtgcaatggaccaaggcagaaggcagctatggcgtcccactgtggatcatcatcctagccatcctgtttggcctcctgctcctaggtctactcatctacatcctctacaagcttggattcttcaaacgctccctcccatatggcaccgccatggaaaaagctcagctcaagcctccagccacctctgatgcctgagtcctcccaatttcagactcccattcctgaagaaccagtccccccaccctcattctactgaaaaggaggggtctgggtacttcttgaaggtgctgacggccagggagaagctcctctccccagcccagagacatacttgaagggccagagccaggggggtgaggagctggggatccctcccccccatgcactgtgaaggacccttgtttacacataccctcttcatggatgggggaactcagatccagggacagaggccccagcctccctgaagcctttgcattttggagagtttcctgaaacaacttggaaagataactaggaaatccattcacagttctttgggccagacatgccacaaggacttcctgtccagctccaacctgcaaagatctgtcctcagccttgccagagatccaaaagaagcccccagctaagaacctggaacttggggagttaagacctggcagctctggacagccccaccctggtgggccaacaaagaacactaactatgcatggtgccccaggaccagctcaggacagatgccacacaaggatagatgctggcccagggcccagagcccagctccaaggggaatcagaactcaaatggggccagatccagcctggggtctggagttgatctggaacccagactcagacattggcacctaatccaggcagatccaggactatatttgggcctgctccagacctgatcctggaggcccagttcaccctgatttaggagaagccaggaatttcccaggaccctgaaggggccatgatggcaacagatctggaacctcagcctggccagacacaggccctccctgttccccagagaaaggggagcccactgtcctgggcctgcagaatttgggttctgcctgccagctgcactgatgctgcccctcatctctctgcccaacccttccctcaccttggcaccagacacccaggacttatttaaactctgttgcaagtgcaataaatctgacccagtgcccccactgaccagaactagaa

SEQ ID NO: 143235 - DNA, 1240 bp, Homo sapiens
  Payload ID: 8299
  Gene Symbol: ITGA5
  Gene Name: integrin, alpha 5 (fibronectin receptor, alpha polypeptide)
  ENST ID: ENST00000435631
  CDS Start-End: 23-436
aggacagggaagagcgggcgctatggggagccggacgccagagtcccctctccacgccgtgcagctgcgctggggcccccggcgccgacccccgctgctgccgctgctgttgctgctgctgccgccgccacccagggtcgggggcttcaacttagacgcggaggccccagcagtactctcggggcccccgggctccttcttcggattctcagtggagttttaccggccgggaacagacgggctctcggctcctggagtcctcactgtccagctcagagggagaggagcctgtggagtacaagtccttgcagtggttcggggcaacagttcgagcccatggctcctccatcttggcatgcgctccactgtacagctggcgcacagagaaggagccactgagcgaccccgtgggcacctgctacctctccacagataacttcacccgaattctggagtatgcaccctgccgctcagatttcagctgggcagcaggacagggttactgccaaggaggcttcagtgccgagttcaccaagactggccgtgtggttttaggtggaccaggaagctatttctggcaaggccagatcctgtctgccactcaggagcagattgcagaatcttattaccccgagtacctgatcaacctggttcaggggcagctgcagactcgccaggccagttccatctatgatgacagctacctaggatactctgtggctgttggtgaattcagtggtgatgacacagaagactttgttgctggtgtgcccaaagggaacctcacttacggctatgtcaccatccttaatggctcagacattcgatccctctacaacttctcaggggaacagatggcctcctactttggctatgcagtggccgccacagacgtcaatggggacgggctggatgacttgctggtgggggcacccctgctcatggatcggacccctgacgggcggcctcaggaggtgggcagggtctacgtctacctgcagcacccagccggcatagagcccacgcccacccttaccctcactggccatgatgagtttggccgatttggcagctccttgacccccctgggggacctggaccaggatggctacaatgatgtggccatcggggctccctttggtggggagacccagcagggagtagtgtttgtatttcctgggggcccaggagggctgggctctaagccttcccaggttctgcagcccctgtgggcagccag

SEQ ID NO: 143236 - DNA, 1013 bp, Homo sapiens
  Payload ID: 8299
  Gene Symbol: ITGA5
  Gene Name: integrin, alpha 5 (fibronectin receptor, alpha polypeptide)
  ENST ID: ENST00000553071
  CDS Start-End: 1-361
gctgctgccgctgctgttgctgctgctgccgccgccacccagggtcgggggcttcaacttagacgcggaggccccagcagtactctcggggcccccgggctccttcttcggattctcagtggagttttaccggccgggaacagacggggtcagtgtgctggtgggagcacccaaggctaataccagccagccaggagtgctgcagggtggtgctgtctacctctgtccttggggtgccagccccacacagtgcacccccattgaatttgacagcaaaggcatgcgctccactgtacagctggcgcacagagaaggagccactgagcgaccccgtgggcacctgctacctctccacagataacttcacccgaattctggagtatgcaccctgccgctcagatttcagctgggcagcaggacagggttactgccaaggaggcttcagtgccgagttcaccaagactggccgtgtggttttaggtggaccaggaagctatttctggcaaggccagatcctgtctgccactcaggagcagattgcagaatcttattaccccgagtacctgatcaacctggttcaggggcagctgcagactcgccaggccagttccatctatgatgacagctacctaggatactctgtggctgttggtgaattcagtggtgatgacacagaagactttgttgctggtgtgcccaaagggaacctcacttacggctatgtcaccatccttaatggctcagacattcgatccctctacaacttctcaggggaacagatggcctcctactttggctatgcagtggccgccacagacgtcaatggggacgggctggatgacttgctggtgggggcacccctgctcatggatcggacccctgacgggcggcctcaggaggtgggcagggtctacgtctacctgcagcacccagccggcatagagcccacgcccacccttaccctcactggccatgatgagtttggccgatttggcagctccttgacccccctg

SEQ ID NO: 143237 - DNA, 757 bp, Homo sapiens
  Payload ID: 8299
  Gene Symbol: ITGA5
  Gene Name: integrin, alpha 5 (fibronectin receptor, alpha polypeptide)
  ENST ID: ENST00000547197
  CDS Start-End: 1-359
aacgggaagctccaagccgcagctctgcttcctcgggacctcagatcctgcgggagcaccagccatttagcctgcagtgtgaggctgtgtacaaagccctgaagatgccctaccgaatcctgcctcggcagctgccccaaaaagagcgtcaggtggccacagctgtgcaatggaccaaggcagaaggcagctatggcgtcccactgtggatcatcatcctagccatcctgtttggcctcctgctcctaggtctactcatctacatcctctacaagcttggattcttcaaacgctccctcccatatggcaccgccatggaaaaagctcagctcaagcctccagccacctctgatgcctgagtcctcccaatttcagactcccattcctgaagaaccagtccccccaccctcattctactgaaaaggaggggtctgggtacttcttgaaggtgctgacggccagggagaagctcctctccccagcccagagacatacttgaagggccagagccaggggggtgaggagctggggatccctcccccccatgcactgtgaaggacccttgtttacacataccctcttcatggatgggggaactcagatccagggacagaggccccagcctccctgaagcctttgcattttggagagtttcctgaaacaacttggaaagataactaggaaatccattcacagttctttgggccagacatgccacaaggacttcctgtccagctccaacctgcaaagatctgtc

SEQ ID NO: 143238 - DNA, 5618 bp, Homo sapiens
  Payload ID: 8300
  Gene Symbol: ITGA6
  Gene Name: integrin, alpha 6
  Uniprot ID: P23229
  ENST ID: ENST00000264107
  CDS Start-End: 235-3456
ttgataaaacgcctgcgagtctccagagaacaacgggctcattcagcggtcgcgagctgcccgcgagggggagcggccggacggagagcgcgacccgtcccgggggtggggccgggcgcagcggcgagaggaggcgaaggtggctgcggtagcagcagcgcggcagcctcggacccagcccggagcgcagggcggccgctgcaggtccccgctcccctccccgtgcgtccgcccatggccgccgccgggcagctgtgcttgctctacctgtcggcggggctcctgtcccggctcggcgcagccttcaacttggacactcgggaggacaacgtgatccggaaatatggagaccccgggagcctcttcggcttctcgctggccatgcactggcaactgcagcccgaggacaagcggctgttgctcgtgggggccccgcgggcagaagcgcttccactgcagagagccaacagaacgggagggctgtacagctgcgacatcaccgcccgggggccatgcacgcggatcgagtttgataacgatgctgaccccacgtcagaaagcaaggaagatcagtggatgggggtcaccgtccagagccaaggtccagggggcaaggtcgtgacatgtgctcaccgatatgaaaaaaggcagcatgttaatacgaagcaggaatcccgagacatctttgggcggtgttatgtcctgagtcagaatctcaggattgaagacgatatggatgggggagattggagcttttgtgatgggcgattgagaggccatgagaaatttggctcttgccagcaaggtgtagcagctacttttactaaagactttcattacattgtatttggagccccgggtacttataactggaaagggattgttcgtgtagagcaaaagaataacactttttttgacatgaacatctttgaagatgggccttatgaagttggtggagagactgagcatgatgaaagtctcgttcctgttcctgctaacagttacttaggtttttctttggactcagggaaaggtattgtttctaaagatgagatcacttttgtatctggtgctcccagagccaatcacagtggagccgtggttttgctgaagagagacatgaagtctgcacatctcctccctgagcacatattcgatggagaaggtctggcctcttcatttggctatgatgtggcggtggtggacctcaacaaggatgggtggcaagatatagttattggagccccacagtattttgatagagatggagaagttggaggtgcagtgtatgtctacatgaaccagcaaggcagatggaataatgtgaagccaattcgtcttaatggaaccaaagattctatgtttggcattgcagtaaaaaatattggagatattaatcaagatggctacccagatattgcagttggagctccgtatgatgacttgggaaaggtttttatctatcatggatctgcaaatggaataaataccaaaccaacacaggttctcaagggtatatcaccttattttggatattcaattgctggaaacatggaccttgatcgaaattcctaccctgatgttgctgttggttccctctcagattcagtaactattttcagatcccggcctgtgattaatattcagaaaaccatcacagtaactcctaacagaattgacctccgccagaaaacagcgtgtggggcgcctagtgggatatgcctccaggttaaatcctgttttgaatatactgctaaccccgctggttataatccttcaatatcaattgtgggcacacttgaagctgaaaaagaaagaagaaaatctgggctatcctcaagagttcagtttcgaaaccaaggttctgagcccaaatatactcaagaactaactctgaagaggcagaaacagaaagtgtgcatggaggaaaccctgtggctacaggataatatcagagataaactgcgtcccattcccataactgcctcagtggagatccaagagccaagctctcgtaggcgagtgaattcacttccagaagttcttccaattctgaattcagatgaacccaagacagctcatattgatgttcacttcttaaaagagggatgtggagacgacaatgtatgtaacagcaaccttaaactagaatataaattttgcacccgagaaggaaatcaagacaaattttcttatttaccaattcaaaaaggtgtaccagaactagttctaaaagatcagaaggatattgctttagaaataacagtgacaaacagcccttccaacccaaggaatcccacaaaagatggcgatgacgcccatgaggctaaactgattgcaacgtttccagacactttaacctattctgcatatagagaactgagggctttccctgagaaacagttgagttgtgttgccaaccagaatggctcgcaagctgactgtgagctcggaaatccttttaaaagaaattcaaatgtcactttttatttggttttaagtacaactgaagtcacctttgacaccccagatctggatattaatctgaagttagaaacaacaagcaatcaagataatttggctccaattacagctaaagcaaaagtggttattgaactgcttttatcggtctcgggagttgctaaaccttcccaggtgtattttggaggtacagttgttggcgagcaagctatgaaatctgaagatgaagtgggaagtttaatagagtatgaattcagggtaataaacttaggtaaacctcttacaaacctcggcacagcaaccttgaacattcagtggccaaaagaaattagcaatgggaaatggttgctttatttggtgaaagtagaatccaaaggattggaaaaggtaacttgtgagccacaaaaggagataaactccctgaacctaacggagtctcacaactcaagaaagaaacgggaaattactgaaaaacagatagatgataacagaaaattttctttatttgctgaaagaaaataccagactcttaactgtagcgtgaacgtgaactgtgtgaacatcagatgcccgctgcgggggctggacagcaaggcgtctcttattttgcgctcgaggttatggaacagcacatttctagaggaatattccaaactgaactacttggacattctcatgcgagccttcattgatgtgactgctgctgccgaaaatatcaggctgccaaatgcaggcactcaggttcgagtgactgtgtttccctcaaagactgtagctcagtattcgggagtaccttggtggatcatcctagtggctattctcgctgggatcttgatgcttgctttattagtgtttatactatggaagtgtggtttcttcaagagaaataagaaagatcattatgatgccacatatcacaaggctgagatccatgctcagccatctgataaagagaggcttacttctgatgcatagtattgatctacttctgtaattgtgtggattctttaaacgctctaggtacgatgacagtgttccccgataccatgctgtaaggatccggaaagaagagcgagagatcaaagatgaaaagtatattgataaccttgaaaaaaaacagtggatcacaaagtggaacgaaaatgaaagctactcatagcgggggcctaaaaaaaaaaagcttcacagtacccaaactgctttttccaactcagaaattcaatttggatttaaaagcctgctcaatccctgaggactgatttcagagtgactacacacagtacgaacctacagttttaactgtggatattgttacgtagcctaaggctcctgttttgcacagccaaatttaaaactgttggaatggatttttctttaactgccgtaatttaactttctgggttgcctttatttttggcgtggctgacttacatcatgtgttggggaagggcctgcccagttgcactcaggtgacatcctccagatagtgtagctgaggaggcacctacactcacctgcactaacagagtggccgtcctaacctcgggcctgctgcgcagacgtccatcacgttagctgtcccacatcacaagactatgccattggggtagttgtgtttcaacggaaagtgctgtcttaaactaaatgtgcaatagaaggtgatgttgccatcctaccgtcttttcctgtttcctagctgtgtgaatacctgctcacgtcaaatgcatacaagtttcattctccctttcactaaaacacacaggtgcaacagacttgaatgctagttatacttatttgtatatggtatttattttttcttttctttacaaaccattttgttattgactaacaggccaaagagtctccagtttacccttcaggttggtttaatcaatcagaattagagcatgggaggtcatcactttgacctaaattatttactgcaaaaagaaaatctttataaatgtaccagagagagttgttttaataacttatctataaactataacctctccttcatgacagcctccaccccacaacccaaaaggtttaagaaatagaattataactgtaaagatgtttatttcaggcattggatattttttactttagaagcctgcataatgtttctggatttcatactgtaacattcaggaattcttggagaaaatgggtttattcactgaactctagtgcggtttactcactgctgcaaatactgtatattcaggacttgaaagaaatggtgaatgcctatggtggatccaaactgatccagtataagactactgaatctgctaccaaaacagttaatcagtgagtcgatgttctattttttgttttgtttcctcccctatctgtattcccaaaaattactttggggctaatttaacaagaactttaaattgtgttttaattgtaaaaatggcagggggtggaattattactctatacattcaacagagactgaatagatatgaaagctgattttttttaattaccatgcttcacaatgttaagttatatggggagcaacagcaaacaggtgctaatttgttttggatatagtataagcagtgtctgtgttttgaaagaatagaacacagtttgtagtgccactgttgttttgggggggcttttttcttttcggaaatcttaaaccttaagatactaaggacgttgttttggttgtactttggaattcttagtcacaaaatatattttgtttacaaaaatttctgtaaaacaggttataacagtgtttaaagtctcagtttcttgcttggggaacttgtgtccctaatgtgtttagattgctagattgctaaggagctgatactttgacagtgtttttagacctgtgttactaaaaaaaagatgaatgtcctgaaaagggtgttgggagggtggttcaacaaagaaacaaagatgttatggtgtttagatttatggttgttaaaaatgtcatctcaagtcaagtcactggtctgtttgcatttgatacatttttgtactaactagcattgtaaaattatttcatgattagaaattacctgtggatatttgtataaaagtgtgaaataaattttttataaaagtgttcattgtttcgtaacacagcattgtatatgtgaagc

SEQ ID NO: 143239 - DNA, 3544 bp, Homo sapiens
  Payload ID: 8300
  Gene Symbol: ITGA6
  Gene Name: integrin, alpha 6
  Uniprot ID: P23229
  ENST ID: ENST00000409532
  CDS Start-End: 214-3078
acgtcgtggcttccgggcaggtaccgggcagctggagacgccagagccggcgggttgctcgtgggggccccgcgggcagaagcgcttccactgcagagagccaacagaacgggagggctgtacagctgcgacatcaccgcccgggggccatgcacgcggatcgagtttgataacgatgctgaccccacgtcagaaagcaaggaagatcagtggatgggggtcaccgtccagagccaaggtccagggggcaaggtcgtgacatgtgctcaccgatatgaaaaaaggcagcatgttaatacgaagcaggaatcccgagacatctttgggcggtgttatgtcctgagtcagaatctcaggattgaagacgatatggatgggggagattggagcttttgtgatgggcgattgagaggccatgagaaatttggctcttgccagcaaggtgtagcagctacttttactaaagactttcattacattgtatttggagccccgggtacttataactggaaaggcctgctgtttttgaccagcgtttcctatacagatcctgatcagtttgtttataaaacacggcctccccgggagcagcctgacacattccctgatgtgatgatgaatagctacctaggtttttctttggactcagggaaaggtattgtttctaaagatgagatcacttttgtatctggtgctcccagagccaatcacagtggagccgtggttttgctgaagagagacatgaagtctgcacatctcctccctgagcacatattcgatggagaaggtctggcctcttcatttggctatgatgtggcggtggtggacctcaacaaggatgggtggcaagatatagttattggagccccacagtattttgatagagatggagaagttggaggtgcagtgtatgtctacatgaaccagcaaggcagatggaataatgtgaagccaattcgtcttaatggaaccaaagattctatgtttggcattgcagtaaaaaatattggagatattaatcaagatggctacccagatattgcagttggagctccgtatgatgacttgggaaaggtttttatctatcatggatctgcaaatggaataaataccaaaccaacacaggttctcaagggtatatcaccttattttggatattcaattgctggaaacatggaccttgatcgaaattcctaccctgatgttgctgttggttccctctcagattcagtaactattttcagatcccggcctgtgattaatattcagaaaaccatcacagtaactcctaacagaattgacctccgccagaaaacagcgtgtggggcgcctagtgggatatgcctccaggttaaatcctgttttgaatatactgctaaccccgctggttataatccttcaatatcaattgtgggcacacttgaagctgaaaaagaaagaagaaaatctgggctatcctcaagagttcagtttcgaaaccaaggttctgagcccaaatatactcaagaactaactctgaagaggcagaaacagaaagtgtgcatggaggaaaccctgtggctacaggataatatcagagataaactgcgtcccattcccataactgcctcagtggagatccaagagccaagctctcgtaggcgagtgaattcacttccagaagttcttccaattctgaattcagatgaacccaagacagctcatattgatgttcacttcttaaaagagggatgtggagacgacaatgtatgtaacagcaaccttaaactagaatataaattttgcacccgagaaggaaatcaagacaaattttcttatttaccaattcaaaaaggtgtaccagaactagttctaaaagatcagaaggatattgctttagaaataacagtgacaaacagcccttccaacccaaggaatcccacaaaagatggcgatgacgcccatgaggctaaactgattgcaacgtttccagacactttaacctattctgcatatagagaactgagggctttccctgagaaacagttgagttgtgttgccaaccagaatggctcgcaagctgactgtgagctcggaaatccttttaaaagaaattcaaatgtcactttttatttggttttaagtacaactgaagtcacctttgacaccccagatctggatattaatctgaagttagaaacaacaagcaatcaagataatttggctccaattacagctaaagcaaaagtggttattgaactgcttttatcggtctcgggagttgctaaaccttcccaggtgtattttggaggtacagttgttggcgagcaagctatgaaatctgaagatgaagtgggaagtttaatagagtatgaattcagggtaataaacttaggtaaacctcttacaaacctcggcacagcaaccttgaacattcagtggccaaaagaaattagcaatgggaaatggttgctttatttggtgaaagtagaatccaaaggattggaaaaggtaacttgtgagccacaaaaggagataaactccctgaacctaacggagtctcacaactcaagaaagaaacgggaaattactgaaaaacagatagatgataacagaaaattttctttatttgctgaaagaaaataccagactcttaactgtagcgtgaacgtgaactgtgtgaacatcagatgcccgctgcgggggctggacagcaaggcgtctcttattttgcgctcgaggttatggaacagcacatttctagaggaatattccaaactgaactacttggacattctcatgcgagccttcattgatgtgactgctgctgccgaaaatatcaggctgccaaatgcaggcactcaggttcgagtgactgtgtttccctcaaagactgtagctcagtattcgggagtaccttggtggatcatcctagtggctattctcgctgggatcttgatgcttgctttattagtgtttatactatggaagtgtggtttcttcaagagaaataagaaagatcattatgatgccacatatcacaaggctgagatccatgctcagccatctgataaagagaggcttacttctgatgcatagtattgatctacttctgtaattgtgtggattctttaaacgctctaggtacgatgacagtgttccccgataccatgctgtaaggatccggaaagaagagcgagagatcaaagatgaaaagtatattgataaccttgaaaaaaaacagtggatcacaaagtggaacgaaaatgaaagctactcatagcgggggcctaaaaaaaaaaagcttcacagtacccaaactgctttttccaactcagaaattcaatttggatttaaaagcctgctcaatccctgaggactgatttcagagtgactacacacagtacgaacctacagttttaactgtggatattgttacgtagcctaaggctcctgttttgcacagccaaatttaaaactgttggaatggatttttctttaactgccgtaatttaactttctgggttgcctttatttttggcgtggctgacttacatcatgtgtt

SEQ ID NO: 143240 - DNA, 5306 bp, Homo sapiens
  Payload ID: 8300
  Gene Symbol: ITGA6
  Gene Name: integrin, alpha 6
  Uniprot ID: P23229
  ENST ID: ENST00000409080
  CDS Start-End: 1-3276
atggccgccgccgggcagctgtgcttgctctacctgtcggcggggctcctgtcccggctcggcgcagccttcaacttggacactcgggaggacaacgtgatccggaaatatggagaccccgggagcctcttcggcttctcgctggccatgcactggcaactgcagcccgaggacaagcggctgttgctcgtgggggccccgcgggcagaagcgcttccactgcagagagccaacagaacgggagggctgtacagctgcgacatcaccgcccgggggccatgcacgcggatcgagtttgataacgatgctgaccccacgtcagaaagcaaggaagatcagtggatgggggtcaccgtccagagccaaggtccagggggcaaggtcgtgacatgtgctcaccgatatgaaaaaaggcagcatgttaatacgaagcaggaatcccgagacatctttgggcggtgttatgtcctgagtcagaatctcaggattgaagacgatatggatgggggagattggagcttttgtgatgggcgattgagaggccatgagaaatttggctcttgccagcaaggtgtagcagctacttttactaaagactttcattacattgtatttggagccccgggtacttataactggaaagggattgttcgtgtagagcaaaagaataacactttttttgacatgaacatctttgaagatgggccttatgaagttggtggagagactgagcatgatgaaagtctcgttcctgttcctgctaacagttacttaggtttttctttggactcagggaaaggtattgtttctaaagatgagatcacttttgtatctggtgctcccagagccaatcacagtggagccgtggttttgctgaagagagacatgaagtctgcacatctcctccctgagcacatattcgatggagaaggtctggcctcttcatttggctatgatgtggcggtggtggacctcaacaaggatgggtggcaagatatagttattggagccccacagtattttgatagagatggagaagttggaggtgcagtgtatgtctacatgaaccagcaaggcagatggaataatgtgaagccaattcgtcttaatggaaccaaagattctatgtttggcattgcagtaaaaaatattggagatattaatcaagatggctacccagatattgcagttggagctccgtatgatgacttgggaaaggtttttatctatcatggatctgcaaatggaataaataccaaaccaacacaggttctcaagggtatatcaccttattttggatattcaattgctggaaacatggaccttgatcgaaattcctaccctgatgttgctgttggttccctctcagattcagtaactattttcagatcccggcctgtgattaatattcagaaaaccatcacagtaactcctaacagaattgacctccgccagaaaacagcgtgtggggcgcctagtgggatatgcctccaggttaaatcctgttttgaatatactgctaaccccgctggttataatccttcaatatcaattgtgggcacacttgaagctgaaaaagaaagaagaaaatctgggctatcctcaagagttcagtttcgaaaccaaggttctgagcccaaatatactcaagaactaactctgaagaggcagaaacagaaagtgtgcatggaggaaaccctgtggctacaggataatatcagagataaactgcgtcccattcccataactgcctcagtggagatccaagagccaagctctcgtaggcgagtgaattcacttccagaagttcttccaattctgaattcagatgaacccaagacagctcatattgatgttcacttcttaaaagagggatgtggagacgacaatgtatgtaacagcaaccttaaactagaatataaattttgcacccgagaaggaaatcaagacaaattttcttatttaccaattcaaaaaggtgtaccagaactagttctaaaagatcagaaggatattgctttagaaataacagtgacaaacagcccttccaacccaaggaatcccacaaaagatggcgatgacgcccatgaggctaaactgattgcaacgtttccagacactttaacctattctgcatatagagaactgagggctttccctgagaaacagttgagttgtgttgccaaccagaatggctcgcaagctgactgtgagctcggaaatccttttaaaagaaattcaaatgtcactttttatttggttttaagtacaactgaagtcacctttgacaccccagatctggatattaatctgaagttagaaacaacaagcaatcaagataatttggctccaattacagctaaagcaaaagtggttattgaactgcttttatcggtctcgggagttgctaaaccttcccaggtgtattttggaggtacagttgttggcgagcaagctatgaaatctgaagatgaagtgggaagtttaatagagtatgaattcagggtaataaacttaggtaaacctcttacaaacctcggcacagcaaccttgaacattcagtggccaaaagaaattagcaatgggaaatggttgctttatttggtgaaagtagaatccaaaggattggaaaaggtaacttgtgagccacaaaaggagataaactccctgaacctaacggagtctcacaactcaagaaagaaacgggaaattactgaaaaacagatagatgataacagaaaattttctttatttgctgaaagaaaataccagactcttaactgtagcgtgaacgtgaactgtgtgaacatcagatgcccgctgcgggggctggacagcaaggcgtctcttattttgcgctcgaggttatggaacagcacatttctagaggaatattccaaactgaactacttggacattctcatgcgagccttcattgatgtgactgctgctgccgaaaatatcaggctgccaaatgcaggcactcaggttcgagtgactgtgtttccctcaaagactgtagctcagtattcgggagtaccttggtggatcatcctagtggctattctcgctgggatcttgatgcttgctttattagtgtttatactatggaagtgtggattctttaaacgctctaggtacgatgacagtgttccccgataccatgctgtaaggatccggaaagaagagcgagagatcaaagatgaaaagtatattgataaccttgaaaaaaaacagtggatcacaaagtggaacgaaaatgaaagctactcatagcgggggcctaaaaaaaaaaagcttcacagtacccaaactgctttttccaactcagaaattcaatttggatttaaaagcctgctcaatccctgaggactgatttcagagtgactacacacagtacgaacctacagttttaactgtggatattgttacgtagcctaaggctcctgttttgcacagccaaatttaaaactgttggaatggatttttctttaactgccgtaatttaactttctgggttgcctttatttttggcgtggctgacttacatcatgtgttggggaagggcctgcccagttgcactcaggtgacatcctccagatagtgtagctgaggaggcacctacactcacctgcactaacagagtggccgtcctaacctcgggcctgctgcgcagacgtccatcacgttagctgtcccacatcacaagactatgccattggggtagttgtgtttcaacggaaagtgctgtcttaaactaaatgtgcaatagaaggtgatgttgccatcctaccgtcttttcctgtttcctagctgtgtgaatacctgctcacgtcaaatgcatacaagtttcattctccctttcactaaaacacacaggtgcaacagacttgaatgctagttatacttatttgtatatggtatttattttttcttttctttacaaaccattttgttattgactaacaggccaaagagtctccagtttacccttcaggttggtttaatcaatcagaattagagcatgggaggtcatcactttgacctaaattatttactgcaaaaagaaaatctttataaatgtaccagagagagttgttttaataacttatctataaactataacctctccttcatgacagcctccaccccacaacccaaaaggtttaagaaatagaattataactgtaaagatgtttatttcaggcattggatattttttactttagaagcctgcataatgtttctggatttcatactgtaacattcaggaattcttggagaaaatgggtttattcactgaactctagtgcggtttactcactgctgcaaatactgtatattcaggacttgaaagaaatggtgaatgcctatggtggatccaaactgatccagtataagactactgaatctgctaccaaaacagttaatcagtgagtcgatgttctattttttgttttgtttcctcccctatctgtattcccaaaaattactttggggctaatttaacaagaactttaaattgtgttttaattgtaaaaatggcagggggtggaattattactctatacattcaacagagactgaatagatatgaaagctgattttttttaattaccatgcttcacaatgttaagttatatggggagcaacagcaaacaggtgctaatttgttttggatatagtataagcagtgtctgtgttttgaaagaatagaacacagtttgtagtgccactgttgttttgggggggcttttttcttttcggaaatcttaaaccttaagatactaaggacgttgttttggttgtactttggaattcttagtcacaaaatatattttgtttacaaaaatttctgtaaaacaggttataacagtgtttaaagtctcagtttcttgcttggggaacttgtgtccctaatgtgtttagattgctagattgctaaggagctgatactttgacagtgtttttagacctgtgttactaaaaaaaagatgaatgtcctgaaaagggtgttgggagggtggttcaacaaagaaacaaagatgttatggtgtttagatttatggttgttaaaaatgtcatctcaagtcaagtcactggtctgtttgcatttgatacatttttgtactaactagcattgtaaaattatttcatgattagaaattacctgtggatatttgtataaaagtgtgaaataaattttttataaaagtgttcattgtttcgtaacacagcattgtatatgtgaagcaaactctaaaattataaatgacaacctgaattatctatttcatcaaaccaaa

SEQ ID NO: 143241 - DNA, 853 bp, Homo sapiens
  Payload ID: 8300
  Gene Symbol: ITGA6
  Gene Name: integrin, alpha 6
  ENST ID: ENST00000416789
  CDS Start-End: 1-777
acaagcaatcaagataatttggctccaattacagctaaagcaaaagtggttattgaactgcttttatcggtctcgggagttgctaaaccttcccaggtgtattttggaggtacagttgttggcgagcaagctatgaaatctgaagatgaagtgggaagtttaatagagtatgaattcagggagtctcacaactcaagaaagaaacgggaaattactgaaaaacagatagatgataacagaaaattttctttatttgctgaaagaaaataccagactcttaactgtagcgtgaacgtgaactgtgtgaacatcagatgcccgctgcgggggctggacagcaaggcgtctcttattttgcgctcgaggttatggaacagcacatttctagaggaatattccaaactgaactacttggacattctcatgcgagccttcattgatgtgactgctgctgccgaaaatatcaggctgccaaatgcaggcactcaggttcgagtgactgtgtttccctcaaagactgtagctcagtattcgggagtaccttggtggatcatcctagtggctattctcgctgggatcttgatgcttgctttattagtgtttatactatggaagtgtggattctttaaacgctctaggtacgatgacagtgttccccgataccatgctgtaaggatccggaaagaagagcgagagatcaaagatgaaaagtatattgataaccttgaaaaaaaacagtggatcacaaagtggaacgaaaatgaaagctactcatagcgggggcctaaaaaaaaaaagcttcacagtacccaaactgctttttccaactcagaaattcaatttggatttaaaa

SEQ ID NO: 143242 - DNA, 3261 bp, Homo sapiens
  Payload ID: 8300
  Gene Symbol: ITGA6
  Gene Name: integrin, alpha 6
  Uniprot ID: P23229
  ENST ID: ENST00000458358
  CDS Start-End: 1-3261
atggccgccgccgggcagctgtgcttgctctacctgtcggcggggctcctgtcccggctcggcgcagccttcaacttggacactcgggaggacaacgtgatccggaaatatggagaccccgggagcctcttcggcttctcgctggccatgcactggcaactgcagcccgaggacaagcggctgttgctcgtgggggccccgcgggcagaagcgcttccactgcagagagccaacagaacgggagggctgtacagctgcgacatcaccgcccgggggccatgcacgcggatcgagtttgataacgatgctgaccccacgtcagaaagcaaggaagatcagtggatgggggtcaccgtccagagccaaggtccagggggcaaggtcgtgacatgtgctcaccgatatgaaaaaaggcagcatgttaatacgaagcaggaatcccgagacatctttgggcggtgttatgtcctgagtcagaatctcaggattgaagacgatatggatgggggagattggagcttttgtgatgggcgattgagaggccatgagaaatttggctcttgccagcaaggtgtagcagctacttttactaaagactttcattacattgtatttggagccccgggtacttataactggaaaggcctgctgtttttgaccagcgtttcctatacagatcctgatcagtttgtttataaaacacggcctccccgggagcagcctgacacattccctgatgtgatgatgaatagctacctaggtttttctttggactcagggaaaggtattgtttctaaagatgagatcacttttgtatctggtgctcccagagccaatcacagtggagccgtggttttgctgaagagagacatgaagtctgcacatctcctccctgagcacatattcgatggagaaggtctggcctcttcatttggctatgatgtggcggtggtggacctcaacaaggatgggtggcaagatatagttattggagccccacagtattttgatagagatggagaagttggaggtgcagtgtatgtctacatgaaccagcaaggcagatggaataatgtgaagccaattcgtcttaatggaaccaaagattctatgtttggcattgcagtaaaaaatattggagatattaatcaagatggctacccagatattgcagttggagctccgtatgatgacttgggaaaggtttttatctatcatggatctgcaaatggaataaataccaaaccaacacaggttctcaagggtatatcaccttattttggatattcaattgctggaaacatggaccttgatcgaaattcctaccctgatgttgctgttggttccctctcagattcagtaactattttcagatcccggcctgtgattaatattcagaaaaccatcacagtaactcctaacagaattgacctccgccagaaaacagcgtgtggggcgcctagtgggatatgcctccaggttaaatcctgttttgaatatactgctaaccccgctggttataatccttcaatatcaattgtgggcacacttgaagctgaaaaagaaagaagaaaatctgggctatcctcaagagttcagtttcgaaaccaaggttctgagcccaaatatactcaagaactaactctgaagaggcagaaacagaaagtgtgcatggaggaaaccctgtggctacaggataatatcagagataaactgcgtcccattcccataactgcctcagtggagatccaagagccaagctctcgtaggcgagtgaattcacttccagaagttcttccaattctgaattcagatgaacccaagacagctcatattgatgttcacttcttaaaagagggatgtggagacgacaatgtatgtaacagcaaccttaaactagaatataaattttgcacccgagaaggaaatcaagacaaattttcttatttaccaattcaaaaaggtgtaccagaactagttctaaaagatcagaaggatattgctttagaaataacagtgacaaacagcccttccaacccaaggaatcccacaaaagatggcgatgacgcccatgaggctaaactgattgcaacgtttccagacactttaacctattctgcatatagagaactgagggctttccctgagaaacagttgagttgtgttgccaaccagaatggctcgcaagctgactgtgagctcggaaatccttttaaaagaaattcaaatgtcactttttatttggttttaagtacaactgaagtcacctttgacaccccagatctggatattaatctgaagttagaaacaacaagcaatcaagataatttggctccaattacagctaaagcaaaagtggttattgaactgcttttatcggtctcgggagttgctaaaccttcccaggtgtattttggaggtacagttgttggcgagcaagctatgaaatctgaagatgaagtgggaagtttaatagagtatgaattcagggtaataaacttaggtaaacctcttacaaacctcggcacagcaaccttgaacattcagtggccaaaagaaattagcaatgggaaatggttgctttatttggtgaaagtagaatccaaaggattggaaaaggtaacttgtgagccacaaaaggagataaactccctgaacctaacggagtctcacaactcaagaaagaaacgggaaattactgaaaaacagatagatgataacagaaaattttctttatttgctgaaagaaaataccagactcttaactgtagcgtgaacgtgaactgtgtgaacatcagatgcccgctgcgggggctggacagcaaggcgtctcttattttgcgctcgaggttatggaacagcacatttctagaggaatattccaaactgaactacttggacattctcatgcgagccttcattgatgtgactgctgctgccgaaaatatcaggctgccaaatgcaggcactcaggttcgagtgactgtgtttccctcaaagactgtagctcagtattcgggagtaccttggtggatcatcctagtggctattctcgctgggatcttgatgcttgctttattagtgtttatactatggaagtgtggattctttaaacgctctaggtacgatgacagtgttccccgataccatgctgtaaggatccggaaagaagagcgagagatcaaagatgaaaagtatattgataaccttgaaaaaaaacagtggatcacaaagtggaacgaaaatgaaagctactcatag

SEQ ID NO: 143243 - DNA, 3393 bp, Homo sapiens
  Payload ID: 8300
  Gene Symbol: ITGA6
  Gene Name: integrin, alpha 6
  Uniprot ID: P23229
  ENST ID: ENST00000442250
  CDS Start-End: 1-3393
atggccgccgccgggcagctgtgcttgctctacctgtcggcggggctcctgtcccggctcggcgcagccttcaacttggacactcgggaggacaacgtgatccggaaatatggagaccccgggagcctcttcggcttctcgctggccatgcactggcaactgcagcccgaggacaagcggctgttgctcgtgggggccccgcgggcagaagcgcttccactgcagagagccaacagaacgggagggctgtacagctgcgacatcaccgcccgggggccatgcacgcggatcgagtttgataacgatgctgaccccacgtcagaaagcaaggaagatcagtggatgggggtcaccgtccagagccaaggtccagggggcaaggtcgtgacatgtgctcaccgatatgaaaaaaggcagcatgttaatacgaagcaggaatcccgagacatctttgggcggtgttatgtcctgagtcagaatctcaggattgaagacgatatggatgggggagattggagcttttgtgatgggcgattgagaggccatgagaaatttggctcttgccagcaaggtgtagcagctacttttactaaagactttcattacattgtatttggagccccgggtacttataactggaaagggattgttcgtgtagagcaaaagaataacactttttttgacatgaacatctttgaagatgggccttatgaagttggtggagagactgagcatgatgaaagtctcgttcctgttcctgctaacagttacttaggcctgctgtttttgaccagcgtttcctatacagatcctgatcagtttgtttataaaacacggcctccccgggagcagcctgacacattccctgatgtgatgatgaatagctacctaggtttttctttggactcagggaaaggtattgtttctaaagatgagatcacttttgtatctggtgctcccagagccaatcacagtggagccgtggttttgctgaagagagacatgaagtctgcacatctcctccctgagcacatattcgatggagaaggtctggcctcttcatttggctatgatgtggcggtggtggacctcaacaaggatgggtggcaagatatagttattggagccccacagtattttgatagagatggagaagttggaggtgcagtgtatgtctacatgaaccagcaaggcagatggaataatgtgaagccaattcgtcttaatggaaccaaagattctatgtttggcattgcagtaaaaaatattggagatattaatcaagatggctacccagatattgcagttggagctccgtatgatgacttgggaaaggtttttatctatcatggatctgcaaatggaataaataccaaaccaacacaggttctcaagggtatatcaccttattttggatattcaattgctggaaacatggaccttgatcgaaattcctaccctgatgttgctgttggttccctctcagattcagtaactattttcagatcccggcctgtgattaatattcagaaaaccatcacagtaactcctaacagaattgacctccgccagaaaacagcgtgtggggcgcctagtgggatatgcctccaggttaaatcctgttttgaatatactgctaaccccgctggttataatccttcaatatcaattgtgggcacacttgaagctgaaaaagaaagaagaaaatctgggctatcctcaagagttcagtttcgaaaccaaggttctgagcccaaatatactcaagaactaactctgaagaggcagaaacagaaagtgtgcatggaggaaaccctgtggctacaggataatatcagagataaactgcgtcccattcccataactgcctcagtggagatccaagagccaagctctcgtaggcgagtgaattcacttccagaagttcttccaattctgaattcagatgaacccaagacagctcatattgatgttcacttcttaaaagagggatgtggagacgacaatgtatgtaacagcaaccttaaactagaatataaattttgcacccgagaaggaaatcaagacaaattttcttatttaccaattcaaaaaggtgtaccagaactagttctaaaagatcagaaggatattgctttagaaataacagtgacaaacagcccttccaacccaaggaatcccacaaaagatggcgatgacgcccatgaggctaaactgattgcaacgtttccagacactttaacctattctgcatatagagaactgagggctttccctgagaaacagttgagttgtgttgccaaccagaatggctcgcaagctgactgtgagctcggaaatccttttaaaagaaattcaaatgtcactttttatttggttttaagtacaactgaagtcacctttgacaccccagatctggatattaatctgaagttagaaacaacaagcaatcaagataatttggctccaattacagctaaagcaaaagtggttattgaactgcttttatcggtctcgggagttgctaaaccttcccaggtgtattttggaggtacagttgttggcgagcaagctatgaaatctgaagatgaagtgggaagtttaatagagtatgaattcagggtaataaacttaggtaaacctcttacaaacctcggcacagcaaccttgaacattcagtggccaaaagaaattagcaatgggaaatggttgctttatttggtgaaagtagaatccaaaggattggaaaaggtaacttgtgagccacaaaaggagataaactccctgaacctaacggagtctcacaactcaagaaagaaacgggaaattactgaaaaacagatagatgataacagaaaattttctttatttgctgaaagaaaataccagactcttaactgtagcgtgaacgtgaactgtgtgaacatcagatgcccgctgcgggggctggacagcaaggcgtctcttattttgcgctcgaggttatggaacagcacatttctagaggaatattccaaactgaactacttggacattctcatgcgagccttcattgatgtgactgctgctgccgaaaatatcaggctgccaaatgcaggcactcaggttcgagtgactgtgtttccctcaaagactgtagctcagtattcgggagtaccttggtggatcatcctagtggctattctcgctgggatcttgatgcttgctttattagtgtttatactatggaagtgtggattctttaaacgctctaggtacgatgacagtgttccccgataccatgctgtaaggatccggaaagaagagcgagagatcaaagatgaaaagtatattgataaccttgaaaaaaaacagtggatcacaaagtggaacgaaaatgaaagctactcatag

SEQ ID NO: 143244 - DNA, 970 bp, Homo sapiens
  Payload ID: 8300
  Gene Symbol: ITGA6
  Gene Name: integrin, alpha 6
  ENST ID: ENST00000412899
  CDS Start-End: 278-970
aattctgtccacagagggcggcgcagtggggctgcttcgccgcgagctcgcctccggggctcccacgtcgtggcttccgggcaggtaccgggcagctggagacgccagagccggcgggttgctcgtgggggccccgcgggcagaagcgcttccactgcagagagccaacagaacgggagggctgtacagctgcgacatcaccgcccgggggccatgcacgcggatcgagtttgataacgatgctgaccccacgtcagaaagcaaggaagatcagtggatgggggtcaccgtccagagccaaggtccagggggcaaggtcgtgacatgtgctcaccgatatgaaaaaaggcagcatgttaatacgaagcaggaatcccgagacatctttgggcggtgttatgtcctgagtcagaatctcaggattgaagacgatatggatgggggagattggagcttttgtgatgggcgattgagaggccatgagaaatttggctcttgccagcaaggtgtagcagctacttttactaaagactttcattacattgtatttggagccccgggtacttataactggaaagggattgttcgtgtagagcaaaagaataacactttttttgacatgaacatctttgaagatgggccttatgaagttggtggagagactgagcatgatgaaagtctcgttcctgttcctgctaacagttacttaggtttttctttggactcagggaaaggtattgtttctaaagatgagatcacttttgtatctggtgctcccagagccaatcacagtggagccgtggttttgctgaagagagacatgaagtctgcacatctcctccctgagcacatattcgatggagaaggtctggcctcttcatttggctatgatgtggcggtggtggacctcaacaaggatgggtggcaagatatagttattggagccccacagtattttgatagagatgga

SEQ ID NO: 143245 - DNA, 4120 bp, Homo sapiens
  Payload ID: 8301
  Gene Symbol: ITGA7
  Gene Name: integrin, alpha 7
  Uniprot ID: Q13683
  ENST ID: ENST00000257879
  CDS Start-End: 217-3630
gccggagctgcggctgctgtagttgtcctagccggtgctggggcggcggggtggcggagcggcgggcgggcgggagggctggcggggcgaacgtctgggagacgtctgaaagaccaacgagactttggagaccagagacgcgcctggggggacctggggcttggggcgtgcgagatttcccttgcattcgctgggagctcgcgcagggatcgtcccatggccggggctcggagccgcgacccttggggggcctccgggatttgctacctttttggctccctgctcgtcgaactgctcttctcacgggctgtcgccttcaatctggacgtgatgggtgccttgcgcaaggagggcgagccaggcagcctcttcggcttctctgtggccctgcaccggcagttgcagccccgaccccagagctggctgctggtgggtgctccccaggccctggctcttcctgggcagcaggcgaatcgcactggaggcctcttcgcttgcccgttgagcctggaggagactgactgctacagagtggacatcgaccagggagctgatatgcaaaaggaaagcaaggagaaccagtggttgggagtcagtgttcggagccaggggcctgggggcaagattgttacctgtgcacaccgatatgaggcaaggcagcgagtggaccagatcctggagacgcgggatatgattggtcgctgctttgtgctcagccaggacctggccatccgggatgagttggatggtggggaatggaagttctgtgagggacgcccccaaggccatgaacaatttgggttctgccagcagggcacagctgccgccttctcccctgatagccactacctcctctttggggccccaggaacctataattggaaggggttgctttttgtgaccaacattgatagctcagaccccgaccagctggtgtataaaactttggaccctgctgaccggctcccaggaccagccggagacttggccctcaatagctacttaggcttctctattgactcggggaaaggtctggtgcgtgcagaagagctgagctttgtggctggagccccccgcgccaaccacaagggtgctgtggtcatcctgcgcaaggacagcgccagtcgcctggtgcccgaggttatgctgtctggggagcgcctgacctccggctttggctactcactggctgtggctgacctcaacagtgatggctggccagacctgatagtgggtgccccctacttctttgagcgccaagaagagctggggggtgctgtgtatgtgtacttgaaccaggggggtcactgggctgggatctcccctctccggctctgcggctcccctgactccatgttcgggatcagcctggctgtcctgggggacctcaaccaagatggctttccagatattgcagtgggtgccccctttgatggtgatgggaaagtcttcatctaccatgggagcagcctgggggttgtcgccaaaccttcacaggtgctggagggcgaggctgtgggcatcaagagcttcggctactccctgtcaggcagcttggatatggatgggaaccaataccctgacctgctggtgggctccctggctgacaccgcagtgctcttcagggccagacccatcctccatgtctcccatgaggtctctattgctccacgaagcatcgacctggagcagcccaactgtgctggcggccactcggtctgtgtggacctaagggtctgtttcagctacattgcagtccccagcagctatagccctactgtggccctggactatgtgttagatgcggacacagaccggaggctccggggccaggttccccgtgtgacgttcctgagccgtaacctggaagaacccaagcaccaggcctcgggcaccgtgtggctgaagcaccagcatgaccgagtctgtggagacgccatgttccagctccaggaaaatgtcaaagacaagcttcgggccattgtagtgaccttgtcctacagtctccagacccctcggctccggcgacaggctcctggccaggggctgcctccagtggcccccatcctcaatgcccaccagcccagcacccagcgggcagagatccacttcctgaagcaaggctgtggtgaagacaagatctgccagagcaatctgcagctggtccgcgcccgcttctgtacccgggtcagcgacacggaattccaacctctgcccatggatgtggatggaacaacagccctgtttgcactgagtgggcagccagtcattggcctggagctgatggtcaccaacctgccatcggacccagcccagccccaggctgatggggatgatgcccatgaagcccagctcctggtcatgcttcctgactcactgcactactcaggggtccgggccctggaccctgcggagaagccactctgcctgtccaatgagaatgcctcccatgttgagtgtgagctggggaaccccatgaagagaggtgcccaggtcaccttctacctcatccttagcacctccgggatcagcattgagaccacggaactggaggtagagctgctgttggccacgatcagtgagcaggagctgcatccagtctctgcacgagcccgtgtcttcattgagctgccactgtccattgcaggaatggccattccccagcaactcttcttctctggtgtggtgaggggcgagagagccatgcagtctgagcgggatgtgggcagcaaggtcaagtatgaggtcacggtttccaaccaaggccagtcgctcagaaccctgggctctgccttcctcaacatcatgtggcctcatgagattgccaatgggaagtggttgctgtacccaatgcaggttgagctggagggcgggcaggggcctgggcagaaagggctttgctctcccaggcccaacatcctccacctggatgtggacagtagggataggaggcggcgggagctggagccacctgagcagcaggagcctggtgagcggcaggagcccagcatgtcctggtggccagtgtcctctgctgagaagaagaaaaacatcaccctggactgcgcccggggcacggccaactgtgtggtgttcagctgcccactctacagctttgaccgcgcggctgtgctgcatgtctggggccgtctctggaacagcacctttctggaggagtactcagctgtgaagtccctggaagtgattgtccgggccaacatcacagtgaagtcctccataaagaacttgatgctccgagatgcctccacagtgatcccagtgatggtatacttggaccccatggctgtggtggcagaaggagtgccctggtgggtcatcctcctggctgtactggctgggctgctggtgctagcactgctggtgctgctcctgtggaagatgggattcttcaaacgggcgaagcaccccgaggccaccgtgccccagtaccatgcggtgaagattcctcgggaagaccgacagcagttcaaggaggagaagacgggcaccatcctgaggaacaactggggcagcccccggcgggagggcccggatgcacaccccatcctggctgctgacgggcatcccgagctgggccccgatgggcatccagggccaggcaccgcctaggttcccatgtcccagcctggcctgtggctgccctccatcccttccccagagatggctccttgggatgaagagggtagagtgggctgctggtgtcgcatcaagatttggcaggatcggcttcctcaggggcacagacctctcccacccacaagaactcctcccacccaacttccccttagagtgctgtgagatgagagtgggtaaatcagggacagggccatggggtagggtgagaagggcaggggtgtcctgatgcaaaggtggggagaagggatcctaatcccttcctctcccattcaccctgtgtaacaggaccccaaggacctgcctccccggaagtgccttaacctagagggtcggggaggaggttgtgtcactgactcaggctgctccttctctagtttcccctctcatctgaccttagtttgctgccatcagtctagtggtttcgtggtttcgtctatttattaaaaaatatttgagaacaaaa

SEQ ID NO: 143246 - DNA, 4084 bp, Homo sapiens
  Payload ID: 8301
  Gene Symbol: ITGA7
  Gene Name: integrin, alpha 7
  ENST ID: ENST00000347027
  CDS Start-End: 203-3598
tgctgtagttgtcctagccggtgctggggcggcggggtggcggagcggcgggcgggcgggagggctggcggggcgaacgtctgggagacgtctgaaagaccaacgagactttggagaccagagacgcgcctggggggacctggggcttggggcgtgcgagatttcccttgcattcgctgggagctcgcgcagggatcgtcccatggccggggctcggagccgcgacccttggggggcctccgggatttgctacctttttggctccctgctcgtcgaactgctcttctcacgggctgtcgccttcaatctggacgtgatgggtgccttgcgcaaggagggcgagccaggcagcctcttcggcttctctgtggccctgcaccggcagttgcagccccgaccccagagctggctgctggtgggtgctccccaggccctggctcttcctgggcagcaggcgaatcgcactggaggcctcttcgcttgcccgttgagcctggaggagactgactgctacagagtggacatcgaccagggagctgatatgcaaaaggaaagcaaggagaaccagtggttgggagtcagtgttcggagccaggggcctgggggcaagattgttacctgtgcacaccgatatgaggcaaggcagcgagtggaccagatcctggagacgcgggatatgattggtcgctgctttgtgctcagccaggacctggccatccgggatgagttggatggtggggaatggaagttctgtgagggacgcccccaaggccatgaacaatttgggttctgccagcagggcacagctgccgccttctcccctgatagccactacctcctctttggggccccaggaacctataattggaaggggttgctttttgtgaccaacattgatagctcagaccccgaccagctggtgtataaaactttggaccctgctgaccggctcccaggaccagccggagacttggccctcaatagctacttaggcttctctattgactcggggaaaggtctggtgcgtgcagaagagctgagctttgtggctggagccccccgcgccaaccacaagggtgctgtggtcatcctgcgcaaggacagcgccagtcgcctggtgcccgaggttatgctgtctggggagcgcctgacctccggctttggctactcactggctgtggctgacctcaacagtgatggctggccagacctgatagtgggtgccccctacttctttgagcgccaagaagagctggggggtgctgtgtatgtgtacttgaaccaggggggtcactgggctgggatctcccctctccggctctgcggctcccctgactccatgttcgggatcagcctggctgtcctgggggacctcaaccaagatggctttccagatattgcagtgggtgccccctttgatggtgatgggaaagtcttcatctaccatgggagcagcctgggggttgtcgccaaaccttcacaggtgctggagggcgaggctgtgggcatcaagagcttcggctactccctgtcaggcagcttggatatggatgggaaccaataccctgacctgctggtgggctccctggctgacaccgcagtgctcttcagggccagacccatcctccatgtctcccatgaggtctctattgctccacgaagcatcgacctggagcagcccaactgtgctggcggccactcggtctgtgtggacctaagggtctgtttcagctacattgcagtccccagcagctatagccctactgtggatgcggacacagaccggaggctccggggccaggttccccgtgtgacgttcctgagccgtaacctggaagaacccaagcaccaggcctcgggcaccgtgtggctgaagcaccagcatgaccgagtctgtggagacgccatgttccagctccaggaaaatgtcaaagacaagcttcgggccattgtagtgaccttgtcctacagtctccagacccctcggctccggcgacaggctcctggccaggggctgcctccagtggcccccatcctcaatgcccaccagcccagcacccagcgggcagagatccacttcctgaagcaaggctgtggtgaagacaagatctgccagagcaatctgcagctggtccgcgcccgcttctgtacccgggtcagcgacacggaattccaacctctgcccatggatgtggatggaacaacagccctgtttgcactgagtgggcagccagtcattggcctggagctgatggtcaccaacctgccatcggacccagcccagccccaggctgatggggatgatgcccatgaagcccagctcctggtcatgcttcctgactcactgcactactcaggggtccgggccctggaccctgcggagaagccactctgcctgtccaatgagaatgcctcccatgttgagtgtgagctggggaaccccatgaagagaggtgcccaggtcaccttctacctcatccttagcacctccgggatcagcattgagaccacggaactggaggtagagctgctgttggccacgatcagtgagcaggagctgcatccagtctctgcacgagcccgtgtcttcattgagctgccactgtccattgcaggaatggccattccccagcaactcttcttctctggtgtggtgaggggcgagagagccatgcagtctgagcgggatgtgggcagcaaggtcaagtatgaggtcacggtttccaaccaaggccagtcgctcagaaccctgggctctgccttcctcaacatcatgtggcctcatgagattgccaatgggaagtggttgctgtacccaatgcaggttgagctggagggcgggcaggggcctgggcagaaagggctttgctctcccaggcccaacatcctccacctggatgtggacagtagggataggaggcggcgggagctggagccacctgagcagcaggagcctggtgagcggcaggagcccagcatgtcctggtggccagtgtcctctgctgagaagaagaaaaacatcaccctggactgcgcccggggcacggccaactgtgtggtgttcagctgcccactctacagctttgaccgcgcggctgtgctgcatgtctggggccgtctctggaacagcacctttctggaggagtactcagctgtgaagtccctggaagtgattgtccgggccaacatcacagtgaagtcctccataaagaacttgatgctccgagatgcctccacagtgatcccagtgatggtatacttggaccccatggctgtggtggcagaaggagtgccctggtgggtcatcctcctggctgtactggctgggctgctggtgctagcactgctggtgctgctcctgtggaagatgggattcttcaaacgggcgaagcaccccgaggccaccgtgccccagtaccatgcggtgaagattcctcgggaagaccgacagcagttcaaggaggagaagacgggcaccatcctgaggaacaactggggcagcccccggcgggagggcccggatgcacaccccatcctggctgctgacgggcatcccgagctgggccccgatgggcatccagggccaggcaccgcctaggttcccatgtcccagcctggcctgtggctgccctccatcccttccccagagatggctccttgggatgaagagggtagagtgggctgctggtgtcgcatcaagatttggcaggatcggcttcctcaggggcacagacctctcccacccacaagaactcctcccacccaacttccccttagagtgctgtgagatgagagtgggtaaatcagggacagggccatggggtagggtgagaagggcaggggtgtcctgatgcaaaggtggggagaagggatcctaatcccttcctctcccattcaccctgtgtaacaggaccccaaggacctgcctccccggaagtgccttaacctagagggtcggggaggaggttgtgtcactgactcaggctgctccttctctagtttcccctctcatctgaccttagtttgctgccatcagtctagtggtttcgtggtttcgtctatttattaaaaaatatttgagaac

SEQ ID NO: 143247 - DNA, 3763 bp, Homo sapiens
  Payload ID: 8301
  Gene Symbol: ITGA7
  Gene Name: integrin, alpha 7
  Uniprot ID: Q13683
  ENST ID: ENST00000452168
  CDS Start-End: 143-3277
gacacagagtgagtagacaaggcttcacatactgggagatctggctgggcttcaagagagggggttggtggtggtgtggctaagttccaaatgttggcctgaagccagtgctcaaagaaagggggcccttgagacagtccaaatggctccctttgccactcccatggttcaagctttgactacaaccagaattcagaggcaggcagaaggattccagtgctggagagaatgtggaacaaggagatctccatttgagggcaaggaaacctgtgcacaccgatatgaggcaaggcagcgagtggaccagatcctggagacgcgggatatgattggtcgctgctttgtgctcagccaggacctggccatccgggatgagttggatggtggggaatggaagttctgtgagggacgcccccaaggccatgaacaatttgggttctgccagcagggcacagctgccgccttctcccctgatagccactacctcctctttggggccccaggaacctataattggaagggcacggccagggtggagctctgtgcacagggctcagcggacctggcacacctggacgacggtccctacgaggcggggggagagaaggagcaggacccccgcctcatcccggtccctgccaacagctactttggcttctctattgactcggggaaaggtctggtgcgtgcagaagagctgagctttgtggctggagccccccgcgccaaccacaagggtgctgtggtcatcctgcgcaaggacagcgccagtcgcctggtgcccgaggttatgctgtctggggagcgcctgacctccggctttggctactcactggctgtggctgacctcaacagtgatggctggccagacctgatagtgggtgccccctacttctttgagcgccaagaagagctggggggtgctgtgtatgtgtacttgaaccaggggggtcactgggctgggatctcccctctccggctctgcggctcccctgactccatgttcgggatcagcctggctgtcctgggggacctcaaccaagatggctttccagatattgcagtgggtgccccctttgatggtgatgggaaagtcttcatctaccatgggagcagcctgggggttgtcgccaaaccttcacaggtgctggagggcgaggctgtgggcatcaagagcttcggctactccctgtcaggcagcttggatatggatgggaaccaataccctgacctgctggtgggctccctggctgacaccgcagtgctcttcagggccagacccatcctccatgtctcccatgaggtctctattgctccacgaagcatcgacctggagcagcccaactgtgctggcggccactcggtctgtgtggacctaagggtctgtttcagctacattgcagtccccagcagctatagccctactgtggccctggactatgtgttagatgcggacacagaccggaggctccggggccaggttccccgtgtgacgttcctgagccgtaacctggaagaacccaagcaccaggcctcgggcaccgtgtggctgaagcaccagcatgaccgagtctgtggagacgccatgttccagctccaggaaaatgtcaaagacaagcttcgggccattgtagtgaccttgtcctacagtctccagacccctcggctccggcgacaggctcctggccaggggctgcctccagtggcccccatcctcaatgcccaccagcccagcacccagcgggcagagatccacttcctgaagcaaggctgtggtgaagacaagatctgccagagcaatctgcagctggtccgcgcccgcttctgtacccgggtcagcgacacggaattccaacctctgcccatggatgtggatggaacaacagccctgtttgcactgagtgggcagccagtcattggcctggagctgatggtcaccaacctgccatcggacccagcccagccccaggctgatggggatgatgcccatgaagcccagctcctggtcatgcttcctgactcactgcactactcaggggtccgggccctggaccctgcggagaagccactctgcctgtccaatgagaatgcctcccatgttgagtgtgagctggggaaccccatgaagagaggtgcccaggtcaccttctacctcatccttagcacctccgggatcagcattgagaccacggaactggaggtagagctgctgttggccacgatcagtgagcaggagctgcatccagtctctgcacgagcccgtgtcttcattgagctgccactgtccattgcaggaatggccattccccagcaactcttcttctctggtgtggtgaggggcgagagagccatgcagtctgagcgggatgtgggcagcaaggtcaagtatgaggtcacggtttccaaccaaggccagtcgctcagaaccctgggctctgccttcctcaacatcatgtggcctcatgagattgccaatgggaagtggttgctgtacccaatgcaggttgagctggagggcgggcaggggcctgggcagaaagggctttgctctcccaggcccaacatcctccacctggatgtggacagtagggataggaggcggcgggagctggagccacctgagcagcaggagcctggtgagcggcaggagcccagcatgtcctggtggccagtgtcctctgctgagaagaagaaaaacatcaccctggactgcgcccggggcacggccaactgtgtggtgttcagctgcccactctacagctttgaccgcgcggctgtgctgcatgtctggggccgtctctggaacagcacctttctggaggagtactcagctgtgaagtccctggaagtgattgtccgggccaacatcacagtgaagtcctccataaagaacttgatgctccgagatgcctccacagtgatcccagtgatggtatacttggaccccatggctgtggtggcagaaggagtgccctggtgggtcatcctcctggctgtactggctgggctgctggtgctagcactgctggtgctgctcctgtggaagatgggattcttcaaacgggcgaagcaccccgaggccaccgtgccccagtaccatgcggtgaagattcctcgggaagaccgacagcagttcaaggaggagaagacgggcaccatcctgaggaacaactggggcagcccccggcgggagggcccggatgcacaccccatcctggctgctgacgggcatcccgagctgggccccgatgggcatccagggccaggcaccgcctaggttcccatgtcccagcctggcctgtggctgccctccatcccttccccagagatggctccttgggatgaagagggtagagtgggctgctggtgtcgcatcaagatttggcaggatcggcttcctcaggggcacagacctctcccacccacaagaactcctcccacccaacttccccttagagtgctgtgagatgagagtgggtaaatcagggacagggccatggggtagggtgagaagggcaggggtgtcctgatgcaaaggtggggagaagggatcctaatcccttcctctcccattcaccctgtgtaacaggaccccaaggacctgcctccccggaagtgccttaacctagagggtcggggaggaggttgtgtcactgactcaggctgctccttctctagtttcccctctcatctgaccttagtttgctgccatcagtctagtggtttcgtggtttcgtctatttattaaaaaatatttgagaac

SEQ ID NO: 143248 - DNA, 576 bp, Homo sapiens
  Payload ID: 8301
  Gene Symbol: ITGA7
  Gene Name: integrin, alpha 7
  ENST ID: ENST00000557257
  CDS Start-End: 117-576
agctttgactacaaccagaattcagaggcaggcagaaggattccagtgctggagagacctgtgcacaccgatatgaggcaaggcagcgagtggaccagatcctggagacgcgggatatgattggtcgctgctttgtgctcagccaggacctggccatccgggatgagttggatggtggggaatggaagttctgtgagggacgcccccaaggccatgaacaatttgggttctgccagcagggcacagctgccgccttctcccctgatagccactacctcctctttggggccccaggaacctataattggaaggggttgctttttgtgaccaacattgatagctcagaccccgaccagctggtgtataaaactttggaccctgctgaccggctcccaggaccagccggagacttggccctcaatagctacttaggcttctctattgactcggggaaaggtctggtgcgtgcagaagagctgagctttgtggctggagccccccgcgccaaccacaagggtgctgtggtcatcctgcgcaaggacagcgccagtcgcctggtgcccgaggttatgctgt

SEQ ID NO: 143249 - DNA, 558 bp, Homo sapiens
  Payload ID: 8301
  Gene Symbol: ITGA7
  Gene Name: integrin, alpha 7
  ENST ID: ENST00000556273
  CDS Start-End: 134-430
accgctgtgtcacgtgaggttgggaaccgccctcttgagaccttgggtgaagatcttggcggggaagagaggtagagggttgcggagggcaggtgaagtgttctttattgggagcttagtttttgccactcccatggttcaagctttgactacaaccagaattcagaggcaggcagaaggattccagtgctggagaggcttctctattgactcggggaaaggtctggtgcgtgcagaagagctgagctttgtggctggagccccccgcgccaaccacaagggtgctgtggtcatcctgcgcaaggacagcgccagtcgcctggtgcccgaggttatgctgtctggggagcgcctgacctccggctttggctactcactggctgtggctgacctcaacagtgatggatattgcagtgggtgccccctttgatggtgatgggaaagtcttcatctaccatgggagcagcctgggggttgtcgccaaaccttcacaggtgctggagggcgaggctgtgggcatcaagagcttcggctactccctgtcaggcagcttggata

SEQ ID NO: 143250 - DNA, 1965 bp, Homo sapiens
  Payload ID: 8301
  Gene Symbol: ITGA7
  Gene Name: integrin, alpha 7
  ENST ID: ENST00000554327
  CDS Start-End: 1-328
tgtcaaagacaagcttcgggccattgtagtgaccttgtcctacagtctccagacccctcggctccggcgacaggctcctggccaggggctgcctccagtggcccccatcctcaatgcccaccagcccagcacccagcgggcagagatccacttcctgaagcaaggctgtggtgaagacaagatctgccagagcaatctgcagctggtccgcgcccgcttctgtacccgggtcagcgacacggaattccaacctctgcccatgagaagccactctgcctgtccaatgagaatgcctcccatgttgagtgtgagctggggaaccccatgaagagaggtgcccaggtcaccttctacctcatccttagcacctccgggatcagcattgagaccacggaactggaggtagagctgctgttggccacgatcagtgagcaggagctgcatccagtctctgcacgagcccgtgtcttcattgagctgccactgtccattgcaggaatggccattccccagcaactcttcttctctggtgtggtgaggggcgagagagccatgcagtctgagcgggatgtgggcagcaaggtcaagtatgaggtcacggtttccaaccaaggccagtcgctcagaaccctgggctctgccttcctcaacatcatgtggcctcatgagattgccaatgggaagtggttgctgtacccaatgcaggttgagctggagggcgggcaggggcctgggcagaaagggctttgctctcccaggcccaacatcctccacctggatgtggacagtagggataggaggcggcgggagctggagccacctgagcagcaggagcctggtgagcggcaggagcccagcatgtcctggtggccagtgtcctctgctgagaagaagaaaaacatcaccctggactgcgcccggggcacggccaactgtgtggtgttcagctgcccactctacagctttgaccgcgcggctgtgctgcatgtctggggccgtctctggaacagcacctttctggaggagtactcagctgtgaagtccctggaagtgattgtccgggccaacatcacagtgaagtcctccataaagaacttgatgctccgagatgcctccacagtgatcccagtgatggtatacttggaccccatggctgtggtggcagaaggagtgccctggtgggtcatcctcctggctgtactggctgggctgctggtgctagcactgctggtgctgctcctgtggaagatgggattcttcaaacgggcgaagcaccccgaggccaccgtgccccagtaccatgcggtgaagattcctcgggaagaccgacagcagttcaaggaggagaagacgggcaccatcctgaggaacaactggggcagcccccggcgggagggcccggatgcacaccccatcctggctgctgacgggcatcccgagctgggccccgatgggcatccagggccaggcaccgcctaggttcccatgtcccagcctggcctgtggctgccctccatcccttccccagagatggctccttgggatgaagagggtagagtgggctgctggtgtcgcatcaagatttggcaggatcggcttcctcaggggcacagacctctcccacccacaagaactcctcccacccaacttccccttagagtgctgtgagatgagagtgggtaaatcagggacagggccatggggtagggtgagaagggcaggggtgtcctgatgcaaaggtggggagaagggatcctaatcccttcctctcccattcaccctgtgtaacaggaccccaaggacctgcctccccggaagtgccttaacctagagggtcggggaggaggttgtgtcactgactcaggctgctccttctctagtttcccctctcatctgaccttagtttgctgccatcagtctagtggtttcgtggtttcgtctatttattaaaaaatatttgagaac

SEQ ID NO: 143251 - DNA, 561 bp, Homo sapiens
  Payload ID: 8301
  Gene Symbol: ITGA7
  Gene Name: integrin, alpha 7
  ENST ID: ENST00000555809
  CDS Start-End: 132-278
ggtaagtgacctcccagtccttctcaagtgttaagggtttcttttggatcgtcaaagaccggagcggtcaagctgtttccccactgaattccctcaatcacatttatgttcttttcctcccagccactcccatggttcaagctttgactacaaccagaattcagaggcaggcagaaggattccagtgctggagaggctgctggtgggtgctccccaggccctggctcttcctgggcagcaggcgaatcgcactggaggcctcttcgcttgcccgttgagcctggaggagactgactgctacagagtggacatcgaccagggagctgatatgcaaaaggaaagcaaggagaaccagtggttgggagtcagtgttcggagccaggggcctgggggcaagattgttacctgtgcacaccgatatgaggcaaggcagcgagtggaccagatcctggagacgcgggatatgattggtcgctgctttgtgctcagccaggacctggccatccgggatgagttggatggtggggaatggaagttctgtgagggacgcccccaaggcca

SEQ ID NO: 143252 - DNA, 817 bp, Homo sapiens
  Payload ID: 8301
  Gene Symbol: ITGA7
  Gene Name: integrin, alpha 7
  ENST ID: ENST00000557555
  CDS Start-End: 1-617
gctgtgctgcatgtctggggccgtctctggaacagcacctttctggaggagtactcagctgtgaagtccctggaagtgattgtccgggccaacatcacagtgaagtcctccataaagaacttgatgctccgagatgcctccacagtgatcccagtgatggtatacttggaccccatggctgtggtggcagaaggagtgccctggtgggtcatcctcctggctgtactggctgggctgctggtgctagcactgctggtgctgctcctgtggaagtgtggcttcttccatcggagcagccagagctcatcttttcccaccaactatcaccgggcctgtctggctgtgcagccttcagccatggaagttgggggtccagggactgtgggatgggattcttcaaacgggcgaagcaccccgaggccaccgtgccccagtaccatgcggtgaagattcctcgggaagaccgacagcagttcaaggaggagaagacgggcaccatcctgaggaacaactggggcagcccccggcgggagggcccggatgcacaccccatcctggctgctgacgggcatcccgagctgggccccgatgggcatccagggccaggcaccgcctaggttcccatgtcccagcctggcctgtggctgccctccatcccttccccagagatggctccttgggatgaagagggtagagtgggctgctggtgtcgcatcaagatttggcaggatcggcttcctcaggggcacagacctctcccacccacaagaactcctcccacccaacttccccttagagtgctgtgagatgagagtgg

SEQ ID NO: 143253 - DNA, 573 bp, Homo sapiens
  Payload ID: 8301
  Gene Symbol: ITGA7
  Gene Name: integrin, alpha 7
  ENST ID: ENST00000555687
  CDS Start-End: 13-180
gagacagtccaaatggctccctttgccactcccatggttcaagctttgactacaaccagaattcagaggcaggcagaaggattccagtgctggagaggctgctggtgggtgctccccaggccctggctcttcctgggcagcaggcgaatcgcactggaggcctcttcgcttgcccgttgagcctggaggagactgactgctacagagtggacatcgaccagggagctgatatgcaaaaggaaagcaaggagaaccagtggttgggagtcagtgttcggagccaggggcctgggggcaagattgttacctgtgcacaccgatatgaggcaaggcagcgagtggaccagatcctggagacgcgggatatgattggtcgctgctttgtgctcagccaggacctggccatccgggatgagttggatggtggggaatggaagttctgtgagggacgcccccaaggccatgaacaatttgggttctgccagcagggcacagctgccgccttctcccctgatagccactacctcctctttggggccccaggaacctataattggaaggggttgctttttg

SEQ ID NO: 143254 - DNA, 552 bp, Homo sapiens
  Payload ID: 8301
  Gene Symbol: ITGA7
  Gene Name: integrin, alpha 7
  ENST ID: ENST00000554724
  CDS Start-End: 1-106
agaaggattccagtgctggagaggctgctggtgggtgctccccaggccctggctcttcctgggcagcaggcgaatcgcactggaggcctcttcgcttgcccgttgagcctggaggagactgactgctacagagtggacatcgaccagggagctgatatgcaaaaggaaagcaaggagaaccagtggttgggagtcagtgttcggagccaggggcctgggggcaagattgttacctgtgcacaccgatatgagggcacagctgccgccttctcccctgatagccactacctcctctttggggccccaggaacctataattggaagggtgagtcactcctcgggaaggggagaaggggaccaaaacctcctcttacctcagagacagggttggggatggcacatggccaagcatgaccacatgtgcactgctgtatggccccagggcactgccatgccttccaccccattgagctagtgcacacatgaatggggggtgcctcctttccctcgcacggccaagtgttcctcaacatgctggcatgggccccaagt

SEQ ID NO: 143255 - DNA, 3935 bp, Homo sapiens
  Payload ID: 8301
  Gene Symbol: ITGA7
  Gene Name: integrin, alpha 7
  Uniprot ID: Q13683
  ENST ID: ENST00000553804
  CDS Start-End: 20-3445
ctcgcgcagggatcgtcccatggccggggctcggagccgcgacccttggggggcctccgggatttgctacctttttggctccctgctcgtcgaactgctcttctcacgggctgtcgccttcaatctggacgtgatgggtgccttgcgcaaggagggcgagccaggcagcctcttcggcttctctgtggccctgcaccggcagttgcagccccgaccccagagctggctgctggtgggtgctccccaggccctggctcttcctgggcagcaggcgaatcgcactggaggcctcttcgcttgcccgttgagcctggaggagactgactgctacagagtggacatcgaccagggagctgatatgcaaaaggaaagcaaggagaaccagtggttgggagtcagtgttcggagccaggggcctgggggcaagattgttacctgtgcacaccgatatgaggcaaggcagcgagtggaccagatcctggagacgcgggatatgattggtcgctgctttgtgctcagccaggacctggccatccgggatgagttggatggtggggaatggaagttctgtgagggacgcccccaaggccatgaacaatttgggttctgccagcagggcacagctgccgccttctcccctgatagccactacctcctctttggggccccaggaacctataattggaagggcacggccagggtggagctctgtgcacagggctcagcggacctggcacacctggacgacggtccctacgaggcggggggagagaaggagcaggacccccgcctcatcccggtccctgccaacagctactttggcttctctattgactcggggaaaggtctggtgcgtgcagaagagctgagctttgtggctggagccccccgcgccaaccacaagggtgctgtggtcatcctgcgcaaggacagcgccagtcgcctggtgcccgaggttatgctgtctggggagcgcctgacctccggctttggctactcactggctgtggctgacctcaacagtgatggctggccagacctgatagtgggtgccccctacttctttgagcgccaagaagagctggggggtgctgtgtatgtgtacttgaaccaggggggtcactgggctgggatctcccctctccggctctgcggctcccctgactccatgttcgggatcagcctggctgtcctgggggacctcaaccaagatggctttccagatattgcagtgggtgccccctttgatggtgatgggaaagtcttcatctaccatgggagcagcctgggggttgtcgccaaaccttcacaggtgctggagggcgaggctgtgggcatcaagagcttcggctactccctgtcaggcagcttggatatggatgggaaccaataccctgacctgctggtgggctccctggctgacaccgcagtgctcttcagggccagacccatcctccatgtctcccatgaggtctctattgctccacgaagcatcgacctggagcagcccaactgtgctggcggccactcggtctgtgtggacctaagggtctgtttcagctacattgcagtccccagcagctatagccctactgtggccctggactatgtgttagatgcggacacagaccggaggctccggggccaggttccccgtgtgacgttcctgagccgtaacctggaagaacccaagcaccaggcctcgggcaccgtgtggctgaagcaccagcatgaccgagtctgtggagacgccatgttccagctccaggaaaatgtcaaagacaagcttcgggccattgtagtgaccttgtcctacagtctccagacccctcggctccggcgacaggctcctggccaggggctgcctccagtggcccccatcctcaatgcccaccagcccagcacccagcgggcagagatccacttcctgaagcaaggctgtggtgaagacaagatctgccagagcaatctgcagctggtccgcgcccgcttctgtacccgggtcagcgacacggaattccaacctctgcccatggatgtggatggaacaacagccctgtttgcactgagtgggcagccagtcattggcctggagctgatggtcaccaacctgccatcggacccagcccagccccaggctgatggggatgatgcccatgaagcccagctcctggtcatgcttcctgactcactgcactactcaggggtccgggccctggaccctgcggagaagccactctgcctgtccaatgagaatgcctcccatgttgagtgtgagctggggaaccccatgaagagaggtgcccaggtcaccttctacctcatccttagcacctccgggatcagcattgagaccacggaactggaggtagagctgctgttggccacgatcagtgagcaggagctgcatccagtctctgcacgagcccgtgtcttcattgagctgccactgtccattgcaggaatggccattccccagcaactcttcttctctggtgtggtgaggggcgagagagccatgcagtctgagcgggatgtgggcagcaaggtcaagtatgaggtcacggtttccaaccaaggccagtcgctcagaaccctgggctctgccttcctcaacatcatgtggcctcatgagattgccaatgggaagtggttgctgtacccaatgcaggttgagctggagggcgggcaggggcctgggcagaaagggctttgctctcccaggcccaacatcctccacctggatgtggacagtagggataggaggcggcgggagctggagccacctgagcagcaggagcctggtgagcggcaggagcccagcatgtcctggtggccagtgtcctctgctgagaagaagaaaaacatcaccctggactgcgcccggggcacggccaactgtgtggtgttcagctgcccactctacagctttgaccgcgcggctgtgctgcatgtctggggccgtctctggaacagcacctttctggaggagtactcagctgtgaagtccctggaagtgattgtccgggccaacatcacagtgaagtcctccataaagaacttgatgctccgagatgcctccacagtgatcccagtgatggtatacttggaccccatggctgtggtggcagaaggagtgccctggtgggtcatcctcctggctgtactggctgggctgctggtgctagcactgctggtgctgctcctgtggaagatgggattcttcaaacgggcgaagcaccccgaggccaccgtgccccagtaccatgcggtgaagattcctcgggaagaccgacagcagttcaaggaggagaagacgggcaccatcctgaggaacaactggggcagcccccggcgggagggcccggatgcacaccccatcctggctgctgacgggcatcccgagctgggccccgatgggcatccagggccaggcaccgcctaggttcccatgtcccagcctggcctgtggctgccctccatcccttccccagagatggctccttgggatgaagagggtagagtgggctgctggtgtcgcatcaagatttggcaggatcggcttcctcaggggcacagacctctcccacccacaagaactcctcccacccaacttccccttagagtgctgtgagatgagagtgggtaaatcagggacagggccatggggtagggtgagaagggcaggggtgtcctgatgcaaaggtggggagaagggatcctaatcccttcctctcccattcaccctgtgtaacaggaccccaaggacctgcctccccggaagtgccttaacctagagggtcggggaggaggttgtgtcactgactcaggctgctccttctctagtttcccctctcatctgaccttagtttgctgccatcagtctagtggtttcgtggtttcgtctatttattaaaaaatatttgagaacaaaa

SEQ ID NO: 143256 - DNA, 3930 bp, Homo sapiens
  Payload ID: 8301
  Gene Symbol: ITGA7
  Gene Name: integrin, alpha 7
  Uniprot ID: Q13683
  ENST ID: ENST00000555728
  CDS Start-End: 30-3575
tcgctgggagctcgcgcagggatcgtcccatggccggggctcggagccgcgacccttggggggcctccgggatttgctacctttttggctccctgctcgtcgaactgctcttctcacgggctgtcgccttcaatctggacgtgatgggtgccttgcgcaaggagggcgagccaggcagcctcttcggcttctctgtggccctgcaccggcagttgcagccccgaccccagagctggctgctggtgggtgctccccaggccctggctcttcctgggcagcaggcgaatcgcactggaggcctcttcgcttgcccgttgagcctggaggagactgactgctacagagtggacatcgaccagggagctgatatgcaaaaggaaagcaaggagaaccagtggttgggagtcagtgttcggagccaggggcctgggggcaagattgttacctgtgcacaccgatatgaggcaaggcagcgagtggaccagatcctggagacgcgggatatgattggtcgctgctttgtgctcagccaggacctggccatccgggatgagttggatggtggggaatggaagttctgtgagggacgcccccaaggccatgaacaatttgggttctgccagcagggcacagctgccgccttctcccctgatagccactacctcctctttggggccccaggaacctataattggaagggcacggccagggtggagctctgtgcacagggctcagcggacctggcacacctggacgacggtccctacgaggcggggggagagaaggagcaggacccccgcctcatcccggtccctgccaacagctactttgggttgctttttgtgaccaacattgatagctcagaccccgaccagctggtgtataaaactttggaccctgctgaccggctcccaggaccagccggagacttggccctcaatagctacttaggcttctctattgactcggggaaaggtctggtgcgtgcagaagagctgagctttgtggctggagccccccgcgccaaccacaagggtgctgtggtcatcctgcgcaaggacagcgccagtcgcctggtgcccgaggttatgctgtctggggagcgcctgacctccggctttggctactcactggctgtggctgacctcaacagtgatggctggccagacctgatagtgggtgccccctacttctttgagcgccaagaagagctggggggtgctgtgtatgtgtacttgaaccaggggggtcactgggctgggatctcccctctccggctctgcggctcccctgactccatgttcgggatcagcctggctgtcctgggggacctcaaccaagatggctttccagatattgcagtgggtgccccctttgatggtgatgggaaagtcttcatctaccatgggagcagcctgggggttgtcgccaaaccttcacaggtgctggagggcgaggctgtgggcatcaagagcttcggctactccctgtcaggcagcttggatatggatgggaaccaataccctgacctgctggtgggctccctggctgacaccgcagtgctcttcagggccagacccatcctccatgtctcccatgaggtctctattgctccacgaagcatcgacctggagcagcccaactgtgctggcggccactcggtctgtgtggacctaagggtctgtttcagctacattgcagtccccagcagctatagccctactgtggccctggactatgtgttagatgcggacacagaccggaggctccggggccaggttccccgtgtgacgttcctgagccgtaacctggaagaacccaagcaccaggcctcgggcaccgtgtggctgaagcaccagcatgaccgagtctgtggagacgccatgttccagctccaggaaaatgtcaaagacaagcttcgggccattgtagtgaccttgtcctacagtctccagacccctcggctccggcgacaggctcctggccaggggctgcctccagtggcccccatcctcaatgcccaccagcccagcacccagcgggcagagatccacttcctgaagcaaggctgtggtgaagacaagatctgccagagcaatctgcagctggtccgcgcccgcttctgtacccgggtcagcgacacggaattccaacctctgcccatggatgtggatggaacaacagccctgtttgcactgagtgggcagccagtcattggcctggagctgatggtcaccaacctgccatcggacccagcccagccccaggctgatggggatgatgcccatgaagcccagctcctggtcatgcttcctgactcactgcactactcaggggtccgggccctggaccctgcggagaagccactctgcctgtccaatgagaatgcctcccatgttgagtgtgagctggggaaccccatgaagagaggtgcccaggtcaccttctacctcatccttagcacctccgggatcagcattgagaccacggaactggaggtagagctgctgttggccacgatcagtgagcaggagctgcatccagtctctgcacgagcccgtgtcttcattgagctgccactgtccattgcaggaatggccattccccagcaactcttcttctctggtgtggtgaggggcgagagagccatgcagtctgagcgggatgtgggcagcaaggtcaagtatgaggtcacggtttccaaccaaggccagtcgctcagaaccctgggctctgccttcctcaacatcatgtggcctcatgagattgccaatgggaagtggttgctgtacccaatgcaggttgagctggagggcgggcaggggcctgggcagaaagggctttgctctcccaggcccaacatcctccacctggatgtggacagtagggataggaggcggcgggagctggagccacctgagcagcaggagcctggtgagcggcaggagcccagcatgtcctggtggccagtgtcctctgctgagaagaagaaaaacatcaccctggactgcgcccggggcacggccaactgtgtggtgttcagctgcccactctacagctttgaccgcgcggctgtgctgcatgtctggggccgtctctggaacagcacctttctggaggagtactcagctgtgaagtccctggaagtgattgtccgggccaacatcacagtgaagtcctccataaagaacttgatgctccgagatgcctccacagtgatcccagtgatggtatacttggaccccatggctgtggtggcagaaggagtgccctggtgggtcatcctcctggctgtactggctgggctgctggtgctagcactgctggtgctgctcctgtggaagatgggattcttcaaacgggcgaagcaccccgaggccaccgtgccccagtaccatgcggtgaagattcctcgggaagaccgacagcagttcaaggaggagaagacgggcaccatcctgaggaacaactggggcagcccccggcgggagggcccggatgcacaccccatcctggctgctgacgggcatcccgagctgggccccgatgggcatccagggccaggcaccgcctaggttcccatgtcccagcctggcctgtggctgccctccatcccttccccagagatggctccttgggatgaagagggtagagtgggctgctggtgtcgcatcaagatttggcaggatcggcttcctcaggggcacagacctctcccacccacaagaactcctcccacccaacttccccttagagtgctgtgagatgagagtgggtaaatcagggacagggccatggggtagggtgagaagggcaggggtgtcctgatgcaaaggtggggagaagggatcctaatcccttcctctcccattcaccctgtgtaacaggaccccaaggacctgcctccccggaagtgccttaacctagagg

SEQ ID NO: 143257 - DNA, 558 bp, Homo sapiens
  Payload ID: 8301
  Gene Symbol: ITGA7
  Gene Name: integrin, alpha 7
  ENST ID: ENST00000553893
  CDS Start-End: 121-267
gtgaggttgggaaccgccctcttgagaccttgggtgaagatcttggcggggaagagaggtagagggttgcggagggcaggtgaagtgttctttattgggagcttagtttttgccactcccatggttcaagctttgactacaaccagaattcagaggcaggcagaaggattccagtgctggagaggctgctggtgggtgctccccaggccctggctcttcctgggcagcaggcgaatcgcactggaggcctcttcgcttgcccgttgagcctggaggagactgactgctacagagtggacatcgaccagggagctgatatgcaaaaggaaagcaaggagaaccagtggttgggagtcagtgttcggagccaggggcctgggggcaagattgttacctgtgcacaccgatatgaggcaaggcagcgagtggaccagatcctggagacgcgggatatgattggtcgctgctttgtgctcagccaggacctggccatccgggatgagttggatggtggggaatggaagttctgtgagggacgcccccaaggccatgaacaat

SEQ ID NO: 143258 - DNA, 6755 bp, Homo sapiens
  Payload ID: 8302
  Gene Symbol: ITGA8
  Gene Name: integrin, alpha 8
  Uniprot ID: P53708
  ENST ID: ENST00000378076
  CDS Start-End: 355-3546
gagatgggactgcaatagaaatccgggcagcccgaagaggcacccagcgctccagccaccagctgggccgcccgggagtccctggctctagaccagccgcgaggaggcgccgcgagagagctggtccctgcccgcggccggaggagggctagagcccctgggccagccccccgagccggctgggcgggcgggcgggtgggagcagacgccgggcactgtcaccacgggtgcgccgagcgcaccgacccgggacacgggcagctggggaccgccagattccaccagccccccttgccccgcaggggtcctcggctcgcgctcctgggtagcagccacccaccggggcggagggagatgtcgcccggggccagccgcggtccccggggaagccaggcgccgctgatcgcgcccctctgctgcgccgcggccgcgctggggatgttgctgtggtcccccgcctgtcaggcgttcaacctggacgtggaaaagctcacagtgtacagcggccccaagggcagctacttcggctacgccgtggacttccacatacccgacgcccgcacagcgagtgtcttggtgggggcgcccaaagccaacaccagccagcccgatatcgtggaagggggagccgtctattactgtccttggcccgcggaggggtctgcgcagtgcaggcagataccgtttgacaccaccaacaacagaaagatcagagttaatggaaccaaagaacctatcgagttcaaatccaatcagtggtttggagcaacagtgaaagctcacaaaggaaaagttgtggcctgtgctcctttatatcactggagaactcttaaaccgacaccagaaaaggacccagttggcacctgctatgtagcaattcagaacttcagcgcctatgccgagttctctccttgccggaacagcaatgctgatccggaaggccagggttactgccaagcaggatttagtctggatttttataagaatggagaccttattgtgggaggacctgggagtttctactggcaaggacaagtgatcactgccagtgttgcagatatcattgcaaattactcattcaaggatatcctcaggaaactggcaggagaaaagcagacggaagtggctccagcttcctatgatgacagttaccttggatactcagttgctgctggggagtttactggggattctcagcaagaattggttgctggaattccaagaggagcacagaattttggatatgtttccatcattaactctacggatatgacgtttattcagaatttcacgggagaacagatggcatcttattttggatataccgttgtcgtatcagatgttaacagtgatggactggatgatgtcctggttggggcacctctctttatggaacgtgaatttgagagcaaccccagagaagtagggcaaatctacctgtatttgcaagtgagctctctcctcttcagagacccccagatcctcactggcaccgagacgtttgggagattcggtagtgctatggcacacttaggagacctgaaccaagatggatacaatgacattgccatcggagtgccttttgcaggcaaggatcaaagaggcaaagtgctcatttataatgggaacaaagatggcttaaacaccaagccttcccaagttctgcaaggagtgtgggcctcacatgctgtcccttccggatttggctttactttaagaggagattcagacatagacaagaatgattacccagatttgattgtgggtgcatttggaacaggaaaagtcgctgtttacagagcaagaccggttgtgactgtagatgcccagcttctgctgcacccaatgattatcaatcttgaaaataaaacttgccaggttccagactctatgacatctgctgcctgcttttctttaagagtatgtgcatctgtcacaggccagagcattgcaaacacaatagtcttgatggcagaggtgcaattagattccctgaaacagaaaggagctattaaacggacgctcttccttgataaccatcaggctcatcgcgtcttccctcttgtgataaaaaggcagaaatcccaccagtgccaggatttcatcgtttaccttcgagatgaaactgaattccgagataaattatctccaatcaacattagtttgaattacagtttggacgaatccacctttaaagaaggcctggaagtgaaaccaatattgaactactacagagaaaacattgttagtgaacaggctcacattctggtggactgtggagaagacaatctgtgtgttcctgacttgaagctgtcggctagaccagataagcatcaggtaatcattggagatgaaaatcaccttatgctcataataaatgcaagaaatgaaggggaaggagcatatgaagctgaactctttgtaatgataccagaagaggcagattatgttggaatcgaacgcaacaacaagggatttcgaccactgagctgtgagtacaagatggaaaatgtaaccaggatggtggtgtgtgaccttgggaaccctatggtgtctggaacaaattattccctgggcctccgatttgcagttccacgtcttgagaaaacaaacatgagcattaacttcgatctccaaatcagaagttccaacaaggacaatccagacagcaattttgtgagcctgcaaatcaacatcactgctgtagcgcaggtggaaataagaggagtgtcacaccctccgcagattgttctgcccattcataactgggaaccagaagaggagccccacaaagaggaggaggttggaccattggtggaacatatttatgagctgcacaatattggaccaagtaccatcagtgacaccatcctggaggtgggctggcctttctctgcccgggatgaatttcttctctatattttccatattcaaactctgggacctctgcagtgccaaccaaatcctaatatcaatccacaggatataaagcctgctgcctccccagaggacacccctgagctcagcgcctttttgcgaaactctactattcctcatcttgtcaggaagagggatgtacatgtggtcgaattccacagacagagccctgcaaaaatactgaattgtacaaatatcgagtgtttacaaatctcctgtgcagtgggacgactcgaaggaggagaaagcgcagtcctgaaagtcaggtcacgattatgggcccacaccttcctccagagaaaaaatgatccctatgctcttgcatccctggtgtcctttgaagttaagaagatgccttatacagatcagccagcaaaactcccagaaggaagcatagtaattaagacatcagttatttgggcaactccgaatgtttccttctcaatcccattatgggtaataatactagcaatacttcttggattgttggttctcgccattttaaccttagctttatggaagtgtggattctttgacagagccagacctcctcaggaggacatgaccgacagggaacagctgacaaatgacaagacccctgaggcatgacaagaaaaaaaaagaagaccaaagacctcaaacactggtcctgttcaaagaaaaagaaagaacatgagggttaaaaatcaaagctttctgatacctgacagtgacccaggaaatggaggggaccctggaaacatcacctcatctacaccgcactttggagaaattgtcctgggtgcccagtgagccctgttggaaaaggaaacaccaaagctggagaagccatcagcaattgtggaagattttcttttgctttaatcgttctgtacttggcagacactttgaaatgcgtatgggaacgtaagttgcagtccagatcaatccagcataagttgcagagatgaaatgtctgaatcactatagaatttacaaggtgaactaaggtgaaatgactgatttactatagaacttagaactaagaccacaccatccaacactactgtatccaatggaacatttgacacctccctatggaaaagaaacatttctaaggacattatggctcagggagacaagcaatatgttgttggtactgtgaaagtacttttgaaaggacaaaaataatcttgtgagtgagggtgagagtttatttatttattttccatgtctctaggttgagaatctgtcatctagagaatttggaaattaagatttggttagctagttttcaaaatcactcactcagtttcctcctaagaaccactgtgtgcagataactcatttagcagagcttcttcagaatttagacagtgctaaggaaaggaagattggcattaggaatcagttctatttaataccttgctgccttccatctgaaattcctttcactcacattatccagggactcacatctgcttaatttagctttgcaagatgttgcatttatatttccttgtatatctttccattgacttagttaatacatgaatttcgaggtactctctacctttggagtgtttaaaagtcatggtaaaatgtctagagttcattaattaaaaagcaatttaacattatgggtaaacattatttttaatatctataagaagcaacacttcttatagatatttagcttgggattaaatacccgtttttcctgctatgccttgtacttgtatacacagagaaaacatgttgaatataacttagacaaaaacataaaattatacaggcatgagccaaactgggaaaactgattcctaaagatttttatttaaaattgcttattccaactttattacttatttttactgctaatctttataatatgtaactttggagaataatcttttatttaagctattttcccatcatcttgaatttaaccatcacaaattttttatgtttaaaactcttgtaaataattcataatcttgtaatattatcatttttgaagtaaaattgaccagccaaatttataggtagtctgcacaattttgtatccttttttaataatgaaaaattactatgaagaaatactgaacaaatttttatgtgcaatattttatagacctatgtatctgaagcatgtttacactggcgtttttttttttaattaatttcctaaatgttaagtatgatagaacaagctgacccaaatccttaagtttacaaagctgttggaaaactttgtgtcctgatttcaacaatcacgctttgtttgaaagatgagccaagctcacagacactaaattttatgtcatgccataagctggagaggagccatttggctacagctgcggaacttcattgaggagcaaatgaaaggcacatggacgagcacgctggtgcagttcatgttcttcctgcctgtgaattgaatactgtcctggtagcagtttcgggtcggtcaggagctcaaggctggtttgtgtggctgactacggatgagcactgaagttgcctcaaagaattaaggggtgtccacaccagcctctgggggtctttggtgttagtcttccaggtagagctggttttacaagtaggtggccatctacaggatgtgatgtgagcgatgccagacagctctctctgaccccaggtaatgccctgaatctggtgatcctggctgatctgtgaccaatagagattagctccttgggatttggggtcctaaaaggtccctgaaaaaatgcaccccttgtctttaagccaacattggtgaaggaactgagaactcttagggttacataaaaaaagacccctgttgagatagtttatgcagatacctggaaggaactagagatgccaggaggaagactgagacccagaatgaagcaaggcatgagggctccaaagtgaactgcaccatcccagagtctcagccaagatggccctttcctagagggacgggcaccttccacctgcccacaggcactgctacctatgggaattgcagaaggccgttgtacacacgcgcatgcacgcagtggccctctgccctttagaatatggaagcaaagtctgggtgcagtgactcacacttgtaatcccaacactttgggaggccgagacgggcagatcacctgagttcaggagttcaagaccagcctggccaacgtggcaaaaccccatctctactaaaaatacaaaaattagctgggcgtggtggcagtctcctgtaatcccagctacctaggaggctgaggcagagagagaatcgcttgaacccaggaggcggaggttgcagtgagctgagatcgcgcgactgcactccagcctgggcgacagagggaaactctgtctcaacaaaaaaataaataaaataaaaaataaaaaaagaatatggaagcaaatggagaaagggaggaaactgaggtcaggcaaaccttccagcaatccgttctgcccagagaacatactgacgacagagaacacactgagcgttatctgcttctagttagagcattgccgattgccttcataattcataatgtgctgtgctcctctgagggtctatctgtatttctcttcaaagaattccctttttaaattcttgcagctgggttttaagacacaataatggggcaaattaagttttataaacttggagatttttatacagtaaataaaaaaataatatgtactagtcacccctgaaactgcattcttagaactcgactcttgttttatttaaatacgtgcgtagatatctgtgaagattttcatgtacctatttaccttgtcactaataaaattaaaactgaaagacttga

SEQ ID NO: 143259 - DNA, 7889 bp, Homo sapiens
  Payload ID: 8303
  Gene Symbol: ITGA9
  Gene Name: integrin, alpha 9
  Uniprot ID: Q13797
  ENST ID: ENST00000264741
  CDS Start-End: 257-3364
ccggcccgggacccgctcgcgcagacttctcgggcggactgaggacgccgccgctcggggccgcccctgtgctcgccttcagcgcccgctcagcccgccgtccgcgccccggtggcgggcccgacgcccgcattccgcccgtgtccaggcgcagagctcccgccccggggagcttcctggccgtcggcgggccccgcggcccgcgcgctcggcgccctgctcgccgggcagaggggaaggcggcggccggctggggatgggcggcccggctgcgccgaggggcgccgggaggctccgcgcgctgctgctggcgctggtggtcgcggggatccccgcgggcgcctacaacctcgacccgcagcgccccgtgcacttccagggccccgctgactcgttcttcggctacgcagttctggagcatttccacgacaacacgcgctgggtccttgtgggcgcaccaaaggcagattccaaatacagcccttcagtgaagtctcctggggctgtgtttaagtgccgtgttcacaccaaccctgaccggagatgcaccgaactggacatggctcgagggaagaatcggggcacgtcctgcggaaagacctgccgggaagaccgcgatgatgagtggatgggggtgagcctggcccgacagcccaaggctgatggccgtgtgttggcctgtgctcatcgctggaagaacatctactatgaagccgaccacatcctaccccatggcttctgctacatcatcccctccaacctccaggccaaaggcaggacgctgatcccttgctatgaagagtataagaagaagtacggagaggaacacggctcctgccaggctgggatagcgggcttcttcaccgaggagctggtggtgatgggtgctccagggtcattttattgggctggaaccatcaaagtgctgaaccttacggacaacacctatttaaaactgaacgacgaagtgatcatgaacaggcggtacacctacctgggctacgcagtgaccgctggccacttctctcacccgtccaccattgatgtggtaggaggtgccccacaggacaaaggcatcggcaaggtttatattttcagagctgaccgaagatcaggcaccttaattaagatctttcaagcatcaggtaaaaagatgggctcttacttcggctcctccttgtgcgcagttgacctgaatggggacggcctctctgacctgctggtgggggcccccatgttttctgagatcagggatgagggacaggtcactgtctacatcaacagaggaaatggagccctcgaggagcagctggctctgactggggatggtgcctacaatgcgcactttggagagagcattgccagcctggacgatctggacaatgatgggttcccagatgtggccattggtgcacccaaggaggatgacttcgcaggggcggtctatatctatcatggtgatgccggtgggatagtccctcagtactcaatgaaactgtctgggcagaagataaatccagtgctccggatgtttggtcagtccatatcgggaggcattgatatggatggaaatggctatcctgatgtcactgttggagccttcatgtccgacagcgtggttcttctcagagcaaggcctgtcattacggtggatgtctccatcttcctcccgggctccatcaacatcacagcgcctcagtgtcacgacggacagcagcctgtgaactgcctgaacgtcaccacctgcttcagcttccatggcaaacacgttccaggagagattggcctgaattatgttctgatggctgacgtggccaaaaaggagaagggccagatgcccagggtctactttgtgctgctgggagagaccatgggtcaggtcacagagaagctgcagctgacttacatggaggagacgtgtcgtcactatgtggcccatgtgaagcggagggtgcaggacgtcatcagcccgatcgtgtttgaagcagcctacagcctcagtgagcatgtgactggagaggaggagagggaactgccgcctctgacaccagttctccgctggaaaaagggacaaaagattgcccaaaagaatcagactgtttttgaaaggaattgccgttcagaggactgtgccgcagacctgcagcttcagggtaaactgctgctctccagtatggatgagaaaaccctgtatctagctttgggggctgtgaagaacatctccctaaacatctctatctccaacctcggagatgatgcctatgatgccaacgtgtccttcaatgtttcccgggagctcttcttcatcaacatgtggcagaaggaggagatgggcatctcctgtgagctgctggaatcggacttcctcaaatgcagcgtgggatttcctttcatgaggtcaaagtcaaagtatgaattcagcgtgatctttgatacaagccacctgtctggggaagaggaagttctcagcttcattgttactgctcagagtggcaacacggagcgctctgaatccctgcatgacaacaccctcgtgctgatggtgccactgatgcacgaggtggacacgtccatcaccggaatcatgtctccaacctcctttgtatatggcgagtccgtggacgcagccaacttcattcagctggatgacctggagtgtcactttcagcccatcaatatcacccttcaggtctacaacactggcccaagcacccttccagggtcatctgtcagcatctctttccctaatcgactctcatctggtggtgcagagatgtttcatgtccaggaaatggtggtgggccaagagaagggaaactgctctttccagaaaaacccaactccctgcatcatccctcaagaacaagaaaatatcttccacacaatatttgcttttttcacaaagtctggaagaaaagtcttggactgtgaaaaaccaggaatttcttgcctaacagcacactgtaactttagtgctcttgctaaagaagaaagtcgtactatagacatttacatgctgctgaacacagaaatactgaaaaaggacagttcgtctgtcatccagttcatgtcccgcgccaaggtgaaggtggatcctgccctaagggtggtggaaatagctcatgggaacccagaagaggtgacggtggtcttcgaggccctgcacaatctggagccccgtggctacgtcgtggggtggatcatcgccatcagtttgttggtgggaatcctcatcttcctgctgctggccgtgctgctctggaagatgggcttctttcgccgaaggtacaaagaaattatcgaagctgagaagaaccggaaagagaatgaagacagttgggactgggtccagaaaaaccagtgagctgccacaccagtcacatgacctgatcactagcctgtcatccttggtctttgtatcttccatatttggaagaaaaaaatcttctccagatttttcggaggccccactgatgctgttctcttcttcattctatcaagcccaggtgccagcctgaggcagccacttcggccaggtcacacgaccggggccagcaccacttcctttaaagatgaactctgaactttggagagtgagctacagagccgagcaatatttatggatgcaacacgcatggtcaaccctcaggggaaaactgttacctaaagtatttttataaatataagccttttatactgattatgtcttttatatttgtatcgatgttttattatttctattaaatagttatataattcactcaagcactgatatctggcctaaaatcttggaagtacatgtccatgaatacaaattttaaaggatgaaaatcttaccgtactttggaacttgctgtttaaaaagacagatgaaataagttgaagaaacctcatgtaatgaatccaccaggctggcagtggtgcatataaactgtgggtgtggcaagaccccgaagacatttcacatctttatcgcctcgatcaagtgtggagtcacatgctaatgtgtgctaaagaactgtaagtgttttttcatatgtacttttcattggaagattcccaacaagaatttggatggaaaacctgatccctagcaagaagtctgctctgtatcacctttatatagcagacatgtcaccctgcttctacacagatgatggatgaaagcttggagcaatgccatgtggtcatctggtaaacctcagaatggcgtctcatcctggacatcctgcatcagagttcacacaccacaaggactaaatccttgtcccctaagcaaagaattgggtctgaatgctgtgagggattgcctttttgtggtaattttcattgagagatcttcatttcccctaccaccctggctgtcccagctagtggtgattgcagattccttcccagagaggacatttaaccgttttaaaaaaaatgtcttagattgggttcccaagaagcagtccctgaaacaaggatttgtgtgcaagtaacttattaaggaagtattcccaggggataccagtaagagagtgggggaagcaggacaaggaaggagacaaagccaggcaaatgtttgtcatttcagggagagctccatgaagtttagcctcagcctgatcaggggaactccggaggaaaagttaggcctcagaggtgtcccaacctgaatcaaggggctggctgcacccagaggagatgtaaacgttttattctcaattcctgctggcgtaatggctccagtagctcaggacagtcctctaaaggacaaccacagatgcatcctcagccaggggagacacagggaaatgatgcaaaagaaatgatgcaaaggatctgagcagaacactgcccctccccaccccctgaatgtgtgagtgctgagttacggccttcagtatccaagctctctgtttgacagtagatatattgtcagatgcactgtgctgcttagttttgagtgcagtgtgattttctgaaagggcaatgagatgatggatgtagcatgctcagcactgacctggcccatagtgatcactcaataactgttaacagctatggctgctattcctactgatggataaccatctaataagacagaaaacatggggctaagagcagggtctaacggagtcttaatggcttattacagcctgccaaagtgccagctacatacacatggcatccagtgcggatgaaacaatctataaaaccaagggtctttcttatagcaccttttttactggaagctaacacgttgggagtccgtgaacattgtcaaaaagacatcaaactcaacttctgggaagacagatttttaatacacatacttggctaatactcacaaacatatctaaagttttggcaaaattatgagggtgatgggtgggtactaacctggcatggagcaggtgtgtcttttggtttcttatgcagttgactctgctgcagggagattacagatgtaacctcatgcttctcttcctggtgaacatgggaatagaccaaaaaaatcaagggtcaatggcatgaactaagctgatcctggaaatcagggatgttgcatctaactgtgggatggaggcacagaggtagctacagggagcaggacgaggcaaagaaagcagctgtcactcagagttcgcttatgagttttatcaaaagcagcaagaaaagcagtcttgggtgggttttatcacttattaacagccatttatgaggcccctgctgtgtgtcaggcactgtgcaaggtgctggaggttccccagagaacacttcagggacattttgcctcagggtggcaaaatgcagtggcatgtggactttttgaatgggatgccatttgcagctttcctttgatggactcttgttcataatgccatgttttctttaatgaatcatttaggattcttaggtgatatttctggaacagcaccatcaacagctttggccacatgcacttagagcaactaacttgcctcctgccggggtgtaggtgcgttggtgacagtgtagaagggtgattcgcaggcccatgttctgcccaccagcaaagccccactggagaagggtagactcctgtgggcagtctcagagctgggacctatttgcttctgcttgattctgcgtgggtggacccacatgagcagctgtatacccaggaggtcactaagactttataaaggcaggttttaagaaaaccagccttggcatcaccaccagcagatactgaaagcctccccaggaacctgtctggggaaggatgatgcctctgctggtctgatcgtgctgagtagcaggtgggctacggggactggggagttaagcattttgtgcagtgatagagaagtcaagcatatcgttagcgctctctcaacttgggcagttcacaagctccttcccagctcagaagccctctctatgctctcaggggaagcagatggggtggatcagtacatctgtgttacccttccagaatattatttgaaaattctacagtatgttctactttctccccttcctgcttccatggtttcactgtggaatcctataagatattctcctgagcagtattatttcagtttccttcagcttttagttgaatcttcaatgtggttttaaccaactgttcagagaactgaaatggtttttaaatatgaaaaaggacctttgtaaaaatggagtaaaacagtgccccttttttaaaaaaagttttgcttatgcttaatttacataggactcaggagagtttggaacatcctccaagtgggccatagagctgtcacaaagaagaggccatgatgtttagaaacaaggggacactagcaggaggggcagggtccactggcttagtggcaactgacaggcatccattccgaataactcagcactgaggtttcctcaggcagttctttaggaaaactgtcagcatcatgggtactcagaggtatggtagaccttgtagaagatccactaggaagtcctccttcaccaaatcatgtagctactgcccttgagccaaaggcaatgaggtttaaaacaaaaacccaacagcactcctgggaacatcctgttttccatgcggaagcatagcagatccccagacgatccgtgtgctgtatgctacctgttgaaccctagcatggtggctttttaaaaggttatttatgacttttatttttgggtaaggcattatggccaggtgcatgcagttatgtctgggttacgtgtgaaacgtacatctggtgaactgtatacttggctcaaacttctcaaaatttagaggtgctggaaaggattgtcacttggagcctttagtagacaaaaggcagaaagtgagcatcatttcagaaatgctttagtatgcacacttttagctgatattttgatatatagaataataatatacacagtggagaatattcaaagagtggctgaagggagaatacagagccagtagggccaaaatgaaacttctaggatgtcttctgaattttcagcacatggggggaataagtgaacaaatttcccaacatcgtgcaatgctttatagcacaatgatctagatttcagactgtgttaaggttttttctttgttgatgttgttgttttaattctaatgtgcacggtgtgactggcagagtgagtttaaaagctttacgagtgattaattgcttggcaggcacccacgctatctgcatttccagaactttactgatgcatccatgtacatttccactgaggaattttggtgggtggggggaggttgtgctgcctcacaatgtcacgtgtattaaagtctaagcagtcacttctgattcacttgcactgtttgggaaatgtcaggtttacaaaaacatacatgtttggaataaaaaatggctgcaaacaattcagaa

SEQ ID NO: 143260 - DNA, 2282 bp, Homo sapiens
  Payload ID: 8303
  Gene Symbol: ITGA9
  Gene Name: integrin, alpha 9
  ENST ID: ENST00000422441
  CDS Start-End: 261-2159
ccgcccggcccgggacccgctcgcgcagacttctcgggcggactgaggacgccgccgctcggggccgcccctgtgctcgccttcagcgcccgctcagcccgccgtccgcgccccggtggcgggcccgacgcccgcattccgcccgtgtccaggcgcagagctcccgccccggggagcttcctggccgtcggcgggccccgcggcccgcgcgctcggcgccctgctcgccgggcagaggggaaggcggcggccggctggggatgggcggcccggctgcgccgaggggcgccgggaggctccgcgcgctgctgctggcgctggtggtcgcggggatccccgcgggcgcctacaacctcgacccgcagcgccccgtgcacttccagggccccgctgactcgttcttcggctacgcagttctggagcatttccacgacaacacgcgctgggtccttgtgggcgcaccaaaggcagattccaaatacagcccttcagtgaagtctcctggggctgtgtttaagtgccgtgttcacaccaaccctgaccggagatgcaccgaactggacatggctcgagggaagaatcggggcacgtcctgcggaaagacctgccgggaagaccgcgatgatgagtggatgggggtgagcctggcccgacagcccaaggctgatggccgtgtgttggcctgtgctcatcgctggaagaacatctactatgaagccgaccacatcctaccccatggcttctgctacatcatcccctccaacctccaggccaaaggcaggacgctgatcccttgctatgaagagtataagaagaagtacggagaggaacacggctcctgccaggctgggatagcgggcttcttcaccgaggagctggtggtgatgggtgctccagggtcattttattgggctggaaccatcaaagtgctgaaccttacggacaacacctatttaaaactgaacgacgaagtgatcatgaacaggcggtacacctacctgggctacgcagtgaccgctggccacttctctcacccgtccaccattgatgtggtaggaggtgccccacaggacaaaggcatcggcaaggtttatattttcagagctgaccgaagatcaggcaccttaattaagatctttcaagcatcaggtaaaaagatgggctcttacttcggctcctccttgtgcgcagttgacctgaatggggacggcctctctgacctgctggtgggggcccccatgttttctgagatcagggatgagggacaggtcactgtctacatcaacagaggaaatggagccctcgaggagcagctggctctgactggggatggtgcctacaatgcgcactttggagagagcattgccagcctggacgatctggacaatgatgggttcccagatgtggccattggtgcacccaaggaggatgacttcgcaggggcggtctatatctatcatggtgatgccggtgggatagtccctcagtactcaatgaaactgtctgggcagaagataaatccagtgctccggatgtttggtcagtccatatcgggaggcattgatatggatggaaatggctatcctgatgtcactgttggagccttcatgtccgacagcgtggttcttctcagagcaaggcctgtcattacggtggatgtctccatcttcctcccgggctccatcaacatcacagcgcctcagtgtcacgacggacagcagcctgtgaactgcctgaacgtcaccacctgcttcagcttccatggcaaacacgttccaggagagattggcctgaattatgttctgatggctgacgtggccaaaaaggagaagggccagatgcccagggtctactttgtgctgctgggagagaccatgggtcaggtcacagagaagctgcagctgacttacatggaggagacgtgtcgtcactatgtggcccatgtgaagcggagggtgcaggacgtcatcagcccgatcgtgtttgaagcagcctacagcctcagtgagcatgtgactggagaggaggagagggaactgccgcctctgacaccagttctccgctggaaaaagggacaaaagattgcccaaaagaatcaggtcagaaccttaaagctcatactcagcacccaaggtggcagctgcacagagcagaaataatggcccaaaagttgagagagccgtgggcctggctgctcaggagaccgcagccaggacacacctcctctctgggtctcccttttctgatctgcaaaatgataaaataaacagtcttaggggtta

SEQ ID NO: 143261 - DNA, 609 bp, Homo sapiens
  Payload ID: 8303
  Gene Symbol: ITGA9
  Gene Name: integrin, alpha 9
  ENST ID: ENST00000411817
  CDS Start-End: 1-208
gaaaaaggacagttcgtctgtcatccagttcatgtcccgcgccaaggtgaaggtggatcctgccctaagggtggtggaaatagctcatgggaacccagaagaggtgacgatgggcttctttcgccgaaggtacaaagaaattatcgaagctgagaagaaccggaaagagaatgaagacagttgggactgggtccagaaaaaccagtgagctgccacaccagtcacatgacctgatcactagcctgtcatccttggtctttgtatcttccatatttggaagaaaaaaatcttctccagatttttcggaggccccactgatgctgttctcttcttcattctatcaagcccaggtgccagcctgaggcagccacttcggccaggtcacacgaccggggccagcaccacttcctttaaagatgaactctgaactttggagagtgagctacagagccgagcaatatttatggatgcaacacgcatggtcaaccctcaggggaaaactgttacctaaagtatttttataaatataagccttttatactgattatgtcttttatatttgtatcgatgttttattatttctattaaatagttatataattcactcaa

SEQ ID NO: 143262 - DNA, 3912 bp, Homo sapiens
  Payload ID: 8304
  Gene Symbol: ITGAD
  Gene Name: integrin, alpha D
  Uniprot ID: Q13349
  ENST ID: ENST00000389202
  CDS Start-End: 50-3535
ctgtgctctgtccccaaccttccacttcccctcaacgcgctgctcagggatgaccttcggcactgtgcttcttctgagtgtcctggcttcttatcatggattcaacctggatgtggaggagcctacgatcttccaggaggatgcaggcggctttgggcagagcgtggtgcagttcggtggatctcgactcgtggtgggagcacccctggaggtggtggcggccaaccagacgggacggctgtatgactgcgcagctgccaccggcatgtgccagcccatcccgctgcacatccgccctgaggccgtgaacatgtccttgggcctgaccctggcagcctccaccaacggctcccggctcctggcctgtggcccgaccctgcacagagtctgtggggagaactcatactcaaagggttcctgcctcctgctgggctcgcgctgggagatcatccagacagtccccgacgccacgccagagtgtccacatcaagagatggacatcgtcttcctgattgacggctctggaagcattgaccaaaatgactttaaccagatgaagggctttgtccaagctgtcatgggccagtttgagggcactgacaccctgtttgcactgatgcagtactcaaacctcctgaagatccacttcaccttcacccaattccggaccagcccgagccagcagagcctggtggatcccatcgtccaactgaaaggcctgacgttcacggccacgggcatcctgacagtggtgacacagctatttcatcataagaatggggcccgaaaaagtgccaagaagatcctcattgtcatcacagatgggcagaagtacaaagaccccctggaatacagtgatgtcatcccccaggcagagaaggctggcatcatccgctacgctatcggggtgggacacgctttccagggacccactgccaggcaggagctgaataccatcagctcagcgcctccgcaggaccacgtgttcaaggtggacaactttgcagcccttggcagcatccagaagcagctgcaggagaagatctatgcagttgagggaacccagtccagggcaagcagctccttccagcacgagatgtcccaagaaggcttcagcacagccctcacaatggatggcctcttcctgggggctgtggggagctttagctggtctggaggtgccttcctgtatcccccaaatatgagccccaccttcatcaacatgtctcaggagaatgtggacatgagggactcttacctgggttactccaccgagctagccctgtggaagggggtacagaacctggtcctgggggccccccgctaccagcataccgggaaggctgtcatcttcacccaggtgtccaggcaatggaggaagaaggccgaagtcacagggacgcagatcggctcctacttcggggcctccctctgctctgtggatgtggacagcgatggcagcaccgacctgatcctcattggggccccccattactatgagcagacccgagggggccaggtgtccgtgtgtcccttgcctagggggagggtgcagtggcagtgtgacgctgttctccgtggtgagcagggccacccctggggccgctttggggcagccctgacagtgttgggggatgtgaatgaggacaagctgatagacgtggccattggggccccgggagagcaggagaaccggggtgctgtctacctgtttcacggagcctcagaatccggcatcagcccctcccacagccagcggattgccagctcccagctctcccccaggctgcagtattttgggcaggcgctgagtgggggtcaggacctcacccaggatggactgatggacctggccgtgggggcccggggccaggtgctcctgctcaggagtctgccggtgctgaaagtgggggtggccatgagattcagccctgtggaggtggccaaggctgtgtaccggtgctgggaagagaagcccagtgccctggaagctggggacgccaccgtctgtctcaccatccagaaaagctcactggaccagctaggtgacatccaaagctctgtcaggtttgatctggcactggacccaggtcgtctgacttctcgtgccattttcaatgaaaccaagaaccccactttgactcgaagaaaaaccctgggactggggattcactgtgaaaccctgaagctgcttttgccagattgtgtggaggatgtggtgagccccatcattctgcacctcaacttctcactggtgagagagcccatcccctccccccagaacctgcgtcctgtgctggccgtgggctcacaagacctcttcactgcttctctccccttcgagaagaactgtgggcaagatggcctctgtgaaggggacctgggtgtcaccctcagcttctcaggcctgcagaccctgaccgtggggagctccctggagctcaacgtgattgtgactgtgtggaacgcaggtgaggattcctacggaaccgtggtcagcctctactatccagcagggctgtcgcaccgacgggtgtcaggagcccagaagcagccccatcagagtgccctgcgcctggcatgtgagacagtgcccactgaggatgagggcctaagaagcagccgctgcagtgtcaaccaccccatcttccatgagggctctaacggcaccttcatagtcacattcgatgtctcctacaaggccaccctgggagacaggatgcttatgagggccagtgcaagcagtgagaacaataaggcttcaagcagcaaggccaccttccagctggagctcccggtgaagtatgcagtctacaccatgatcagcaggcaggaagaatccaccaagtacttcaactttgcaacctccgatgagaagaaaatgaaagaggctgagcatcgataccgtgtgaataacctcagccagcgagatctggccatcagcattaacttctgggttcctgtcctgctgaacggggtggctgtgtgggatgtggtcatggaggccccatctcagagtctcccctgtgtttcagagagaaaacctccccagcattctgacttcctgacccagatttcaagaagtcccatgctggactgctccattgctgactgcctgcagttccgctgtgacgtcccctccttcagcgtccaggaggagctggatttcaccctgaagggcaatctcagtttcggctgggtccgcgagacattgcagaagaaggtgttggtcgtgagtgtggctgaaattacgttcgacacatccgtgtactcccagcttccaggacaggaggcatttatgagagctcagatggagatggtgctagaagaagacgaggtctacaatgccattcccatcatcatgggcagctctgtgggggctctgctactgctggcgctcatcacagccacactgtacaagcttggcttcttcaaacgccactacaaggaaatgctggaggacaagcctgaagacactgccacattcagtggggacgatttcagctgtgtggccccaaatgtgcctttgtcctaataatccactttcctgtttatctctaccactgtgggctggacttgcttgcaaccataaatcaacttacatggaaacaacttctgcatagatctgcactggcctaagcaacctaccaggtgctaagcaccttctcggagagatagagattgtaatgtttttacatatctgtccatctttttcagcaatgacccactttttacagaagcaggcatggtgccagcataaattttcatatgcttaagaattgtcacatgaaatgaggatgtttatagcacactttccttgcgtggaagagctataacccagggacctgagtgcctctctgggaatagtcgggggaacctatttgtgggcattgaaaaagttttttcactttc

SEQ ID NO: 143263 - DNA, 3858 bp, Homo sapiens
  Payload ID: 8305
  Gene Symbol: ITGAE
  Gene Name: integrin, alpha E (antigen CD103, human mucosal lymphocyte antigen 1
  alpha polypeptide)
  Uniprot ID: P38570
  ENST ID: ENST00000263087
  CDS Start-End: 100-3639
ccgcctcctggcctcctggctgaggggaagctgagtgggccacggcccatgtgtcgcactcgcctcggctcccacacagccgcctctgctccagcaaggatgtggctcttccacactctgctctgcatagccagcctggccctgctggccgctttcaatgtggatgtggcccggccctggctcacgcccaagggaggtgcccctttcgtgctcagctcccttctgcaccaagaccccagcaccaaccagacctggctcctggtcaccagccccagaaccaagaggacaccagggcccctccatcgatgttcccttgtccaggatgaaatcctttgccatcctgtagagcatgtccccatccccaaggggaggcaccggggagtgaccgttgtccggagccaccacggtgttttgatatgcattcaagtgctggtccggcggcctcacagcctcagctcagaactcacaggcacctgtagcctcctgggccctgacctccgtccccaggctcaggccaacttcttcgaccttgaaaatctcctggatccagatgcacgtgtggacactggagactgctacagcaacaaagaaggcggtggagaagacgatgtgaacacagccaggcagcgccgggctctggagaaggaggaggaggaagacaaggaggaggaggaagacgaggaggaggaggaagctggcaccgagattgccatcatcctggatggctcaggaagcattgatcccccagactttcagagagccaaagacttcatctccaacatgatgaggaacttctatgaaaagtgttttgagtgcaactttgccttggtgcagtatggaggagtgatccagactgagtttgaccttcgggacagccaggatgtgatggcctccctcgccagagtccagaacatcactcaagtggggagtgtcaccaagactgcctcagccatgcaacacgtcttagacagcatcttcacctcaagccacggctccaggagaaaggcatccaaggtcatggtggtgctcaccgatggtggcatattcgaggaccccctcaaccttacgacagtcatcaactcccccaaaatgcagggtgttgagcgctttgccattggggtgggagaagaatttaagagtgctaggactgcgagggaactgaacctgatcgcctcagacccggatgagacccatgctttcaaggtgaccaactacatggcgctggatgggctgctgagcaaactgcggtacaacatcatcagcatggaaggcacggttggagacgcccttcactaccagctggcacagattggcttcagtgctcagatcctggatgagcggcaggtgctgctcggcgccgtcggggcctttgactggtccggaggggcgttgctctacgacacacgcagccgccggggccgcttcctgaaccagacagcggcggcggcggcagacgcggaggctgcgcagtacagctacctgggttacgctgtggccgtgctgcacaagacctgcagcctctcctacatcgcgggggctccacggtacaaacatcatggggccgtgtttgagctccagaaggagggcagagaggccagcttcctgccagtgctggagggagagcagatggggtcctattttggctctgagctgtgccctgtggacattgacatggatggaagcacggacttcttgctggtggctgctccattttaccacgttcatggagaagaaggcagagtctacgtgtaccgtctcagcgagcaggatggttctttctccttggcacgcatactgagtgggcaccccgggttcaccaatgcccgctttggctttgccatggcggctatgggggatctcagtcaggataagctcacagatgtggccatcggggcccccctggaaggttttggggcagatgatggtgccagcttcggcagtgtgtatatctacaatggacactgggacggcctctccgccagcccctcgcagcggatcagagcctccacggtggccccaggactccagtacttcggcatgtccatggctggtggctttgatattagtggcgacggccttgccgacatcaccgtgggcactctgggccaggcggttgtgttccgctcccggcctgtggttcgcctgaaggtctccatggccttcacccccagcgcactgcccatcggcttcaacggcgtcgtgaatgtccgtttatgttttgaaatcagctctgtaaccacagcctctgagtcaggcctccgcgaggcacttctcaacttcacgctggatgtggatgtggggaagcagaggagacggctgcagtgttcagacgtaagaagctgtctgggctgcctgagggagtggagcagcggatcccagctttgtgaggacctcctgctcatgcccacagagggagagctctgtgaggaggactgcttctccaatgccagtgtcaaagtcagctaccagctccagacccctgagggacagacggaccatccccagcccatcctggaccgctacactgagccctttgccatcttccagctgccctatgagaaggcctgcaagaataagctgttttgtgtcgcagaattacagttggccaccaccgtctctcagcaggagttggtggtgggtctcacaaaggagctgaccctgaacattaacctaactaactccggggaagattcctacatgacaagcatggccttgaattaccccagaaacctgcagttgaagaggatgcaaaagcctccctctccaaacattcagtgtgatgaccctcagccggttgcttctgtcctgatcatgaactgcaggattggtcaccccgtcctcaagaggtcatctgctcatgtttcagtcgtttggcagctagaggagaatgcctttccaaacaggacagcagacatcactgtgactgtcaccaattccaatgaaagacggtctttggccaacgagacccacacccttcaattcaggcatggcttcgttgcagttctgtccaaaccatccataatgtacgtgaacacaggccaggggctttctcaccacaaagaattcctcttccatgtacatggggagaacctctttggagcagaataccagttgcaaatttgcgtcccaaccaaattacgaggtctccaggttgtagcagtgaagaagctgacgaggactcaggcctccacggtgtgcacctggagtcaggagcgcgcttgtgcgtacagttcggttcagcatgtggaagaatggcattcagtgagctgtgtcatcgcttcagataaagaaaatgtcaccgtggctgcagagatctcctgggatcactctgaggagttactaaaagatgtaactgaactgcagatccttggtgaaatatctttcaacaaatctctatatgagggactgaatgcagagaaccacagaactaagatcactgtcgtcttcctgaaagatgagaagtaccattctttgcctatcatcattaaaggcagcgttggtggacttctggtgttgatcgtgattctggtcatcctgttcaagtgtggcttttttaaaagaaaatatcaacaactgaacttggagagcatcaggaaggcccagctgaaatcagagaatctgctcgaagaagagaattaggacctgctatccactgggagaggctatcagccagtcctgggacttggagacccagcatcctttgcattactttttccttcaggatgatctagagcagcatggagctgttggtagaatattagtttttaaccatacattgtcccaaaagtgtctgtgcattgtgcaaaaagtaaacttaggaaacatttggtattaaataaatttacacttttctttgca

SEQ ID NO: 143264 - DNA, 416 bp, Homo sapiens
  Payload ID: 8305
  Gene Symbol: ITGAE
  Gene Name: integrin, alpha E (antigen CD103, human mucosal lymphocyte antigen 1
  alpha polypeptide)
  ENST ID: ENST00000574026
  CDS Start-End: 1-416
ccatccccagcccatcctggaccgctacactgagccctttgccatcttccagctgccctatgagaaggcctgcaagaataagctgttttgtgtcgcagaattacagttggccaccaccgtctctcagcaggagttggtggtgggtctcacaaaggagctgaccctgaacattaacctaactaactccggggaagattcctacatgacaagcatggccttgaattaccccagaaacctgcagttgaagaggatgcaaaaggctcatgtttcagtcgtttggcagctagaggagaatgcctttccaaacaggacagcagacatcactgtgactgtcaccaaaccatccataatgtacgtgaacacaggccaggggctttctcaccacaaagaattcctcttccatgtacatggggaga

SEQ ID NO: 143265 - DNA, 5213 bp, Homo sapiens
  Payload ID: 8306
  Gene Symbol: ITGAL
  Gene Name: integrin, alpha L (antigen CD11A (p180), lymphocyte function-associated antigen 1
  alpha polypeptide)
  Uniprot ID: P20701
  ENST ID: ENST00000356798
  CDS Start-End: 181-3693
aggcacacctccctccccgcctgccagtgtcaccagcctgttgcctctgtgagaaagtaccactgtaagaggccaaagggcatgatcattttcctctttcaccctgtctaggttgccagcaaatcccacgggcctcctgacgctgcccctggggccacaggtccctcgagtgctggaaggatgaaggattcctgcatcactgtgatggccatggcgctgctgtctgggttctttttcttcgcgccggcctcgagctacaacctggacgtgcggggcgcgcggagcttctccccaccgcgcgccgggaggcactttggataccgcgtcctgcaggtcggaaacggggtcatcgtgggagctccaggggaggggaacagcacaggaagcctctatcagtgccagtcgggcacaggacactgcctgccagtcaccctgagaggttccaactatacctccaagtacttgggaatgaccttggcaacagaccccacagatggaagcattttggcctgtgaccctgggctgtctcgaacgtgtgaccagaacacctatctgagtggcctgtgttacctcttccgccagaatctgcagggtcccatgctgcaggggcgccctggttttcaggaatgtatcaagggcaacgtagacctggtatttctgtttgatggttcgatgagcttgcagccagatgaatttcagaaaattctggacttcatgaaggatgtgatgaagaaactcagcaacacttcgtaccagtttgctgctgttcagttttccacaagctacaaaacagaatttgatttctcagattatgttaaacggaaggaccctgatgctctgctgaagcatgtaaagcacatgttgctgttgaccaatacctttggtgccatcaattatgtcgcgacagaggtgttccgggaggagctgggggcccggccagatgccaccaaagtgcttatcatcatcacggatggggaggccactgacagtggcaacatcgatgcggccaaagacatcatccgctacatcatcgggattggaaagcattttcagaccaaggagagtcaggagaccctccacaaatttgcatcaaaacccgcgagcgagtttgtgaaaattctggacacatttgagaagctgaaagatctattcactgagctgcagaagaagatctatgtcattgagggcacaagcaaacaggacctgacttccttcaacatggagctgtcctccagcggcatcagtgctgacctcagcaggggccatgcagtcgtgggggcagtaggagccaaggactgggctgggggctttcttgacctgaaggcagacctgcaggatgacacatttattgggaatgaaccattgacaccagaagtgagagcaggctatttgggttacaccgtgacctggctgccctcccggcaaaagacttcgttgctggcctcgggagcccctcgataccagcacatgggccgagtgctgctgttccaagagccacagggcggaggacactggagccaggtccagacaatccatgggacccagattggctcttatttcggtggggagctgtgtggcgtcgacgtggaccaagatggggagacagagctgctgctgattggtgccccactgttctatggggagcagagaggaggccgggtgtttatctaccagagaagacagttggggtttgaagaagtctcagagctgcagggggaccccggctacccactcgggcggtttggagaagccatcactgctctgacagacatcaacggcgatgggctggtagacgtggctgtgggggcccctctggaggagcagggggctgtgtacatcttcaatgggaggcacggggggcttagtccccagccaagtcagcggatagaagggacccaagtgctctcaggaattcagtggtttggacgctccatccatggggtgaaggaccttgaaggggatggcttggcagatgtggctgtgggggctgagagccagatgatcgtgctgagctcccggcccgtggtggatatggtcaccctgatgtccttctctccagctgagatcccagtgcatgaagtggagtgctcctattcaaccagtaacaagatgaaagaaggagttaatatcacaatctgtttccagatcaagtctctcatcccccagttccaaggccgcctggttgccaatctcacttacactctgcagctggatggccaccggaccagaagacgggggttgttcccaggagggagacatgaactcagaaggaatatagctgtcaccaccagcatgtcatgcactgacttctcatttcatttcccggtatgtgttcaagacctcatctcccccatcaatgtttccctgaatttctctctttgggaggaggaagggacaccgagggaccaaagggcgcagggcaaggacataccgcccatcctgagaccctccctgcactcggaaacctgggagatcccttttgagaagaactgtggggaggacaagaagtgtgaggcaaacttgagagtgtccttctctcctgcaagatccagagccctgcgtctaactgcttttgccagcctctctgtggagctgagcctgagtaacttggaagaagatgcttactgggtccagctggacctgcacttccccccgggactctccttccgcaaggtggagatgctgaagccccatagccagatacctgtgagctgcgaggagcttcctgaagagtccaggcttctgtccagggcattatcttgcaatgtgagctctcccatcttcaaagcaggccactcggttgctctgcagatgatgtttaatacactggtaaacagctcctggggggactcggttgaattgcacgccaatgtgacctgtaacaatgaggactcagacctcctggaggacaactcagccactaccatcatccccatcctgtaccccatcaacatcctcatccaggaccaagaagactccacactctatgtcagtttcacccccaaaggccccaagatccaccaagtcaagcacatgtaccaggtgaggatccagccttccatccacgaccacaacatacccaccctggaggctgtggttggggtgccacagcctcccagcgaggggcccatcacacaccagtggagcgtgcagatggagcctcccgtgccctgccactatgaggatctggagaggctcccggatgcagctgagccttgtctccccggagccctgttccgctgccctgttgtcttcaggcaggagatcctcgtccaagtgatcgggactctggagctggtgggagagatcgaggcctcttccatgttcagcctctgcagctccctctccatctccttcaacagcagcaagcatttccacctctatggcagcaacgcctccctggcccaggttgtcatgaaggttgacgtggtgtatgagaagcagatgctctacctctacgtgctgagcggcatcggggggctgctgctgctgctgctcattttcatagtgctgtacaaggttggtttcttcaaacggaacctgaaggagaagatggaggctggcagaggtgtcccgaatggaatccctgcagaagactctgagcagctggcatctgggcaagaggctggggatcccggctgcctgaagcccctccatgagaaggactctgagagtggtggtggcaaggactgagtccaggcctgtgaggtgcagagtgcccagaactggactcaggatgcccagggccactctgcctctgcctgcattctgccgtgtgccctcgggcgagtcactgcctctccctggccctcagtttccctatctcgaacatggaactcattcctgcctgtctcctttgcaggctcatagggaagacctgctgagggaccagccaagagggctgcaaaagtgagggcttgtcattaccagacggttcaccagcctctcttggtttccttccttggaagagaatgtctgatctaaatgtggagaaactgtagtctcaggacctagggatgttctggccctcacccctgccctgggatgtccacagatgcctccaccccccagaacctgtccttgcacactcccctgcactggagtccagtctcttctgctggcagaaagcaaatgtgacctgtgtcactacgtgactgtggcacacgccttgttcttggccaaagaccaaattccttggcatgccttccagcaccctgcaaaatgagaccctcgtggccttccccagcctcttctagagccgtgatgcctccctgttgaagctctggtgacaccagcctttctcccaggccaggctccttcctgtcttcctgcattcacccagacagctccctctgcctgaaccttccatctcgccacccctccttccttgaccagcagatcccagctcacgtcacacttggttgggtcctcacatctttcacacttccaccagcctgcactactccctcaaagcacacgtcatgtttcttcatccggcagcctggatgttttttccctgtttaatgattgacgtacttagcagctatctctcagtgaactgtgagggtaaaggctatacttgtcttgttcaccttgggatgatgcctcatgatatgtcagggcgtgggacatctagtaggtgcttgacataatttcactgaattaatgacagagccagtgggaagatacagaaaaagaggggctgggctgggcgcggtggttcacgcctgtaatcccagcactttgggaggccaaggagggtggatcacctgaggtcaggagttagaggccagcctggcgaaaccccatctctactaaaaatacaaaatccaggcgtggtggcacacacctgtagtcccagctactcaggaggttgaggtaggagaattgcttgaacctgggaggtggaggttgcagtgagccaagattgcgccattgcactccagcctgggcaacacagcgagactccgtctcaaggaaaaaataaaaataaaaagcgggcacgggcccgtgacatccccacccttggaggctgtcttctcaggctctgccctgccctagctccacaccctctcccaggacccatcacgcctgtgcagtggcccccacagaaagactgagctcaaggtgggaaccacgtctgctaacttggagccccagtgccaagcacagtgcctgcatgtatttatccaataaatgtgaaattctgtcca

SEQ ID NO: 143266 - DNA, 4673 bp, Homo sapiens
  Payload ID: 8306
  Gene Symbol: ITGAL
  Gene Name: integrin, alpha L (antigen CD11A (p180), lymphocyte function-associated antigen 1
  alpha polypeptide)
  Uniprot ID: P20701
  ENST ID: ENST00000358164
  CDS Start-End: 110-3370
gccaaagggcatgatcattttcctctttcaccctgtctaggttgccagcaaatcccacgggcctcctgacgctgcccctggggccacaggtccctcgagtgctggaaggatgaaggattcctgcatcactgtgatggccatggcgctgctgtctgggttctttttcttcgcgccggcctcgagctacaacctggacgtgcggggcgcgcggagcttctccccaccgcgcgccgggaggcactttggataccgcgtcctgcaggtcggaaacggggtcatcgtgggagctccaggggaggggaacagcacaggaagcctctatcagtgccagtcgggcacaggacactgcctgccagtcaccctgagaggttccaactatacctccaagtacttgggaatgaccttggcaacagaccccacagatggaagcattttgtttgctgctgttcagttttccacaagctacaaaacagaatttgatttctcagattatgttaaacggaaggaccctgatgctctgctgaagcatgtaaagcacatgttgctgttgaccaatacctttggtgccatcaattatgtcgcgacagaggtgttccgggaggagctgggggcccggccagatgccaccaaagtgcttatcatcatcacggatggggaggccactgacagtggcaacatcgatgcggccaaagacatcatccgctacatcatcgggattggaaagcattttcagaccaaggagagtcaggagaccctccacaaatttgcatcaaaacccgcgagcgagtttgtgaaaattctggacacatttgagaagctgaaagatctattcactgagctgcagaagaagatctatgtcattgagggcacaagcaaacaggacctgacttccttcaacatggagctgtcctccagcggcatcagtgctgacctcagcaggggccatgcagtcgtgggggcagtaggagccaaggactgggctgggggctttcttgacctgaaggcagacctgcaggatgacacatttattgggaatgaaccattgacaccagaagtgagagcaggctatttgggttacaccgtgacctggctgccctcccggcaaaagacttcgttgctggcctcgggagcccctcgataccagcacatgggccgagtgctgctgttccaagagccacagggcggaggacactggagccaggtccagacaatccatgggacccagattggctcttatttcggtggggagctgtgtggcgtcgacgtggaccaagatggggagacagagctgctgctgattggtgccccactgttctatggggagcagagaggaggccgggtgtttatctaccagagaagacagttggggtttgaagaagtctcagagctgcagggggaccccggctacccactcgggcggtttggagaagccatcactgctctgacagacatcaacggcgatgggctggtagacgtggctgtgggggcccctctggaggagcagggggctgtgtacatcttcaatgggaggcacggggggcttagtccccagccaagtcagcggatagaagggacccaagtgctctcaggaattcagtggtttggacgctccatccatggggtgaaggaccttgaaggggatggcttggcagatgtggctgtgggggctgagagccagatgatcgtgctgagctcccggcccgtggtggatatggtcaccctgatgtccttctctccagctgagatcccagtgcatgaagtggagtgctcctattcaaccagtaacaagatgaaagaaggagttaatatcacaatctgtttccagatcaagtctctcatcccccagttccaaggccgcctggttgccaatctcacttacactctgcagctggatggccaccggaccagaagacgggggttgttcccaggagggagacatgaactcagaaggaatatagctgtcaccaccagcatgtcatgcactgacttctcatttcatttcccggtatgtgttcaagacctcatctcccccatcaatgtttccctgaatttctctctttgggaggaggaagggacaccgagggaccaaagggcgggcaaggacataccgcccatcctgagaccctccctgcactcggaaacctgggagatcccttttgagaagaactgtggggaggacaagaagtgtgaggcaaacttgagagtgtccttctctcctgcaagatccagagccctgcgtctaactgcttttgccagcctctctgtggagctgagcctgagtaacttggaagaagatgcttactgggtccagctggacctgcacttccccccgggactctccttccgcaaggtggagatgctgaagccccatagccagatacctgtgagctgcgaggagcttcctgaagagtccaggcttctgtccagggcattatcttgcaatgtgagctctcccatcttcaaagcaggccactcggttgctctgcagatgatgtttaatacactggtaaacagctcctggggggactcggttgaattgcacgccaatgtgacctgtaacaatgaggactcagacctcctggaggacaactcagccactaccatcatccccatcctgtaccccatcaacatcctcatccaggaccaagaagactccacactctatgtcagtttcacccccaaaggccccaagatccaccaagtcaagcacatgtaccaggtgaggatccagccttccatccacgaccacaacatacccaccctggaggctgtggttggggtgccacagcctcccagcgaggggcccatcacacaccagtggagcgtgcagatggagcctcccgtgccctgccactatgaggatctggagaggctcccggatgcagctgagccttgtctccccggagccctgttccgctgccctgttgtcttcaggcaggagatcctcgtccaagtgatcgggactctggagctggtgggagagatcgaggcctcttccatgttcagcctctgcagctccctctccatctccttcaacagcagcaagcatttccacctctatggcagcaacgcctccctggcccaggttgtcatgaaggttgacgtggtgtatgagaagcagatgctctacctctacgtgctgagcggcatcggggggctgctgctgctgctgctcattttcatagtgctgtacaaggttggtttcttcaaacggaacctgaaggagaagatggaggctggcagaggtgtcccgaatggaatccctgcagaagactctgagcagctggcatctgggcaagaggctggggatcccggctgcctgaagcccctccatgagaaggactctgagagtggtggtggcaaggactgagtccaggcctgtgaggtgcagagtgcccagaactggactcaggatgcccagggccactctgcctctgcctgcattctgccgtgtgccctcgggcgagtcactgcctctccctggccctcagtttccctatctcgaacatggaactcattcctgcctgtctcctttgcaggctcatagggaagacctgctgagggaccagccaagagggctgcaaaagtgagggcttgtcattaccagacggttcaccagcctctcttggtttccttccttggaagagaatgtctgatctaaatgtggagaaactgtagtctcaggacctagggatgttctggccctcacccctgccctgggatgtccacagatgcctccaccccccagaacctgtccttgcacactcccctgcactggagtccagtctcttctgctggcagaaagcaaatgtgacctgtgtcactacgtgactgtggcacacgccttgttcttggccaaagaccaaattccttggcatgccttccagcaccctgcaaaatgagaccctcgtggccttccccagcctcttctagagccgtgatgcctccctgttgaagctctggtgacaccagcctttctcccaggccaggctccttcctgtcttcctgcattcacccagacagctccctctgcctgaaccttccatctcgccacccctccttccttgaccagcagatcccagctcacgtcacacttggttgggtcctcacatctttcacacttccaccagcctgcactactccctcaaagcacacgtcatgtttcttcatccggcagcctggatgttttttccctgtttaatgattgacgtacttagcagctatctctcagtgaactgtgagggtaaaggctatacttgtcttgttcaccttgggatgatgcctcatgatatgtcagggcgtgggacatctagtaggtgcttgacataatttcactgaattaatgacagagccagtgggaagatacagaaaaagaggggctgggctgggcgcggtggttcacgcctgtaatcccagcactttgggaggccaaggagggtggatcacctgaggtcaggagttagaggccagcctggcgaaaccccatctctactaaaaatacaaaatccaggcgtggtggcacacacctgtagtcccagctactcaggaggttgaggtaggagaattgcttgaacctgggaggtggaggttgcagtgagccaagattgcgccattgcactccagcctgggcaacacagcgagactccgtctcaaggaaaaaataaaaataaaaa

SEQ ID NO: 143267 - DNA, 1416 bp, Homo sapiens
  Payload ID: 8306
  Gene Symbol: ITGAL
  Gene Name: integrin, alpha L (antigen CD11A (p180), lymphocyte function-associated antigen 1
  alpha polypeptide)
  ENST ID: ENST00000433423
  CDS Start-End: 88-1302
ctctttcaccctgtctaggttgccagcaaatcccacgggcctcctgacgctgcccctggggccacaggtccctcgagtgctggaaggatgaaggattcctgcatcactgtgatggccatggcgctgctgtctgggttctttttcttcgcgccggcctcgagctacaacctggacgtgcggggcgcgcggagcttctccccaccgcgcgccgggaggcactttggataccgcgtcctgcagatcaagtctctcatcccccagttccaaggccgcctggttgccaatctcacttacactctgcagctggatggccaccggaccagaagacgggggttgttcccaggagggagacatgaactcagaaggaatatagctgtcaccaccagcatgtcatgcactgacttctcatttcatttcccgatgatgtttaatacactggtaaacagctcctggggggactcggttgaattgcacgccaatgtgacctgtaacaatgaggactcagacctcctggaggacaactcagccactaccatcatccccatcctgtaccccatcaacatcctcatccaggaccaagaagactccacactctatgtcagtttcacccccaaaggccccaagatccaccaagtcaagcacatgtaccaggtgaggatccagccttccatccacgaccacaacatacccaccctggaggctgtggttggggtgccacagcctcccagcgaggggcccatcacacaccagtggagcgtgcagatggagcctcccgtgccctgccactatgaggatctggagaggctcccggatgcagctgagccttgtctccccggagccctgttccgctgccctgttgtcttcaggcaggagatcctcgtccaagtgatcgggactctggagctggtgggagagatcgaggcctcttccatgttcagcctctgcagctccctctccatctccttcaacagcagcaagcatttccacctctatggcagcaacgcctccctggcccaggttgtcatgaaggttgacgtggtgtatgagaagcagatgctctacctctacgtgctgagcggcatcggggggctgctgctgctgctgctcattttcatagtgctgtacaaggttggtttcttcaaacggaacctgaaggagaagatggaggctggcagaggtgtcccgaatggaatccctgcagaagactctgagcagctggcatctgggcaagaggctggggatcccggctgcctgaagcccctccatgagaaggactctgagagtggtggtggcaaggactgagtccaggcctgtgaggtgcagagtgcccagaactggactcaggatgcccagggccactctgcctctgcctgcattctgccgtgtgccctcgggcgagtcactgcctctccctgg

SEQ ID NO: 143268 - DNA, 821 bp, Homo sapiens
  Payload ID: 8306
  Gene Symbol: ITGAL
  Gene Name: integrin, alpha L (antigen CD11A (p180), lymphocyte function-associated antigen 1
  alpha polypeptide)
  ENST ID: ENST00000562857
  CDS Start-End: 93-581
ttttcctctttcaccctgtctaggttgccagcaaatcccacgggcctcctgacgctgcccctggggccacaggtccctcgagtgctggaaggatgaaggattcctgcatcactgtgatggccatggcgctgctgtctgggttctttttcttcgcgccggcctcgagctacaacctggacgtgcggggcgcgcggagcttctccccaccgcgcgccgggaggcactttggataccgcgtcctgcaggtcggaaacggggtcatcgtgggagctccaggggaggggaacagcacaggaagcctctatcagtgccagtcgggcacaggacactgcctgccagtcaccctgagaggttccaactatacctccaagtacttgggaatgaccttggcaacagaccccacagatggaagcattttggcctgtgaccctgggctgtctcgaacgtgtgaccagaacacctatctgagtggcctgtgttacctcttccgccagaatctgcagggtcccatgctgcaggggcgccctggttttcaggtttgctgctgttcagttttccacaagctacaaaacagaatttgatttctcagattatgttaaacggaaggaccctgatgctctgctgaagcatgtaaagcacatgttgctgttgaccaatacctttggtgccatcaattatgtcgcgacagaggtgttccgggaggagctgggggcccggccagatgccaccaaagtgcttatcatcatcacggatggggaggccactgacagtggcaacatcgatgcggccaaagacatcatccgctacatcatcggggtagg

SEQ ID NO: 143269 - DNA, 536 bp, Homo sapiens
  Payload ID: 8306
  Gene Symbol: ITGAL
  Gene Name: integrin, alpha L (antigen CD11A (p180), lymphocyte function-associated antigen 1
  alpha polypeptide)
  ENST ID: ENST00000565864
  CDS Start-End: 93-260
ttttcctctttcaccctgtctaggttgccagcaaatcccacgggcctcctgacgctgcccctggggccacaggtccctcgagtgctggaaggatgaaggattcctgcatcactgtgatggccatggcgctgctgtctgggttctttttcttcgcgccggcctcgagctacaacctggacgtgcggggcgcgcggagcttctccccaccgcgcgccgggaggcactttggataccgcgtcctgcaggtcggaaacgggtgagatttctcaccagggtcatcgtgggagctccaggggaggggaacagcacaggaagcctctatcagtgccagtcgggcacaggacactgcctgccagtcaccctgagaggttccaactatacctccaagtacttgggaatgaccttggcaacagaccccacagatggaagcattttggcctgtgaccctgggctgtctcgaacgtgtgaccagaacacctatctgagtggcctgtgttacctcttccgccagaatctgcagggtcccatgctgcagg

SEQ ID NO: 143270 - DNA, 561 bp, Homo sapiens
  Payload ID: 8306
  Gene Symbol: ITGAL
  Gene Name: integrin, alpha L (antigen CD11A (p180), lymphocyte function-associated antigen 1
  alpha polypeptide)
  ENST ID: ENST00000562652
  CDS Start-End: 120-392
actgtaagaggccaaagggcatgatcattttcctctttcaccctgtctaggttgccagcaaatcccacgggcctcctgacgctgcccctggggccacaggtccctcgagtgctggaaggatgaaggattcctgcatcactgtgatggccatggcgctgctgtctgggttctttttcttcgagaggccaaacgggaagttgtatcctcaggccctgggaagagctttcagagctctaggggggccgggagttgctccttccatattcccagaagtcaacgccctggaggggaagcgcagggtgcgggtggcctggggagcgacatccgggtgggcctgggatcggccacctgctgggcacgtgcaggggcgggggtccctcggtcgcagctgacgacccttgccttcctcagcgccggcctcgagctacaacctggacgtgcggggcgcgcggagcttctccccaccgcgcgccgggaggcactttggataccgcgtcctgcaggtcggaaacgggttcctgacactcccttactcccctgcgagcgcctggaagccaggag

SEQ ID NO: 143271 - DNA, 699 bp, Homo sapiens
  Payload ID: 8306
  Gene Symbol: ITGAL
  Gene Name: integrin, alpha L (antigen CD11A (p180), lymphocyte function-associated antigen 1
  alpha polypeptide)
  ENST ID: ENST00000564118
  CDS Start-End: 89-699
cctctttcaccctgtctaggttgccagcaaatcccacgggcctcctgacgctgcccctggggccacaggtccctcgagtgctggaaggatgaaggattcctgcatcactgtgatggccatggcgctgctgtctgggttctttttcttcgcgccggcctcgagctacaacctggacgtgcggggcgcgcggagcttctccccaccgcgcgccgggaggcactttggataccgcgtcctgcaggtcggaaacggggtcatcgtgggagctccaggggaggggaacagcacaggaagcctctatcagtgccagtcgggcacaggacactgcctgccagtcaccctgagaggttccaactatacctccaagtacttgggaatgaccttggcaacagaccccacagatggaagcattttgtttgctgctgttcagttttccacaagctacaaaacagaatttgatttctcagattatgttaaacggaaggaccctgatgctctgctgaagcatgtaaagcacatgttgctgttgaccaatacctttggtgccatcaattatgtcgcgacagaggtgttccgggaggagctgggggcccggccagatgccaccaaagtgcttatcatcatcacggatggggaggccactgacagtggcaacatcgatgcggccaaagacatcatccgctacatcatcggggtagg

SEQ ID NO: 143272 - DNA, 559 bp, Homo sapiens
  Payload ID: 8306
  Gene Symbol: ITGAL
  Gene Name: integrin, alpha L (antigen CD11A (p180), lymphocyte function-associated antigen 1
  alpha polypeptide)
  ENST ID: ENST00000568926
  CDS Start-End: 94-423
attttcctctttcaccctgtctaggttgccagcaaatcccacgggcctcctgacgctgcccctggggccacaggtccctcgagtgctggaaggatgaaggattcctgcatcactgtgatggccatggcgctgctgtctgggttctttttcttcgcgccggcctcgagctacaacctggacgtgcggggcgcgcggagcttctccccaccgcgcgccgggaggcactttggataccgcgtcctgcagctggatggccaccggaccagaagacgggggttgttcccaggagggagacatgaactcagaaggaatatagctgtcaccaccagcatgtcatgcactgacttctcatttcatttcccgatccagagccctgcgtctaactgcttttgccagcctctctgtggagctgagcctgagtaacttggaagaagatgcttactgggtccagctggacctgcacttccccccgggactctccttccgcaaggtggagatgctgaagccccatagccagatacctgtgagctgcgaggagcttcctgaagagtccaggctt

SEQ ID NO: 143273 - DNA, 575 bp, Homo sapiens
  Payload ID: 8306
  Gene Symbol: ITGAL
  Gene Name: integrin, alpha L (antigen CD11A (p180), lymphocyte function-associated antigen 1
  alpha polypeptide)
  ENST ID: ENST00000563615
  CDS Start-End: 1-116
tgaaagaaggagttaatatcacaatctgtttccagatcaagtctctcatcccccagttccaagctggatggccaccggaccagaagacgggggttgttcccaggagggagacatgaactcagaaggaatatagctgtcaccaccagcatgtcatgcactgacttctcatttcatttcccggtatgtgttcaagacctcatctcccccatcaatgtttccctgaatttctctctttgggaggaggaagggacaccgagggaccaaagggcgggcaaggacataccgcccatcctgagaccctccctgcactcggaaacctgggagatcccttttgagaagaactgtggggaggacaagaagtgtgaggcaaacttgagagtgtccttctctcctgcaagatccagagccctgcgtctaactgcttttgccagcctctctgtggagctgagcctgagtaacttggaagaagatgcttactgggtccagctggacctgcacttccccccgggactctccttccgcaaggtggagatgctgaagccccatagccagatacctgtgagctgcgaggagct

SEQ ID NO: 143274 - DNA, 545 bp, Homo sapiens
  Payload ID: 8306
  Gene Symbol: ITGAL
  Gene Name: integrin, alpha L (antigen CD11A (p180), lymphocyte function-associated antigen 1
  alpha polypeptide)
  ENST ID: ENST00000569725
  CDS Start-End: 423-545
gaagagctttcagagctctaggggggccgggagttgctccttccatattcccagaagtcaacgccctggaggggaagcgcagggtgcgggtggcctggggagcgacatccgggtgggcctgggatcggccacctgctgggcacgtgcaggggcgggggtccctcggtcgcagctgacgacccttgccttcctcagcgccggcctcgagctacaacctggacgtgcggggcgcgcggagcttctccccaccgcgcgccgggaggcactttggataccgcgtcctgcaggtcggaaacggggtcatcgtgggagctccaggggaggggaacagcacaggaagcctctatcagtgccagtcgggcacaggacactgcctgccagtcaccctgagaggttccaactatacctccaagtacttgggaatgaccttggcaacagaccccacagatggaagcattttggcctgtgaccctgggctgtctcgaacgtgtgaccagaacacctatctgagtggcctgtgttacctcttccgccagaatctgcag

SEQ ID NO: 143275 - DNA, 3595 bp, Homo sapiens
  Payload ID: 8307
  Gene Symbol: ITGAM
  Gene Name: integrin, alpha M (complement component 3 receptor 3 subunit)
  Uniprot ID: P11215
  ENST ID: ENST00000287497
  CDS Start-End: 76-3534
tggcttccttgtggttcctcagtggtgcctgcaacccctggttcacctccttccaggttctggctccttccagccatggctctcagagtccttctgttaacagccttgaccttatgtcatgggttcaacttggacactgaaaacgcaatgaccttccaagagaacgcaaggggcttcgggcagagcgtggtccagcttcagggatccagggtggtggttggagccccccaggagatagtggctgccaaccaaaggggcagcctctaccagtgcgactacagcacaggctcatgcgagcccatccgcctgcaggtccccgtggaggccgtgaacatgtccctgggcctgtccctggcagccaccaccagcccccctcagctgctggcctgtggtcccaccgtgcaccagacttgcagtgagaacacgtatgtgaaagggctctgcttcctgtttggatccaacctacggcagcagccccagaagttcccagaggccctccgagggtgtcctcaagaggatagtgacattgccttcttgattgatggctctggtagcatcatcccacatgactttcggcggatgaaggagtttgtctcaactgtgatggagcaattaaaaaagtccaaaaccttgttctctttgatgcagtactctgaagaattccggattcactttaccttcaaagagttccagaacaaccctaacccaagatcactggtgaagccaataacgcagctgcttgggcggacacacacggccacgggcatccgcaaagtggtacgagagctgtttaacatcaccaacggagcccgaaagaatgcctttaagatcctagttgtcatcacggatggagaaaagtttggcgatcccttgggatatgaggatgtcatccctgaggcagacagagagggagtcattcgctacgtcattggggtgggagatgccttccgcagtgagaaatcccgccaagagcttaataccatcgcatccaagccgcctcgtgatcacgtgttccaggtgaataactttgaggctctgaagaccattcagaaccagcttcgggagaagatctttgcgatcgagggtactcagacaggaagtagcagctcctttgagcatgagatgtctcaggaaggcttcagcgctgccatcacctctaatggccccttgctgagcactgtggggagctatgactgggctggtggagtctttctatatacatcaaaggagaaaagcaccttcatcaacatgaccagagtggattcagacatgaatgatgcttacttgggttatgctgccgccatcatcttacggaaccgggtgcaaagcctggttctgggggcacctcgatatcagcacatcggcctggtagcgatgttcaggcagaacactggcatgtgggagtccaacgctaatgtcaagggcacccagatcggcgcctacttcggggcctccctctgctccgtggacgtggacagcaacggcagcaccgacctggtcctcatcggggccccccattactacgagcagacccgagggggccaggtgtccgtgtgccccttgcccagggggagggctcggtggcagtgtgatgctgttctctacggggagcagggccaaccctggggccgctttggggcagccctaacagtgctgggggacgtaaatggggacaagctgacggacgtggccattggggccccaggagaggaggacaaccggggtgctgtttacctgtttcacggaacctcaggatctggcatcagcccctcccatagccagcggatagcaggctccaagctctctcccaggctccagtattttggtcagtcactgagtgggggccaggacctcacaatggatggactggtagacctgactgtaggagcccaggggcacgtgctgctgctcaggtcccagccagtactgagagtcaaggcaatcatggagttcaatcccagggaagtggcaaggaatgtatttgagtgtaatgatcaggtggtgaaaggcaaggaagccggagaggtcagagtctgcctccatgtccagaagagcacacgggatcggctaagagaaggacagatccagagtgttgtgacttatgacctggctctggactccggccgcccacattcccgcgccgtcttcaatgagacaaagaacagcacacgcagacagacacaggtcttggggctgacccagacttgtgagaccctgaaactacagttgccgaattgcatcgaggacccagtgagccccattgtgctgcgcctgaacttctctctggtgggaacgccattgtctgctttcgggaacctccggccagtgctggcggaggatgctcagagactcttcacagccttgtttccctttgagaagaattgtggcaatgacaacatctgccaggatgacctcagcatcaccttcagtttcatgagcctggactgcctcgtggtgggtgggccccgggagttcaacgtgacagtgactgtgagaaatgatggtgaggactcctacaggacacaggtcaccttcttcttcccgcttgacctgtcctaccggaaggtgtccacgctccagaaccagcgctcacagcgatcctggcgcctggcctgtgagtctgcctcctccaccgaagtgtctggggccttgaagagcaccagctgcagcataaaccaccccatcttcccggaaaactcagaggtcacctttaatatcacgtttgatgtagactctaaggcttcccttggaaacaaactgctcctcaaggccaatgtgaccagtgagaacaacatgcccagaaccaacaaaaccgaattccaactggagctgccggtgaaatatgctgtctacatggtggtcaccagccatggggtctccactaaatatctcaacttcacggcctcagagaataccagtcgggtcatgcagcatcaatatcaggtcagcaacctggggcagaggagcctccccatcagcctggtgttcttggtgcccgtccggctgaaccagactgtcatatgggaccgcccccaggtcaccttctccgagaacctctcgagtacgtgccacaccaaggagcgcttgccctctcactccgactttctggctgagcttcggaaggcccccgtggtgaactgctccatcgctgtctgccagagaatccagtgtgacatcccgttctttggcatccaggaagaattcaatgctaccctcaaaggcaacctctcgtttgactggtacatcaagacctcgcataaccacctcctgatcgtgagcacagctgagatcttgtttaacgattccgtgttcaccctgctgccgggacagggggcgtttgtgaggtcccagacggagaccaaagtggagccgttcgaggtccccaaccccctgccgctcatcgtgggcagctctgtcgggggactgctgctcctggccctcatcaccgccgcgctgtacaagctcggcttcttcaagcggcaatacaaggacatgatgagtgaagggggtcccccgggggccgaaccccagtagcggctccttcccgacagagctgcctctcggtggccagcaggactctgcccagaccacacgt

SEQ ID NO: 143276 - DNA, 4718 bp, Homo sapiens
  Payload ID: 8307
  Gene Symbol: ITGAM
  Gene Name: integrin, alpha M (complement component 3 receptor 3 subunit)
  Uniprot ID: P11215
  ENST ID: ENST00000544665
  CDS Start-End: 72-3533
ttccttgtggttcctcagtggtgcctgcaacccctggttcacctccttccaggttctggctccttccagccatggctctcagagtccttctgttaacagccttgaccttatgtcatgggttcaacttggacactgaaaacgcaatgaccttccaagagaacgcaaggggcttcgggcagagcgtggtccagcttcagggatccagggtggtggttggagccccccaggagatagtggctgccaaccaaaggggcagcctctaccagtgcgactacagcacaggctcatgcgagcccatccgcctgcaggtccccgtggaggccgtgaacatgtccctgggcctgtccctggcagccaccaccagcccccctcagctgctggcctgtggtcccaccgtgcaccagacttgcagtgagaacacgtatgtgaaagggctctgcttcctgtttggatccaacctacggcagcagccccagaagttcccagaggccctccgagggtgtcctcaagaggatagtgacattgccttcttgattgatggctctggtagcatcatcccacatgactttcggcggatgaaggagtttgtctcaactgtgatggagcaattaaaaaagtccaaaaccttgttctctttgatgcagtactctgaagaattccggattcactttaccttcaaagagttccagaacaaccctaacccaagatcactggtgaagccaataacgcagctgcttgggcggacacacacggccacgggcatccgcaaagtggtacgagagctgtttaacatcaccaacggagcccgaaagaatgcctttaagatcctagttgtcatcacggatggagaaaagtttggcgatcccttgggatatgaggatgtcatccctgaggcagacagagagggagtcattcgctacgtcattggggtgggagatgccttccgcagtgagaaatcccgccaagagcttaataccatcgcatccaagccgcctcgtgatcacgtgttccaggtgaataactttgaggctctgaagaccattcagaaccagcttcgggagaagatctttgcgatcgagggtactcagacaggaagtagcagctcctttgagcatgagatgtctcaggaaggcttcagcgctgccatcacctctaatggccccttgctgagcactgtggggagctatgactgggctggtggagtctttctatatacatcaaaggagaaaagcaccttcatcaacatgaccagagtggattcagacatgaatgatgcttacttgggttatgctgccgccatcatcttacggaaccgggtgcaaagcctggttctgggggcacctcgatatcagcacatcggcctggtagcgatgttcaggcagaacactggcatgtgggagtccaacgctaatgtcaagggcacccagatcggcgcctacttcggggcctccctctgctccgtggacgtggacagcaacggcagcaccgacctggtcctcatcggggccccccattactacgagcagacccgagggggccaggtgtccgtgtgccccttgcccagggggcagagggctcggtggcagtgtgatgctgttctctacggggagcagggccaaccctggggccgctttggggcagccctaacagtgctgggggacgtaaatggggacaagctgacggacgtggccattggggccccaggagaggaggacaaccggggtgctgtttacctgtttcacggaacctcaggatctggcatcagcccctcccatagccagcggatagcaggctccaagctctctcccaggctccagtattttggtcagtcactgagtgggggccaggacctcacaatggatggactggtagacctgactgtaggagcccaggggcacgtgctgctgctcaggtcccagccagtactgagagtcaaggcaatcatggagttcaatcccagggaagtggcaaggaatgtatttgagtgtaatgatcaggtggtgaaaggcaaggaagccggagaggtcagagtctgcctccatgtccagaagagcacacgggatcggctaagagaaggacagatccagagtgttgtgacttatgacctggctctggactccggccgcccacattcccgcgccgtcttcaatgagacaaagaacagcacacgcagacagacacaggtcttggggctgacccagacttgtgagaccctgaaactacagttgccgaattgcatcgaggacccagtgagccccattgtgctgcgcctgaacttctctctggtgggaacgccattgtctgctttcgggaacctccggccagtgctggcggaggatgctcagagactcttcacagccttgtttccctttgagaagaattgtggcaatgacaacatctgccaggatgacctcagcatcaccttcagtttcatgagcctggactgcctcgtggtgggtgggccccgggagttcaacgtgacagtgactgtgagaaatgatggtgaggactcctacaggacacaggtcaccttcttcttcccgcttgacctgtcctaccggaaggtgtccacgctccagaaccagcgctcacagcgatcctggcgcctggcctgtgagtctgcctcctccaccgaagtgtctggggccttgaagagcaccagctgcagcataaaccaccccatcttcccggaaaactcagaggtcacctttaatatcacgtttgatgtagactctaaggcttcccttggaaacaaactgctcctcaaggccaatgtgaccagtgagaacaacatgcccagaaccaacaaaaccgaattccaactggagctgccggtgaaatatgctgtctacatggtggtcaccagccatggggtctccactaaatatctcaacttcacggcctcagagaataccagtcgggtcatgcagcatcaatatcaggtcagcaacctggggcagaggagcctccccatcagcctggtgttcttggtgcccgtccggctgaaccagactgtcatatgggaccgcccccaggtcaccttctccgagaacctctcgagtacgtgccacaccaaggagcgcttgccctctcactccgactttctggctgagcttcggaaggcccccgtggtgaactgctccatcgctgtctgccagagaatccagtgtgacatcccgttctttggcatccaggaagaattcaatgctaccctcaaaggcaacctctcgtttgactggtacatcaagacctcgcataaccacctcctgatcgtgagcacagctgagatcttgtttaacgattccgtgttcaccctgctgccgggacagggggcgtttgtgaggtcccagacggagaccaaagtggagccgttcgaggtccccaaccccctgccgctcatcgtgggcagctctgtcgggggactgctgctcctggccctcatcaccgccgcgctgtacaagctcggcttcttcaagcggcaatacaaggacatgatgagtgaagggggtcccccgggggccgaaccccagtagcggctccttcccgacagagctgcctctcggtggccagcaggactctgcccagaccacacgtagcccccaggctgctggacacgtcggacagcgaagtatccccgacaggacgggcttgggcttccatttgtgtgtgtgcaagtgtgtatgtgcgtgtgtgcaagtgtctgtgtgcaagtgtgtgcacatgtgtgcgtgtgcgtgcatgtgcacttgcacgcccatgtgtgagtgtgtgcaagtatgtgagtgtgtccaagtgtgtgtgcgtgtgtccatgtgtgtgcaagtgtgtgcatgtgtgcgagtgtgtgcatgtgtgtgctcaggggcgtgtggctcacgtgtgtgactcagatgtctctggcgtgtgggtaggtgacggcagcgtagcctctccggcagaagggaactgcctgggctcccttgtgcgtgggtgaagccgctgctgggttttcctccgggagaggggacggtcaatcctgtgggtgaagacagagggaaacacagcagcttctctccactgaaagaagtgggacttcccgtcgcctgcgagcctgcggcctgctggagcctgcgcagcttggatggagactccatgagaagccgtgggtggaaccaggaacctcctccacaccagcgctgatgcccaataaagatgcccactgaggaatgatgaagcttcctttctggattcatttattatttcaatgtgactttaattttttggatggataagcttgtctatggtacaaaaatcacaaggcattcaagtgtacagtgaaaagtctccctttccagatattcaagtcacctccttaaaggtagtcaagattgtgttttgaggtttccttcagacagattccaggcgatgtgcaagtgtatgcacgtgtgcacacacaccacacatacacacacacaagcttttttacacaaatggtagcatactttatattggtctgtatcttgctttttttcaccaatatttctcagacatcggttcatattaagacataaattactttttcattcttttataccgctgcatagtattccattgtgtgagtgtaccataatgtatttaaccagtcttcttttgatatactattttcattctcttgttattgcatcaatgctgagttaataaatcaaatatatgtcatttttgcatatatgtaaggataa

SEQ ID NO: 143277 - DNA, 494 bp, Homo sapiens
  Payload ID: 8307
  Gene Symbol: ITGAM
  Gene Name: integrin, alpha M (complement component 3 receptor 3 subunit)
  ENST ID: ENST00000567031
  CDS Start-End: 1-494
ataccatcgcatccaagccgcctcgtgatcacgtgttccaggtgaataactttgaggctctgaagaccattcagaaccagcttcgggagaagatctttgcgatcgagggtactcagacaggaagtagcagctcctttgagcatgagatgtctcaggaaggcttcagcgctgccatcacctctaatggccccttgctgagcactgtggggagctatgactgggctggtggagtctttctatatacatcaaaggagaaaagcaccttcatcaacatgaccagagtggattcagacatgaatgatgcttacttggatcggcgcctacttcggggcctccctctgctccgtggacgtggacagcaacggcagcaccgacctggtcctcatcggggccccccattactacgagcagacccgagggggccaggtgtccgtgtgccccttgcccaggggggacagatccagagtgttgtgacttatgacctggctctggac

SEQ ID NO: 143278 - DNA, 516 bp, Homo sapiens
  Payload ID: 8307
  Gene Symbol: ITGAM
  Gene Name: integrin, alpha M (complement component 3 receptor 3 subunit)
  ENST ID: ENST00000565142
  CDS Start-End: 1-354
gctaccctcaaaggcaacctctcgtttgactggtacatcaagacctcgcataaccacctcctgatcgtgagcacagctgagatcttgtttaacgattccgtgttcaccctgctgccgggacagggggcgtttgtgaggtcccagacggagaccaaagtggagccgttcgaggtccccaaccccctgccgctcatcgtgggcagctctgtcgggggactgctgctcctggccctcatcaccgccgcgctgtacaaggtgctccccgctgctcccccaccccctcccttcatcctctcgggcctcgcgctgcagctccgtgcctcggtttccccggcggggctgccagctgtgtgactggggcgagtctgggagcctctctgcgcctcagtctcttagggagggtggccgggttcatgcgcggggcgcgctgagaacgagtcgccctccttgtagtttctgtttttctccaggccccgacgcggatgtcactcccctcccgccccgccctcctgggtc

SEQ ID NO: 143279 - DNA, 7030 bp, Homo sapiens
  Payload ID: 8308
  Gene Symbol: ITGAV
  Gene Name: integrin, alpha V
  Uniprot ID: P06756
  ENST ID: ENST00000261023
  CDS Start-End: 275-3421
cctcagacgctgcgtggagcggcggagccggagggaagcaaaggaccgtctgcgctgctgtccccgccccgcgcgctctgcgcccctcgtccctggcggtcgctccgaagctcagccctcttgcctgccccggagctgtcccgggctagccgagaagagagcggccggcaagtttgggcgcgcgcaggcggcgggccgcgggcactgggcgcctcgctggggcggggggaggtggctaccgctcccggcttggcgtcccgcgcgcacttcggcgatggcttttccgccgcggcgacggctgcgcctcggtccccgcggcctcccgcttcttctctcgggactcctgctacctctgtgccgcgccttcaacctagacgtggacagtcctgccgagtactctggccccgagggaagttacttcggcttcgccgtggatttcttcgtgcccagcgcgtcttcccggatgtttcttctcgtgggagctcccaaagcaaacaccacccagcctgggattgtggaaggagggcaggtcctcaaatgtgactggtcttctacccgccggtgccagccaattgaatttgatgcaacaggcaatagagattatgccaaggatgatccattggaatttaagtcccatcagtggtttggagcatctgtgaggtcgaaacaggataaaattttggcctgtgccccattgtaccattggagaactgagatgaaacaggagcgagagcctgttggaacatgctttcttcaagatggaacaaagactgttgagtatgctccatgtagatcacaagatattgatgctgatggacagggattttgtcaaggaggattcagcattgattttactaaagctgacagagtacttcttggtggtcctggtagcttttattggcaaggtcagcttatttcggatcaagtggcagaaatcgtatctaaatacgaccccaatgtttacagcatcaagtataataaccaattagcaactcggactgcacaagctatttttgatgacagctatttgggttattctgtggctgtcggagatttcaatggtgatggcatagatgactttgtttcaggagttccaagagcagcaaggactttgggaatggtttatatttatgatgggaagaacatgtcctccttatacaattttactggcgagcagatggctgcatatttcggattttctgtagctgccactgacattaatggagatgattatgcagatgtgtttattggagcacctctcttcatggatcgtggctctgatggcaaactccaagaggtggggcaggtctcagtgtctctacagagagcttcaggagacttccagacgacaaagctgaatggatttgaggtctttgcacggtttggcagtgccatagctcctttgggagatctggaccaggatggtttcaatgatattgcaattgctgctccatatgggggtgaagataaaaaaggaattgtttatatcttcaatggaagatcaacaggcttgaacgcagtcccatctcaaatccttgaagggcagtgggctgctcgaagcatgccaccaagctttggctattcaatgaaaggagccacagatatagacaaaaatggatatccagacttaattgtaggagcttttggtgtagatcgagctatcttatacagggccagaccagttatcactgtaaatgctggtcttgaagtgtaccctagcattttaaatcaagacaataaaacctgctcactgcctggaacagctctcaaagtttcctgttttaatgttaggttctgcttaaaggcagatggcaaaggagtacttcccaggaaacttaatttccaggtggaacttcttttggataaactcaagcaaaagggagcaattcgacgagcactgtttctctacagcaggtccccaagtcactccaagaacatgactatttcaagggggggactgatgcagtgtgaggaattgatagcgtatctgcgggatgaatctgaatttagagacaaactcactccaattactatttttatggaatatcggttggattatagaacagctgctgatacaacaggcttgcaacccattcttaaccagttcacgcctgctaacattagtcgacaggctcacattctacttgactgtggtgaagacaatgtctgtaaacccaagctggaagtttctgtagatagtgatcaaaagaagatctatattggggatgacaaccctctgacattgattgttaaggctcagaatcaaggagaaggtgcctacgaagctgagctcatcgtttccattccactgcaggctgatttcatcggggttgtccgaaacaatgaagccttagcaagactttcctgtgcatttaagacagaaaaccaaactcgccaggtggtatgtgaccttggaaacccaatgaaggctggaactcaactcttagctggtcttcgtttcagtgtgcaccagcagtcagagatggatacttctgtgaaatttgacttacaaatccaaagctcaaatctatttgacaaagtaagcccagttgtatctcacaaagttgatcttgctgttttagctgcagttgagataagaggagtctcgagtcctgatcatgtctttcttccgattccaaactgggagcacaaggagaaccctgagactgaagaagatgttgggccagttgttcagcacatctatgagctgagaaacaatggtccaagttcattcagcaaggcaatgctccatcttcagtggccttacaaatataataataacactctgttgtatatccttcattatgatattgatggaccaatgaactgcacttcagatatggagatcaaccctttgagaattaagatctcatctttgcaaacaactgaaaagaatgacacggttgccgggcaaggtgagcgggaccatctcatcactaagcgggatcttgccctcagtgaaggagatattcacactttgggttgtggagttgctcagtgcttgaagattgtctgccaagttgggagattagacagaggaaagagtgcaatcttgtacgtaaagtcattactgtggactgagacttttatgaataaagaaaatcagaatcattcctattctctgaagtcgtctgcttcatttaatgtcatagagtttccttataagaatcttccaattgaggatatcaccaactccacattggttaccactaatgtcacctggggcattcagccagcgcccatgcctgtgcctgtgtgggtgatcattttagcagttctagcaggattgttgctactggctgttttggtatttgtaatgtacaggatgggcttttttaaacgggtccggccacctcaagaagaacaagaaagggagcagcttcaacctcatgaaaatggtgaaggaaactcagaaacttaactgcagtttttaagttatgctacatcttgacccactagaattagcaactttattatagatttaaactttcttcatgaggagtaaaaatccaaggctttactgctgatagtgctaattggcattaaccacaaaatgagaattatatttgtcaaccttctccttataaataagttcagacatacatttaataacatagggtgacttgtgtttttaggtatttaaataataaaatttcaagggatagtttttattcaatgtatataagacaggtagtgcctgatttactactttatataaaatagtacctccttcagttactgtttctgatttaatgtacggaactttatttgttgttgttgttgttgttgttgttgttgttttaaagcagtccaaatttggaccttagcaatcatgtcttttgtataggtacttaatgttaatacatattacactacagtttacttttcagaatactaaagactttataactgcatgaacttggatttttttaatcactcatatggtagaattttataaacacatacatgataccatccaaattcttgcttttaataacaaaggtacaatattttgttttagtatgaaaatctggtagatcctattacacttctgtttatattaaatccacaatattttattacatttttaacttgtataaattttaggtcaaatccttcaagccaacctatactaaaaattagttccataatcacaaatggctcttttgtgtaattgtttaatttcacctgaatatcataatgcttaaagccatatggagttggaaattatttccaaagcatatttattccattgttttagtctggctatttacagtataaaaaaagcatttttattaaaatactgtgtagttctttgagatagttgcttatgcatatagtaagtattacattcttagagtagagcagagtttttagttagtattaatttattttcctccattcatgtacttttccttatatttccaaaactgttactgagaatgggtcaagatcagtgagaaatctttacagttgacaggaacctggaccccttaccccaactttatgagtaatgcttggaataaaaactcttaaggcaactcactgatttacttctagcaatagcatgatgttacaggaatattacctctgtttaagcaaggtaatgtgtaaaatcagtctcggctgtcagaataacttctaaaaggtatttttataagcagttcaagttactgaaaaccttttaaacctttctgaagttcgttagtataaattacttttctaggattattaataaaagccacataggtggcaagttgtagttttatatggctctgtagagtggtgaaccttctagaggaatatatgatttattcacagttcctcaaggcctggggatgatgatcagttatacctatttttgtgcaattacatcatgttgtacattagaaatggagagtttaatagctctttaactgctgtcctcattaggtaatgataaatatttcccttaaataattgactattttgctgtgttttaaaaatgattgaaatttatcttgccatatctcataatttcatgcacaagttgactgagctaatcttgagaatatattcgtaaaataggagcacatttagttgaggtatacaaggtaggactctagacaaaaccttctattttagctttagtgaatttcaaaagtaatgggtcttggagtatagatttttattagtagcttgaaagagcttaatcatatgcagtaagtatttttattaccaataaatttaaaattttttaagaaaaatatttttatcctagggccaagtgttgcctgccaccaatcagtaagttagtctataacaaattttaccctaacagttttaccacctagtaacagtcatttctgaaaatatgttggatagaaagtcactctttggcaaaagtgttagaatttgcttttgtgccatctattccttttatggcatctatcttgaaagtaatcttgtattggagattgaaagatgctgtaatttagaaattaacatgatatcttaaattacctttatgaaatatagttttgtataatagcatagattttccttcaaaaaatgaacatttatatatctacaaaaatatggagaagagtaatttgaaagcctactttctgaagaaaatggtgggatttttttttatcatgattaaatatcaaaaaattgccctatgaaaactttaaatctctaaaacatttgaaatactaccatatttgtgatttattgagaataaaaatccattttgaaatgtaaaatttttatgatctgattcagttttaagaaaacatgaatgaactagaagatattaaaaacatttgacattggtaagaaatattgatactgatattgatttttatataggtatttatttcagaattgatattttgagaaaaatacatgtgagtcattttttctgtttctcttttctcttaacgattatcactgtaattctgaatctgaaaggtaaaacaattagtcaaaatattattgccatcattctacctgtgttatgaaactacttattcatagttaattctcattaacacttacatttccataaagaaaactcaagtattaataaaagagactttactggcttaagagggctgtgaaagatttttgatagtgaatcatgaccctaagggagagatttgtgtgataaaagtattgtatataatagatcagcgatttttgtaaggcaaacagaatttgtaagttggcagatcttcctaagttgcaaaatgtaatgatgagcttggtggagaagaatgagtcgttcttggaatacctatgtgcagccactacccatctcaatgtcaccttgtttgcattcttggatagcttgtatatgtagtagtttgatgaataatttaaagaaaaacacctaaaatttgaaaaatgattgtaggatcaaaaaaggcagatgaaattacttaatactcagtgttttggagagtattccttttagtttgttggttggctggtttgaacgatagaaatatgcagcatgcaatatatgcttatatttcattttaatttctgatatataatgaacttcttgggagaggtactgaatctttgatgttttttgtcattgttctcaagtgcaatataacaatgtaaccaaatctagataatttcaaagttgtcattaatttagtaagcctaatataaacaaatatttgtattatttttgttagcaggaaagagtgattaagtgaggttatttacccctaaatggtccattctgcattgtatttcaggctggaaatgaattattctttaccagttttgaaacactttgaaatatcctaaggtaacttggaagctgtgtagtatatcaaattaatttgctacctaataacatagaaagtaaatatctttgtggtcacccacattgggtgagacagaaaatgaatctgttctaaaatttgtaatttgctaacttgatttgagttagtgaaaactggtacagtgttctgcttgatttacaacatgtaacttgtgactgtacaataaacataagcatatggtacca

SEQ ID NO: 143280 - DNA, 6903 bp, Homo sapiens
  Payload ID: 8308
  Gene Symbol: ITGAV
  Gene Name: integrin, alpha V
  Uniprot ID: P06756
  ENST ID: ENST00000374907
  CDS Start-End: 260-3298
ggagcggcggagccggagggaagcaaaggaccgtctgcgctgctgtccccgccccgcgcgctctgcgcccctcgtccctggcggtcgctccgaagctcagccctcttgcctgccccggagctgtcccgggctagccgagaagagagcggccggcaagtttgggcgcgcgcaggcggcgggccgcgggcactgggcgcctcgctggggcggggggaggtggctaccgctcccggcttggcgtcccgcgcgcacttcggcgatggcttttccgccgcggcgacggctgcgcctcggtccccgcggcctcccgcttcttctctcgggactcctgctacctctgtgccgcgccttcaacctagacgtggacagtcctgccgagtactctggccccgagggaagttacttcggcttcgccgtggatttcttcgtgcccagcgcgtcttcccggatgtttcttctcgtgggagctcccaaagcaaacaccacccagcctgggattgtggaaggagggcaggtcctcaaatgtgactggtcttctacccgccggtgccagccaattgaatttgatgcaacaggcaatagagattatgccaaggatgatccattggaatttaagtcccatcagtggtttggagcatctgtgaggtcgaaacaggataaaattttggcctgtgccccattgtaccattggagaactgagatgaaacaggagcgagagcctgttggaacatgctttcttcaagatggaacaaagactgttgagtatgctccatgtagatcacgtcagcttatttcggatcaagtggcagaaatcgtatctaaatacgaccccaatgtttacagcatcaagtataataaccaattagcaactcggactgcacaagctatttttgatgacagctatttgggttattctgtggctgtcggagatttcaatggtgatggcatagatgactttgtttcaggagttccaagagcagcaaggactttgggaatggtttatatttatgatgggaagaacatgtcctccttatacaattttactggcgagcagatggctgcatatttcggattttctgtagctgccactgacattaatggagatgattatgcagatgtgtttattggagcacctctcttcatggatcgtggctctgatggcaaactccaagaggtggggcaggtctcagtgtctctacagagagcttcaggagacttccagacgacaaagctgaatggatttgaggtctttgcacggtttggcagtgccatagctcctttgggagatctggaccaggatggtttcaatgatattgcaattgctgctccatatgggggtgaagataaaaaaggaattgtttatatcttcaatggaagatcaacaggcttgaacgcagtcccatctcaaatccttgaagggcagtgggctgctcgaagcatgccaccaagctttggctattcaatgaaaggagccacagatatagacaaaaatggatatccagacttaattgtaggagcttttggtgtagatcgagctatcttatacagggccagaccagttatcactgtaaatgctggtcttgaagtgtaccctagcattttaaatcaagacaataaaacctgctcactgcctggaacagctctcaaagtttcctgttttaatgttaggttctgcttaaaggcagatggcaaaggagtacttcccaggaaacttaatttccaggtggaacttcttttggataaactcaagcaaaagggagcaattcgacgagcactgtttctctacagcaggtccccaagtcactccaagaacatgactatttcaagggggggactgatgcagtgtgaggaattgatagcgtatctgcgggatgaatctgaatttagagacaaactcactccaattactatttttatggaatatcggttggattatagaacagctgctgatacaacaggcttgcaacccattcttaaccagttcacgcctgctaacattagtcgacaggctcacattctacttgactgtggtgaagacaatgtctgtaaacccaagctggaagtttctgtagatagtgatcaaaagaagatctatattggggatgacaaccctctgacattgattgttaaggctcagaatcaaggagaaggtgcctacgaagctgagctcatcgtttccattccactgcaggctgatttcatcggggttgtccgaaacaatgaagccttagcaagactttcctgtgcatttaagacagaaaaccaaactcgccaggtggtatgtgaccttggaaacccaatgaaggctggaactcaactcttagctggtcttcgtttcagtgtgcaccagcagtcagagatggatacttctgtgaaatttgacttacaaatccaaagctcaaatctatttgacaaagtaagcccagttgtatctcacaaagttgatcttgctgttttagctgcagttgagataagaggagtctcgagtcctgatcatgtctttcttccgattccaaactgggagcacaaggagaaccctgagactgaagaagatgttgggccagttgttcagcacatctatgagctgagaaacaatggtccaagttcattcagcaaggcaatgctccatcttcagtggccttacaaatataataataacactctgttgtatatccttcattatgatattgatggaccaatgaactgcacttcagatatggagatcaaccctttgagaattaagatctcatctttgcaaacaactgaaaagaatgacacggttgccgggcaaggtgagcgggaccatctcatcactaagcgggatcttgccctcagtgaaggagatattcacactttgggttgtggagttgctcagtgcttgaagattgtctgccaagttgggagattagacagaggaaagagtgcaatcttgtacgtaaagtcattactgtggactgagacttttatgaataaagaaaatcagaatcattcctattctctgaagtcgtctgcttcatttaatgtcatagagtttccttataagaatcttccaattgaggatatcaccaactccacattggttaccactaatgtcacctggggcattcagccagcgcccatgcctgtgcctgtgtgggtgatcattttagcagttctagcaggattgttgctactggctgttttggtatttgtaatgtacaggatgggcttttttaaacgggtccggccacctcaagaagaacaagaaagggagcagcttcaacctcatgaaaatggtgaaggaaactcagaaacttaactgcagtttttaagttatgctacatcttgacccactagaattagcaactttattatagatttaaactttcttcatgaggagtaaaaatccaaggctttactgctgatagtgctaattggcattaaccacaaaatgagaattatatttgtcaaccttctccttataaataagttcagacatacatttaataacatagggtgacttgtgtttttaggtatttaaataataaaatttcaagggatagtttttattcaatgtatataagacaggtagtgcctgatttactactttatataaaatagtacctccttcagttactgtttctgatttaatgtacggaactttatttgttgttgttgttgttgttgttgttgttgttttaaagcagtccaaatttggaccttagcaatcatgtcttttgtataggtacttaatgttaatacatattacactacagtttacttttcagaatactaaagactttataactgcatgaacttggatttttttaatcactcatatggtagaattttataaacacatacatgataccatccaaattcttgcttttaataacaaaggtacaatattttgttttagtatgaaaatctggtagatcctattacacttctgtttatattaaatccacaatattttattacatttttaacttgtataaattttaggtcaaatccttcaagccaacctatactaaaaattagttccataatcacaaatggctcttttgtgtaattgtttaatttcacctgaatatcataatgcttaaagccatatggagttggaaattatttccaaagcatatttattccattgttttagtctggctatttacagtataaaaaaagcatttttattaaaatactgtgtagttctttgagatagttgcttatgcatatagtaagtattacattcttagagtagagcagagtttttagttagtattaatttattttcctccattcatgtacttttccttatatttccaaaactgttactgagaatgggtcaagatcagtgagaaatctttacagttgacaggaacctggaccccttaccccaactttatgagtaatgcttggaataaaaactcttaaggcaactcactgatttacttctagcaatagcatgatgttacaggaatattacctctgtttaagcaaggtaatgtgtaaaatcagtctcggctgtcagaataacttctaaaaggtatttttataagcagttcaagttactgaaaaccttttaaacctttctgaagttcgttagtataaattacttttctaggattattaataaaagccacataggtggcaagttgtagttttatatggctctgtagagtggtgaaccttctagaggaatatatgatttattcacagttcctcaaggcctggggatgatgatcagttatacctatttttgtgcaattacatcatgttgtacattagaaatggagagtttaatagctctttaactgctgtcctcattaggtaatgataaatatttcccttaaataattgactattttgctgtgttttaaaaatgattgaaatttatcttgccatatctcataatttcatgcacaagttgactgagctaatcttgagaatatattcgtaaaataggagcacatttagttgaggtatacaaggtaggactctagacaaaaccttctattttagctttagtgaatttcaaaagtaatgggtcttggagtatagatttttattagtagcttgaaagagcttaatcatatgcagtaagtatttttattaccaataaatttaaaattttttaagaaaaatatttttatcctagggccaagtgttgcctgccaccaatcagtaagttagtctataacaaattttaccctaacagttttaccacctagtaacagtcatttctgaaaatatgttggatagaaagtcactctttggcaaaagtgttagaatttgcttttgtgccatctattccttttatggcatctatcttgaaagtaatcttgtattggagattgaaagatgctgtaatttagaaattaacatgatatcttaaattacctttatgaaatatagttttgtataatagcatagattttccttcaaaaaatgaacatttatatatctacaaaaatatggagaagagtaatttgaaagcctactttctgaagaaaatggtgggatttttttttatcatgattaaatatcaaaaaattgccctatgaaaactttaaatctctaaaacatttgaaatactaccatatttgtgatttattgagaataaaaatccattttgaaatgtaaaatttttatgatctgattcagttttaagaaaacatgaatgaactagaagatattaaaaacatttgacattggtaagaaatattgatactgatattgatttttatataggtatttatttcagaattgatattttgagaaaaatacatgtgagtcattttttctgtttctcttttctcttaacgattatcactgtaattctgaatctgaaaggtaaaacaattagtcaaaatattattgccatcattctacctgtgttatgaaactacttattcatagttaattctcattaacacttacatttccataaagaaaactcaagtattaataaaagagactttactggcttaagagggctgtgaaagatttttgatagtgaatcatgaccctaagggagagatttgtgtgataaaagtattgtatataatagatcagcgatttttgtaaggcaaacagaatttgtaagttggcagatcttcctaagttgcaaaatgtaatgatgagcttggtggagaagaatgagtcgttcttggaatacctatgtgcagccactacccatctcaatgtcaccttgtttgcattcttggatagcttgtatatgtagtagtttgatgaataatttaaagaaaaacacctaaaatttgaaaaatgattgtaggatcaaaaaaggcagatgaaattacttaatactcagtgttttggagagtattccttttagtttgttggttggctggtttgaacgatagaaatatgcagcatgcaatatatgcttatatttcattttaatttctgatatataatgaacttcttgggagaggtactgaatctttgatgttttttgtcattgttctcaagtgcaatataacaatgtaaccaaatctagataatttcaaagttgtcattaatttagtaagcctaatataaacaaatatttgtattatttttgttagcaggaaagagtgattaagtgaggttatttacccctaaatggtccattctgcattgtatttcaggctggaaatgaattattctttaccagttttgaaacactttgaaatatcctaaggtaacttggaagctgtgtagtatatcaaattaatttgctacctaataacatagaaagtaaatatctttgtggtcacccacattgggtgagacagaaaatgaatctgttctaaaatttgtaatttgctaacttgatttgagttagtgaaaactggtacagtgttctgcttgatttacaacatgtaacttgtgactgtacaataaacataagcatatggt

SEQ ID NO: 143281 - DNA, 736 bp, Homo sapiens
  Payload ID: 8308
  Gene Symbol: ITGAV
  Gene Name: integrin, alpha V
  ENST ID: ENST00000430709
  CDS Start-End: 1-410
tgaactgcacttcagatatggagatcaaccctttgagaattaagatctcatctttgcaaacaactgaaaagaatgacacggttgccgggcaaggtgagcgggaccatctcatcactaagcgggatcttgccctcagtgaaggagatattcacactttgggttgtggagttgctcagtgcttgaagattgtctgccaagttgggagattagacagaggaaagagtgcaatcttgtacgtaaagtcattactgtggactgagacttttatgaataaagaaaatcagaatcattcctattctctgaagtcgtctgcttcatttaatgtcatagagtttccttataagaatcttccaattgaggatatcaccaactccacattggtaagtcattggtttaggcaaatagaataaatttactcaattcaaatgctgtacatgtttttattttgttttttaaagaacgacagcttaacttttttgataatttaaactaatgaagttatatgatagcattataacctagtttaatattatcattttactccttaccccgaagtgattaaagctagaccttttagtttagcatcttgtccagtgtaagagatttcttagtatatactaaattatattggagaaattttaggaattttcgtttacaaagttagaaagttggaaattaactgcaacaagtgaggcattttgaagatatttaaggagtaaaaatgggatcagcacat

SEQ ID NO: 143282 - DNA, 3288 bp, Homo sapiens
  Payload ID: 8308
  Gene Symbol: ITGAV
  Gene Name: integrin, alpha V
  Uniprot ID: P06756
  ENST ID: ENST00000433736
  CDS Start-End: 131-3139
ctttgtagctcctggagattcaattctttcttgccagggtctttctacctctgcctcacatattccctccatctcttcattccacttccctcatccccaccccccactcccctccatcctcaatacacaaatgctcctaggcaccctccttctgatcctgtacatcttaatgttgtgccggatgtttcttctcgtgggagctcccaaagcaaacaccacccagcctgggattgtggaaggagggcaggtcctcaaatgtgactggtcttctacccgccggtgccagccaattgaatttgatgcaacaggcaatagagattatgccaaggatgatccattggaatttaagtcccatcagtggtttggagcatctgtgaggtcgaaacaggataaaattttggcctgtgccccattgtaccattggagaactgagatgaaacaggagcgagagcctgttggaacatgctttcttcaagatggaacaaagactgttgagtatgctccatgtagatcacaagatattgatgctgatggacagggattttgtcaaggaggattcagcattgattttactaaagctgacagagtacttcttggtggtcctggtagcttttattggcaaggtcagcttatttcggatcaagtggcagaaatcgtatctaaatacgaccccaatgtttacagcatcaagtataataaccaattagcaactcggactgcacaagctatttttgatgacagctatttgggttattctgtggctgtcggagatttcaatggtgatggcatagatgactttgtttcaggagttccaagagcagcaaggactttgggaatggtttatatttatgatgggaagaacatgtcctccttatacaattttactggcgagcagatggctgcatatttcggattttctgtagctgccactgacattaatggagatgattatgcagatgtgtttattggagcacctctcttcatggatcgtggctctgatggcaaactccaagaggtggggcaggtctcagtgtctctacagagagcttcaggagacttccagacgacaaagctgaatggatttgaggtctttgcacggtttggcagtgccatagctcctttgggagatctggaccaggatggtttcaatgatattgcaattgctgctccatatgggggtgaagataaaaaaggaattgtttatatcttcaatggaagatcaacaggcttgaacgcagtcccatctcaaatccttgaagggcagtgggctgctcgaagcatgccaccaagctttggctattcaatgaaaggagccacagatatagacaaaaatggatatccagacttaattgtaggagcttttggtgtagatcgagctatcttatacagggccagaccagttatcactgtaaatgctggtcttgaagtgtaccctagcattttaaatcaagacaataaaacctgctcactgcctggaacagctctcaaagtttcctgttttaatgttaggttctgcttaaaggcagatggcaaaggagtacttcccaggaaacttaatttccaggtggaacttcttttggataaactcaagcaaaagggagcaattcgacgagcactgtttctctacagcaggtccccaagtcactccaagaacatgactatttcaagggggggactgatgcagtgtgaggaattgatagcgtatctgcgggatgaatctgaatttagagacaaactcactccaattactatttttatggaatatcggttggattatagaacagctgctgatacaacaggcttgcaacccattcttaaccagttcacgcctgctaacattagtcgacaggctcacattctacttgactgtggtgaagacaatgtctgtaaacccaagctggaagtttctgtagatagtgatcaaaagaagatctatattggggatgacaaccctctgacattgattgttaaggctcagaatcaaggagaaggtgcctacgaagctgagctcatcgtttccattccactgcaggctgatttcatcggggttgtccgaaacaatgaagccttagcaagactttcctgtgcatttaagacagaaaaccaaactcgccaggtggtatgtgaccttggaaacccaatgaaggctggaactcaactcttagctggtcttcgtttcagtgtgcaccagcagtcagagatggatacttctgtgaaatttgacttacaaatccaaagctcaaatctatttgacaaagtaagcccagttgtatctcacaaagttgatcttgctgttttagctgcagttgagataagaggagtctcgagtcctgatcatgtctttcttccgattccaaactgggagcacaaggagaaccctgagactgaagaagatgttgggccagttgttcagcacatctatgagctgagaaacaatggtccaagttcattcagcaaggcaatgctccatcttcagtggccttacaaatataataataacactctgttgtatatccttcattatgatattgatggaccaatgaactgcacttcagatatggagatcaaccctttgagaattaagatctcatctttgcaaacaactgaaaagaatgacacggttgccgggcaaggtgagcgggaccatctcatcactaagcgggatcttgccctcagtgaaggagatattcacactttgggttgtggagttgctcagtgcttgaagattgtctgccaagttgggagattagacagaggaaagagtgcaatcttgtacgtaaagtcattactgtggactgagacttttatgaataaagaaaatcagaatcattcctattctctgaagtcgtctgcttcatttaatgtcatagagtttccttataagaatcttccaattgaggatatcaccaactccacattggttaccactaatgtcacctggggcattcagccagcgcccatgcctgtgcctgtgtgggtgatcattttagcagttctagcaggattgttgctactggctgttttggtatttgtaatgtacaggatgggcttttttaaacgggtccggccacctcaagaagaacaagaaagggagcagcttcaacctcatgaaaatggtgaaggaaactcagaaacttaactgcagtttttaagttatgctacatcttgacccactagaattagcaactttattatagatttaaactttcttcatgaggagtaaaaatccaaggctttactgctgatagtgctaattggcattaaccacaaaatgagaattatatttgt

SEQ ID NO: 143283 - DNA, 4703 bp, Homo sapiens
  Payload ID: 8309
  Gene Symbol: ITGAX
  Gene Name: integrin, alpha X (complement component 3 receptor 4 subunit)
  Uniprot ID: P20702
  ENST ID: ENST00000268296
  CDS Start-End: 122-3613
atgctgacaatcttcttccttcccctggccacctctctgcccacttgcttcctcagtaccttggtccagctcttcctgcaacggcccaggagctcagagctccacatctgaccttctagtcatgaccaggaccagggcagcactcctcctgttcacagccttagcaacttctctaggtttcaacttggacacagaggagctgacagccttccgtgtggacagcgctgggtttggagacagcgtggtccagtatgccaactcctgggtggtggttggagccccccaaaagataacagctgccaaccaaacgggtggcctctaccagtgtggctacagcactggtgcctgtgagcccatcggcctgcaggtgcccccggaggccgtgaacatgtccctgggcctgtccctggcgtctaccaccagcccttcccagctgctggcctgcggccccaccgtgcaccacgagtgcgggaggaacatgtacctcaccggactctgcttcctcctgggccccacccagctcacccagaggctcccggtgtccaggcaggagtgcccaagacaggagcaggacattgtgttcctgatcgatggctcaggcagcatctcctcccgcaactttgccacgatgatgaacttcgtgagagctgtgataagccagttccagagacccagcacccagttttccctgatgcagttctccaacaaattccaaacacacttcactttcgaggaattcaggcgcagctcaaaccccctcagcctgttggcttctgttcaccagctgcaagggtttacatacacggccaccgccatccaaaatgtcgtgcaccgattgttccatgcctcatatggggcccgtagggatgccgccaaaattctcattgtcatcactgatgggaagaaagaaggcgacagcctggattataaggatgtcatccccatggctgatgcagcaggcatcatccgctatgcaattggggttggattagcttttcaaaacagaaattcttggaaagaattaaatgacattgcatcgaagccctcccaggaacacatatttaaagtggaggactttgatgctctgaaagatattcaaaaccaactgaaggagaagatctttgccattgagggtacggagaccacaagcagtagctccttcgaattggagatggcacaggagggcttcagcgctgtgttcacacctgatggccccgttctgggggctgtggggagcttcacctggtctggaggtgccttcctgtaccccccaaatatgagccctaccttcatcaacatgtctcaggagaatgtggacatgagggactcttacctgggttactccaccgagctggccctctggaaaggggtgcagagcctggtcctgggggccccccgctaccagcacaccgggaaggctgtcatcttcacccaggtgtccaggcaatggaggatgaaggccgaagtcacggggactcagatcggctcctacttcggggcctccctctgctccgtggacgtagacagcgacggcagcaccgacctggtcctcatcggggccccccattactacgagcagacccgagggggccaggtgtctgtgtgtcccttgcccagggggtggagaaggtggtggtgtgatgctgttctctacggggagcagggccacccctggggtcgctttggggcggctctgacagtgctgggggatgtgaatggggacaagctgacagacgtggtcatcggggccccaggagaggaggagaaccggggtgctgtctacctgtttcacggagtcttgggacccagcatcagcccctcccacagccagcggatcgcgggctcccagctctcctccaggctgcagtattttgggcaggcactgagcgggggtcaagacctcacccaggatggactggtggacctggctgtgggggcccggggccaggtgctcctgctcaggaccagacctgtgctctgggtgggggtgagcatgcagttcatacctgccgagatccccaggtctgcgtttgagtgtcgggagcaggtggtctctgagcagaccctggtacagtccaacatctgcctttacattgacaaacgttctaagaacctgcttgggagccgtgacctccaaagctctgtgaccttggacctggccctcgaccctggccgcctgagtccccgtgccaccttccaggaaacaaagaaccggagtctgagccgagtccgagtcctcgggctgaaggcacactgtgaaaacttcaacctgctgctcccgagctgcgtggaggactctgtgacccccattaccttgcgtctgaacttcacgctggtgggcaagcccctccttgccttcagaaacctgcggcctatgctggccgccgatgctcagagatacttcacggcctccctaccctttgagaagaactgtggagccgaccatatctgccaggacaatctcggcatctccttcagcttcccaggcttgaagtccctgctggtggggagtaacctggagctgaacgcagaagtgatggtgtggaatgacggggaagactcctacggaaccaccatcaccttctcccaccccgcaggactgtcctaccgctacgtggcagagggccagaaacaagggcagctgcgttccctgcacctgacatgtgacagcgccccagttgggagccagggcacctggagcaccagctgcagaatcaaccacctcatcttccgtggcggcgcccagatcaccttcttggctacctttgacgtctcccccaaggctgtcctgggagaccggctgcttctgacagccaatgtgagcagtgagaacaacactcccaggaccagcaagaccaccttccagctggagctcccggtgaagtatgctgtctacactgtggttagcagccacgaacaattcaccaaatacctcaacttctcagagtctgaggagaaggaaagccatgtggccatgcacagataccaggtcaataacctgggacagagggacctgcctgtcagcatcaacttctgggtgcctgtggagctgaaccaggaggctgtgtggatggatgtggaggtctcccacccccagaacccatcccttcggtgctcctcagagaaaatcgcacccccagcatctgacttcctggcgcacattcagaagaatcccgtgctggactgctccattgctggctgcctgcggttccgctgtgacgtcccctccttcagcgtccaggaggagctggatttcaccctgaagggcaacctcagctttggctgggtccgccagatattgcagaagaaggtgtcggtcgtgagtgtggctgaaattacgttcgacacatccgtgtactcccagcttccaggacaggaggcatttatgagagctcagacgacaacggtgctggagaagtacaaggtccacaaccccacccccctcatcgtaggcagctccattgggggtctgttgctgctggcactcatcacagcggtactgtacaaagttggcttcttcaagcgtcagtacaaggaaatgatggaggaggcaaatggacaaattgccccagaaaacgggacacagacccccagcccgcccagtgagaaatgatcccctctttgccttggacttcttctcccccgcgagttttccccacttacttaccctcacctgtcaggcctgacggggaggaaccactgcaccaccgagagaggctgggatgggcctgcttcctgtctttgggagaaaacgtcttgcttgggaaggggcctttgtcttgtcaaggttccaactggaaacccttaggacagggtccctgctgtgttccccaaaggacttgacttgcaatttctacctagaaatacatggacaatacccccaggcctcagtctcccttctcccatgaggcacgaatgatctttctttcctttctttttttttttttttcttttcttttttttttttttgagacggagtctcgctctgtcacccaggctggagtgcaatggcgtgatctcggctcactgcaacctccgcctcccgggttcaagtaattctgctgtctcagcctcctgagtagctgggactacaggcacacgccacctcgcccggcccgatctttctaaaatacagttctgaatatgctgctcatccccacctgtcttcaacagctccccattaccctcaggacaatgtctgaactctccagcttcgcgtgagaagtccccttccatcccagagggtgggcttcagggcgcacagcatgagaggctctgtgcccccatcaccctcgtttccagtgaattagtgtcatgtcagcatcagctcagggcttcatcgtggggctctcagttccgatttcccaggctgaattgggagtgagatgcctgcatgctgggttctgcacagctggcctcccgcgttgggcaacattgctggctggaagggaggagcgccctctagggagggacatggccccggtgcggctgcagctcacccagccccaggggcagaagagacccaaccacttctattttttgaggctatgaatatagtacctgaaaaaatgccaagacatgattatttttttaaaaagcgtactttaaatgtttgtgttaataaattaaaacatgcacaaaaagatgcatctaccgctcttgggaaatatgtcaaaggtctaaaaataaaaaagccttctgtg

SEQ ID NO: 143284 - DNA, 3990 bp, Homo sapiens
  Payload ID: 8309
  Gene Symbol: ITGAX
  Gene Name: integrin, alpha X (complement component 3 receptor 4 subunit)
  ENST ID: ENST00000562522
  CDS Start-End: 34-3543
ggagctcagagctccacatctgaccttctagtcatgaccaggaccagggcagcactcctcctgttcacagccttagcaacttctctaggtttcaacttggacacagaggagctgacagccttccgtgtggacagcgctgggtttggagacagcgtggtccagtatgccaactcctgggtggtggttggagccccccaaaagataacagctgccaaccaaacgggtggcctctaccagtgtggctacagcactggtgcctgtgagcccatcggcctgcaggtgcccccggaggccgtgaacatgtccctgggcctgtccctggcgtctaccaccagcccttcccagctgctggcctgcggccccaccgtgcaccacgagtgcgggaggaacatgtacctcaccggactctgcttcctcctgggccccacccagctcacccagaggctcccggtgtccaggcaggagtgcccaagacaggagcaggacattgtgttcctgatcgatggctcaggcagcatctcctcccgcaactttgccacgatgatgaacttcgtgagagctgtgataagccagttccagagacccagcacccagttttccctgatgcagttctccaacaaattccaaacacacttcactttcgaggaattcaggcgcagctcaaaccccctcagcctgttggcttctgttcaccagctgcaagggtttacatacacggccaccgccatccaaaatgtcgtgcaccgattgttccatgcctcatatggggcccgtagggatgccgccaaaattctcattgtcatcactgatgggaagaaagaaggcgacagcctggattataaggatgtcatccccatggctgatgcagcaggcatcatccgctatgcaattggggttggattagcttttcaaaacagaaattcttggaaagaattaaatgacattgcatcgaagccctcccaggaacacatatttaaagtggaggactttgatgctctgaaagatattcaaaaccaactgaaggagaagatctttgccattgagggtacggagaccacaagcagtagctccttcgaattggagatggcacaggagggcttcagcgctgtgttcacacctgatggccccgttctgggggctgtggggagcttcacctggtctggaggtgccttcctgtaccccccaaatatgagccctaccttcatcaacatgtctcaggagaatgtggacatgagggactcttacctgggttactccaccgagctggccctctggaaaggggtgcagagcctggtcctgggggccccccgctaccagcacaccgggaaggctgtcatcttcacccaggtgtccaggcaatggaggatgaaggccgaagtcacggggactcagatcggctcctacttcggggcctccctctgctccgtggacgtagacagcgacggcagcaccgacctggtcctcatcggggccccccattactacgagcagacccgagggggccaggtgtctgtgtgtcccttgcccagggggtggagaaggtggtggtgtgatgctgttctctacggggagcagggccacccctggggtcgctttggggcggctctgacagtgctgggggatgtgaatggggacaagctgacagacgtggtcatcggggccccaggagaggaggagaaccggggtgctgtctacctgtttcacggagtcttgggacccagcatcagcccctcccacagccagcggatcgcgggctcccagctctcctccaggctgcagtattttgggcaggcactgagcgggggtcaagacctcacccaggatggactggtggacctggctgtgggggcccggggccaggtgctcctgctcaggaccagacctgtgctctgggtgggggtgagcatgcagttcatacctgccgagatccccaggtctgcgtttgagtgtcgggagcaggtggtctctgagcagaccctggtacagtccaacatctgcctttacattgacaaacgttctaagaacctgcttgggagccgtgacctccaaagctctgtgaccttggacctggccctcgaccctggccgcctgagtccccgtgccaccttccaggaaacaaagaaccggagtctgagccgagtccgagtcctcgggctgaaggcacactgtgaaaacttcaacctgctgctcccgagctgcgtggaggactctgtgacccccattaccttgcgtctgaacttcacgctggtgggcaagcccctccttgccttcagaaacctgcggcctatgctggccgccgatgctcagagatacttcacggcctccctaccctttgagaagaactgtggagccgaccatatctgccaggacaatctcggcatctccttcagcttcccaggcttgaagtccctgctggtggggagtaacctggagctgaacgcagaagtgatggtgtggaatgacggggaagactcctacggaaccaccatcaccttctcccaccccgcaggactgtcctaccgctacgtggcagagggccagaaacaagggcagctgcgttccctgcacctgacatgtgacagcgccccagttgggagccagggcacctggagcaccagctgcagaatcaaccacctcatcttccgtggcggcgcccagatcaccttcttggctacctttgacgtctcccccaaggctgtcctgggagaccggctgcttctgacagccaatgtgagcagtgagaacaacactcccaggaccagcaagaccaccttccagctggagctcccggtgaagtatgctgtctacactgtggttagcagccacgaacaattcaccaaatacctcaacttctcagagtctgaggagaaggaaagccatgtggccatgcacagataccaggtcaataacctgggacagagggacctgcctgtcagcatcaacttctgggtgcctgtggagctgaaccaggaggctgtgtggatggatgtggaggtctcccacccccagaacccatcccttcggtgctcctcagagaaaatcgcacccccagcatctgacttcctggcgcacattcagaagaatcccgtgctggactgctccattgctggctgcctgcggttccgctgtgacgtcccctccttcagcgtccaggaggagctggatttcaccctgaagggcaacctcagctttggctgggtccgccagatattgcagaagaaggtgtcggtcgtgagtgtggctgaaattacgttcgacacatccgtgtactcccagcttccaggacaggaggcatttatgagagctcagacgacaacggtgctggagaagtacaaggtccacaaccccacccccctcatcgtaggcagctccattgggggtctgttgctgctggcactcatcacagcggtactgtacaaagttggcttcttcaagcgtcagtacaaggaaatgatggaggaggcaaatggacaaattgccccagaaaacgggacacagacccccagcccgcccactccccattaccctcaggacaatgtctgaactctccagcttcgcgtgagaagtccccttccatcccagagggtgggcttcagggcgcacagcatgagaggctctgtgcccccatcaccctcgtttccagtgaattagtgtcatgtcagcatcagctcagggcttcatcgtggggctctcagttccgatttcccaggctgaattgggagtgagatgcctgcatgctgggttctgcacagctggcctcccgcgttgggcaacattgctggctggaagggaggagcgccctctagggagggacatggccccggtgcggctgcagctcacccagccccaggggcagaagagacccaaccacttctattttttgaggctatgaatatagtacctgaaaaaatgccaagacatgattatttttttaaaaagcgtactttaaatgtttgtgttaataaattaaaacatgcacaaaaagatgca

SEQ ID NO: 143285 - DNA, 1521 bp, Homo sapiens
  Payload ID: 8309
  Gene Symbol: ITGAX
  Gene Name: integrin, alpha X (complement component 3 receptor 4 subunit)
  ENST ID: ENST00000562918
  CDS Start-End: 82-627
ccacttgcttcctcagtaccttggtccagctcttcctgcaacggcccaggagctcagagctccacatctgaccttctagtcatgaccaggaccagggcagcactcctcctgttcacagccttagcaacttctctaggtttcaacttggacacagaggagctgacagccttccgtgtggacagcgctgggtttggagacagcgtggtccagtatgccaactcctgggtggtggttggagccccccaaaagataacagctgccaaccaaacgggtggcctctaccagtgtggctacagcactggtgcctgtgagcccatcggcctgcaggtgcccccggaggccgtgaacatgtccctgggcctgtccctggcgtctaccaccagcccttcccagctgctgctcacccagaggctcccggtgtccaggcagggtgagtgtcgggaccaccaaggctttgaggagctcacgcacatccaattgggggtgcggtgggctagagacagtcttgccagagtggatcagaaagaagggatctggaaaaagagttaccacgtgttgcagtggttcctgacgctgctgcccgcacatcctgccgatcgcccgcacgctgccggacctttcctgtgaccttaacctctccaagcctcagtttcttcatctgttggatggggataataacacacccagcactgaaagcaacacaggatgattcatggccaggggttagcacagcagctagcaccaggcgacagccccatgaaggccagctgttgttatttttagaggagaggatctattttcatccaatgggtcctgggatatgaccaattggtttgtgccgtagtttaggaaaggtcagtgaaagtgcagtgtgagcaacgtgtgtgtgtgtacatgtgtgtatatgtatgcatgtgtatacatgtgcacatgcacacatgtacatgcatgtgtgtgcatgtatgtgtgtgtgcgtgtgcacatgcaggttgagacgcagggcctgacttccctggtgctgatggggaagaaagataaggaagcaaaacagtgggctttggcaggctgaggcctccccctggtttcacatttgctctcaagcctttggtgagactgacatctggctgcaaatagggtgtgccttccagcacctccgtgggtccagactccatccacaggggcctgggcacccatcagaatgcccaggacacctgtctctccggtggaggcctctggggcagaggggatgcttgagaggtcacatggaagggggtttcctctccaggtgctggaagatcgtctcttctcaggacagatgctaacttcacacaggaggggagtgggggcctgtatttaagctgagaacagaacaggcccagtgtgtggctgttgcctgggatgatttgtttaaaatattaacaatcaaggcaagagggttgtttgaggcctggagtttgagaccagcctgggcaacatagtgagacctcatctctacaaaaaataaatataaaatacaaagta

SEQ ID NO: 143286 - DNA, 3640 bp, Homo sapiens
  Payload ID: 8310
  Gene Symbol: ITGB1
  Gene Name: integrin, beta 1 (fibronectin receptor, beta polypeptide, antigen CD29 includes MDF2, MSK12)
  Uniprot ID: P05556
  ENST ID: ENST00000302278
  CDS Start-End: 66-2462
agcgggagtcgcggaacagcaggcccgagcccaccgcgccgggccccggacgccgcgcggaaaagatgaatttacaaccaattttctggattggactgatcagttcagtttgctgtgtgtttgctcaaacagatgaaaatagatgtttaaaagcaaatgccaaatcatgtggagaatgtatacaagcagggccaaattgtgggtggtgcacaaattcaacatttttacaggaaggaatgcctacttctgcacgatgtgatgatttagaagccttaaaaaagaagggttgccctccagatgacatagaaaatcccagaggctccaaagatataaagaaaaataaaaatgtaaccaaccgtagcaaaggaacagcagagaagctcaagccagaggatattactcagatccaaccacagcagttggttttgcgattaagatcaggggagccacagacatttacattaaaattcaagagagctgaagactatcccattgacctctactaccttatggacctgtcttactcaatgaaagacgatttggagaatgtaaaaagtcttggaacagatctgatgaatgaaatgaggaggattacttcggacttcagaattggatttggctcatttgtggaaaagactgtgatgccttacattagcacaacaccagctaagctcaggaacccttgcacaagtgaacagaactgcaccagcccatttagctacaaaaatgtgctcagtcttactaataaaggagaagtatttaatgaacttgttggaaaacagcgcatatctggaaatttggattctccagaaggtggtttcgatgccatcatgcaagttgcagtttgtggatcactgattggctggaggaatgttacacggctgctggtgttttccacagatgccgggtttcactttgctggagatgggaaacttggtggcattgttttaccaaatgatggacaatgtcacctggaaaataatatgtacacaatgagccattattatgattatccttctattgctcaccttgtccagaaactgagtgaaaataatattcagacaatttttgcagttactgaagaatttcagcctgtttacaaggagctgaaaaacttgatccctaagtcagcagtaggaacattatctgcaaattctagcaatgtaattcagttgatcattgatgcatacaattccctttcctcagaagtcattttggaaaacggcaaattgtcagaaggcgtaacaataagttacaaatcttactgcaagaacggggtgaatggaacaggggaaaatggaagaaaatgttccaatatttccattggagatgaggttcaatttgaaattagcataacttcaaataagtgtccaaaaaaggattctgacagctttaaaattaggcctctgggctttacggaggaagtagaggttattcttcagtacatctgtgaatgtgaatgccaaagcgaaggcatccctgaaagtcccaagtgtcatgaaggaaatgggacatttgagtgtggcgcgtgcaggtgcaatgaagggcgtgttggtagacattgtgaatgcagcacagatgaagttaacagtgaagacatggatgcttactgcaggaaagaaaacagttcagaaatctgcagtaacaatggagagtgcgtctgcggacagtgtgtttgtaggaagagggataatacaaatgaaatttattctggcaaattctgcgagtgtgataatttcaactgtgatagatccaatggcttaatttgtggaggaaatggtgtttgcaagtgtcgtgtgtgtgagtgcaaccccaactacactggcagtgcatgtgactgttctttggatactagtacttgtgaagccagcaacggacagatctgcaatggccggggcatctgcgagtgtggtgtctgtaagtgtacagatccgaagtttcaagggcaaacgtgtgagatgtgtcagacctgccttggtgtctgtgctgagcataaagaatgtgttcagtgcagagccttcaataaaggagaaaagaaagacacatgcacacaggaatgttcctattttaacattaccaaggtagaaagtcgggacaaattaccccagccggtccaacctgatcctgtgtcccattgtaaggagaaggatgttgacgactgttggttctattttacgtattcagtgaatgggaacaacgaggtcatggttcatgttgtggagaatccagagtgtcccactggtccagacatcattccaattgtagctggtgtggttgctggaattgttcttattggccttgcattactgctgatatggaagcttttaatgataattcatgacagaagggagtttgctaaatttgaaaaggagaaaatgaatgccaaatgggacacgggtgaaaatcctatttataagagtgccgtaacaactgtggtcaatccgaagtatgagggaaaatgagtactgcccgtgcaaatcccacaacactgaatgcaaagtagcaatttccatagtcacagttaggtagctttagggcaatattgccatggttttactcatgtgcaggttttgaaaatgtacaatatgtataatttttaaaatgttttattattttgaaaataatgttgtaattcatgccagggactgacaaaagacttgagacaggatggttactcttgtcagctaaggtcacattgtgcctttttgaccttttcttcctggactattgaaatcaagcttattggattaagtgatatttctatagcgattgaaagggcaatagttaaagtaatgagcatgatgagagtttctgttaatcatgtattaaaactgatttttagctttacaaatatgtcagtttgcagttatgcagaatccaaagtaaatgtcctgctagctagttaaggattgttttaaatctgttattttgctatttgcctgttagacatgactgatgacatatctgaaagacaagtatgttgagagttgctggtgtaaaatacgtttgaaatagttgatctacaaaggccatgggaaaaattcagagagttaggaaggaaaaaccaatagctttaaaacctgtgtgccattttaagagttacttaatgtttggtaacttttatgccttcactttacaaattcaagccttagataaaagaaccgagcaattttctgctaaaaagtccttgatttagcactatttacatacaggccatactttacaaagtatttgctgaatggggaccttttgagttgaatttattttattatttttattttgtttaatgtctggtgctttctgtcacctcttctaatcttttaatgtatttgtttgcaattttggggtaagactttttttatgagtactttttctttgaagttttagcggtcaatttgcctttttaatgaacatgtgaagttatactgtggctatgcaacagctctcacctacgcgagtcttactttgagttagtgccataacagaccactgtatgtttacttctcaccatttgagttgcccatcttgtttcacactagtcacattcttgttttaagtgcctttagttttaacagttcactttttacagtgctatttactgaagttatttattaaatatgcctaaaatacttaaatcgga

SEQ ID NO: 143287 - DNA, 3784 bp, Homo sapiens
  Payload ID: 8310
  Gene Symbol: ITGB1
  Gene Name: integrin, beta 1 (fibronectin receptor, beta polypeptide, antigen CD29 includes MDF2, MSK12)
  Uniprot ID: P05556
  ENST ID: ENST00000396033
  CDS Start-End: 137-2533
gagccagcccagccgcgttccgaacgtgagggtcgccggcctgggcgctgtcacgtcggggctgccggagctgcgggggaccgggcccgaacggcccctgacacctgcggtctcccgccgggctgggcaagcgcagatgaatttacaaccaattttctggattggactgatcagttcagtttgctgtgtgtttgctcaaacagatgaaaatagatgtttaaaagcaaatgccaaatcatgtggagaatgtatacaagcagggccaaattgtgggtggtgcacaaattcaacatttttacaggaaggaatgcctacttctgcacgatgtgatgatttagaagccttaaaaaagaagggttgccctccagatgacatagaaaatcccagaggctccaaagatataaagaaaaataaaaatgtaaccaaccgtagcaaaggaacagcagagaagctcaagccagaggatattactcagatccaaccacagcagttggttttgcgattaagatcaggggagccacagacatttacattaaaattcaagagagctgaagactatcccattgacctctactaccttatggacctgtcttactcaatgaaagacgatttggagaatgtaaaaagtcttggaacagatctgatgaatgaaatgaggaggattacttcggacttcagaattggatttggctcatttgtggaaaagactgtgatgccttacattagcacaacaccagctaagctcaggaacccttgcacaagtgaacagaactgcaccagcccatttagctacaaaaatgtgctcagtcttactaataaaggagaagtatttaatgaacttgttggaaaacagcgcatatctggaaatttggattctccagaaggtggtttcgatgccatcatgcaagttgcagtttgtggatcactgattggctggaggaatgttacacggctgctggtgttttccacagatgccgggtttcactttgctggagatgggaaacttggtggcattgttttaccaaatgatggacaatgtcacctggaaaataatatgtacacaatgagccattattatgattatccttctattgctcaccttgtccagaaactgagtgaaaataatattcagacaatttttgcagttactgaagaatttcagcctgtttacaaggagctgaaaaacttgatccctaagtcagcagtaggaacattatctgcaaattctagcaatgtaattcagttgatcattgatgcatacaattccctttcctcagaagtcattttggaaaacggcaaattgtcagaaggcgtaacaataagttacaaatcttactgcaagaacggggtgaatggaacaggggaaaatggaagaaaatgttccaatatttccattggagatgaggttcaatttgaaattagcataacttcaaataagtgtccaaaaaaggattctgacagctttaaaattaggcctctgggctttacggaggaagtagaggttattcttcagtacatctgtgaatgtgaatgccaaagcgaaggcatccctgaaagtcccaagtgtcatgaaggaaatgggacatttgagtgtggcgcgtgcaggtgcaatgaagggcgtgttggtagacattgtgaatgcagcacagatgaagttaacagtgaagacatggatgcttactgcaggaaagaaaacagttcagaaatctgcagtaacaatggagagtgcgtctgcggacagtgtgtttgtaggaagagggataatacaaatgaaatttattctggcaaattctgcgagtgtgataatttcaactgtgatagatccaatggcttaatttgtggaggaaatggtgtttgcaagtgtcgtgtgtgtgagtgcaaccccaactacactggcagtgcatgtgactgttctttggatactagtacttgtgaagccagcaacggacagatctgcaatggccggggcatctgcgagtgtggtgtctgtaagtgtacagatccgaagtttcaagggcaaacgtgtgagatgtgtcagacctgccttggtgtctgtgctgagcataaagaatgtgttcagtgcagagccttcaataaaggagaaaagaaagacacatgcacacaggaatgttcctattttaacattaccaaggtagaaagtcgggacaaattaccccagccggtccaacctgatcctgtgtcccattgtaaggagaaggatgttgacgactgttggttctattttacgtattcagtgaatgggaacaacgaggtcatggttcatgttgtggagaatccagagtgtcccactggtccagacatcattccaattgtagctggtgtggttgctggaattgttcttattggccttgcattactgctgatatggaagcttttaatgataattcatgacagaagggagtttgctaaatttgaaaaggagaaaatgaatgccaaatgggacacgggtgaaaatcctatttataagagtgccgtaacaactgtggtcaatccgaagtatgagggaaaatgagtactgcccgtgcaaatcccacaacactgaatgcaaagtagcaatttccatagtcacagttaggtagctttagggcaatattgccatggttttactcatgtgcaggttttgaaaatgtacaatatgtataatttttaaaatgttttattattttgaaaataatgttgtaattcatgccagggactgacaaaagacttgagacaggatggttactcttgtcagctaaggtcacattgtgcctttttgaccttttcttcctggactattgaaatcaagcttattggattaagtgatatttctatagcgattgaaagggcaatagttaaagtaatgagcatgatgagagtttctgttaatcatgtattaaaactgatttttagctttacaaatatgtcagtttgcagttatgcagaatccaaagtaaatgtcctgctagctagttaaggattgttttaaatctgttattttgctatttgcctgttagacatgactgatgacatatctgaaagacaagtatgttgagagttgctggtgtaaaatacgtttgaaatagttgatctacaaaggccatgggaaaaattcagagagttaggaaggaaaaaccaatagctttaaaacctgtgtgccattttaagagttacttaatgtttggtaacttttatgccttcactttacaaattcaagccttagataaaagaaccgagcaattttctgctaaaaagtccttgatttagcactatttacatacaggccatactttacaaagtatttgctgaatggggaccttttgagttgaatttattttattatttttattttgtttaatgtctggtgctttctgtcacctcttctaatcttttaatgtatttgtttgcaattttggggtaagactttttttatgagtactttttctttgaagttttagcggtcaatttgcctttttaatgaacatgtgaagttatactgtggctatgcaacagctctcacctacgcgagtcttactttgagttagtgccataacagaccactgtatgtttacttctcaccatttgagttgcccatcttgtttcacactagtcacattcttgttttaagtgcctttagttttaacagttcactttttacagtgctatttactgaagttatttattaaatatgcctaaaatacttaaatcggatgtcttgactctgatgtattttatcaggttgtgtgcatgaaatttttatagattaaagaagttgaggaaaagc

SEQ ID NO: 143288 - DNA, 3729 bp, Homo sapiens
  Payload ID: 8310
  Gene Symbol: ITGB1
  Gene Name: integrin, beta 1 (fibronectin receptor, beta polypeptide, antigen CD29 includes MDF2, MSK12)
  Uniprot ID: P05556
  ENST ID: ENST00000423113
  CDS Start-End: 1-2406
atgaatttacaaccaattttctggattggactgatcagttcagtttgctgtgtgtttgctcaaacagatgaaaatagatgtttaaaagcaaatgccaaatcatgtggagaatgtatacaagcagggccaaattgtgggtggtgcacaaattcaacatttttacaggaaggaatgcctacttctgcacgatgtgatgatttagaagccttaaaaaagaagggttgccctccagatgacatagaaaatcccagaggctccaaagatataaagaaaaataaaaatgtaaccaaccgtagcaaaggaacagcagagaagctcaagccagaggatattactcagatccaaccacagcagttggttttgcgattaagatcaggggagccacagacatttacattaaaattcaagagagctgaagactatcccattgacctctactaccttatggacctgtcttactcaatgaaagacgatttggagaatgtaaaaagtcttggaacagatctgatgaatgaaatgaggaggattacttcggacttcagaattggatttggctcatttgtggaaaagactgtgatgccttacattagcacaacaccagctaagctcaggaacccttgcacaagtgaacagaactgcaccagcccatttagctacaaaaatgtgctcagtcttactaataaaggagaagtatttaatgaacttgttggaaaacagcgcatatctggaaatttggattctccagaaggtggtttcgatgccatcatgcaagttgcagtttgtggatcactgattggctggaggaatgttacacggctgctggtgttttccacagatgccgggtttcactttgctggagatgggaaacttggtggcattgttttaccaaatgatggacaatgtcacctggaaaataatatgtacacaatgagccattattatgattatccttctattgctcaccttgtccagaaactgagtgaaaataatattcagacaatttttgcagttactgaagaatttcagcctgtttacaaggagctgaaaaacttgatccctaagtcagcagtaggaacattatctgcaaattctagcaatgtaattcagttgatcattgatgcatacaattccctttcctcagaagtcattttggaaaacggcaaattgtcagaaggcgtaacaataagttacaaatcttactgcaagaacggggtgaatggaacaggggaaaatggaagaaaatgttccaatatttccattggagatgaggttcaatttgaaattagcataacttcaaataagtgtccaaaaaaggattctgacagctttaaaattaggcctctgggctttacggaggaagtagaggttattcttcagtacatctgtgaatgtgaatgccaaagcgaaggcatccctgaaagtcccaagtgtcatgaaggaaatgggacatttgagtgtggcgcgtgcaggtgcaatgaagggcgtgttggtagacattgtgaatgcagcacagatgaagttaacagtgaagacatggatgcttactgcaggaaagaaaacagttcagaaatctgcagtaacaatggagagtgcgtctgcggacagtgtgtttgtaggaagagggataatacaaatgaaatttattctggcaaattctgcgagtgtgataatttcaactgtgatagatccaatggcttaatttgtggaggaaatggtgtttgcaagtgtcgtgtgtgtgagtgcaaccccaactacactggcagtgcatgtgactgttctttggatactagtacttgtgaagccagcaacggacagatctgcaatggccggggcatctgcgagtgtggtgtctgtaagtgtacagatccgaagtttcaagggcaaacgtgtgagatgtgtcagacctgccttggtgtctgtgctgagcataaagaatgtgttcagtgcagagccttcaataaaggagaaaagaaagacacatgcacacaggaatgttcctattttaacattaccaaggtagaaagtcgggacaaattaccccagccggtccaacctgatcctgtgtcccattgtaaggagaaggatgttgacgactgttggttctattttacgtattcagtgaatgggaacaacgaggtcatggttcatgttgtggagaatccagagtgtcccactggtccagacatcattccaattgtagctggtgtggttgctggaattgttcttattggccttgcattactgctgatatggaagcttttaatgataattcatgacagaagggagtttgctaaatttgaaaaggagaaaatgaatgccaaatgggacacgcaagaaaatccgatttacaagagtcctattaataatttcaagaatccaaactacggacgtaaagctggtctctaaattgccggtgaaaatcctatttataagagtgccgtaacaactgtggtcaatccgaagtatgagggaaaatgagtactgcccgtgcaaatcccacaacactgaatgcaaagtagcaatttccatagtcacagttaggtagctttagggcaatattgccatggttttactcatgtgcaggttttgaaaatgtacaatatgtataatttttaaaatgttttattattttgaaaataatgttgtaattcatgccagggactgacaaaagacttgagacaggatggttactcttgtcagctaaggtcacattgtgcctttttgaccttttcttcctggactattgaaatcaagcttattggattaagtgatatttctatagcgattgaaagggcaatagttaaagtaatgagcatgatgagagtttctgttaatcatgtattaaaactgatttttagctttacaaatatgtcagtttgcagttatgcagaatccaaagtaaatgtcctgctagctagttaaggattgttttaaatctgttattttgctatttgcctgttagacatgactgatgacatatctgaaagacaagtatgttgagagttgctggtgtaaaatacgtttgaaatagttgatctacaaaggccatgggaaaaattcagagagttaggaaggaaaaaccaatagctttaaaacctgtgtgccattttaagagttacttaatgtttggtaacttttatgccttcactttacaaattcaagccttagataaaagaaccgagcaattttctgctaaaaagtccttgatttagcactatttacatacaggccatactttacaaagtatttgctgaatggggaccttttgagttgaatttattttattatttttattttgtttaatgtctggtgctttctgtcacctcttctaatcttttaatgtatttgtttgcaattttggggtaagactttttttatgagtactttttctttgaagttttagcggtcaatttgcctttttaatgaacatgtgaagttatactgtggctatgcaacagctctcacctacgcgagtcttactttgagttagtgccataacagaccactgtatgtttacttctcaccatttgagttgcccatcttgtttcacactagtcacattcttgttttaagtgcctttagttttaacagttcactttttacagtgctatttactgaagttatttattaaatatgcctaaaatacttaaatcggatgtcttgactctgatgtattttatcaggttgtgtgcatgaaatttttatagattaaagaagttgaggaaaagc

SEQ ID NO: 143289 - DNA, 445 bp, Homo sapiens
  Payload ID: 8310
  Gene Symbol: ITGB1
  Gene Name: integrin, beta 1 (fibronectin receptor, beta polypeptide, antigen CD29 includes MDF2, MSK12)
  ENST ID: ENST00000437302
  CDS Start-End: 37-445
acacctgcggtctcccgccgggctgggcaagcgcagatgaatttacaaccaattttctggattggactgatcagttcagtttgctgtgtgtttgctcaaacagatgaaaatagatgtttaaaagcaaatgccaaatcatgtggagaatgtatacaagcagggccaaattgtgggtggtgcacaaattcaacatttttacaggaaggaatgcctacttctgcacgatgtgatgatttagaagccttaaaaaagaagggttgccctccagatgacatagaaaatcccagaggctccaaagatataaagaaaaataaaaatgtaaccaaccgtagcaaaggaacagcagagaagctcaagccagaggatattactcagatccaaccacagcagttggttttgcgattaagatcaggggagccacagacatttacattaaaattcaaga

SEQ ID NO: 143290 - DNA, 500 bp, Homo sapiens
  Payload ID: 8310
  Gene Symbol: ITGB1
  Gene Name: integrin, beta 1 (fibronectin receptor, beta polypeptide, antigen CD29 includes MDF2, MSK12)
  ENST ID: ENST00000414670
  CDS Start-End: 354-500
gaacagcaggcccgagcccaccgcgccgggccccggacgccgcgcggaaaagatacctgatcagagaagcagtttgatgtactaaaggcttctcgattgggagacaggaaacctgggtgtcagtgccgggtctgccactgaatttctgtgtgacctttgtcagagtactgtacttccagagcgttggtttccacatctaccctataaagcagcctgcatgtttctctcattctctcgttcgaggagttggaggatagctgctgcctgatggaaaggcaaaaaagtccgcaggcatagagagtggaaagaaggaacagcatactaggctggtttgaaaaacaatcaattgctagatgaatttacaaccaattttctggattggactgatcagttcagtttgctgtgtgtttgctcaaacagatgaaaatagatgtttaaaagcaaatgccaaatcatgtggagaatgtatacaagcagggccaaattgtgggtggtgcaca

SEQ ID NO: 143291 - DNA, 569 bp, Homo sapiens
  Payload ID: 8310
  Gene Symbol: ITGB1
  Gene Name: integrin, beta 1 (fibronectin receptor, beta polypeptide, antigen CD29 includes MDF2, MSK12)
  ENST ID: ENST00000417122
  CDS Start-End: 301-569
agcccgcgggagaggcccagcgggagtcgcggaacagcaggcccgagcccaccgcgccgggccccggacgccgcgcggaaaagatacctgatcagagaagcagtttgatgtactaaaggcttctcgattgggagacaggaaacctgggtgtcagtgccgggtctgccactgaatttctgtgtgacctttgtcagagtactgtacttccagagcgttggtttccacatctaccctataaagcagcctgcatgtttctctcattctctcgttcgaggagttggaggatagctgctgcctgatatgaatttacaaccaattttctggattggactgatcagttcagtttgctgtgtgtttgctcaaacagatgaaaatagatgtttaaaagcaaatgccaaatcatgtggagaatgtatacaagcagggccaaattgtgggtggtgcacaaattcaacatttttacaggaaggaatgcctacttctgcacgatgtgatgatttagaagccttaaaaaagaagggttgccctccagatgacatagaaaatcccagaggctccaaagatataaa

SEQ ID NO: 143292 - DNA, 552 bp, Homo sapiens
  Payload ID: 8310
  Gene Symbol: ITGB1
  Gene Name: integrin, beta 1 (fibronectin receptor, beta polypeptide, antigen CD29 includes MDF2, MSK12)
  ENST ID: ENST00000475184
  CDS Start-End: 179-552
agtgcaaacgcagtgagtcatccgcagggcgtgcggagtgtgccggctgggtccctgcagcccccaagcccggagggatgcgggaaaatcgctcttggaagatgcaattgctttaataatcgactttcacccttagtagcagaaaaacgaccgtggccacagtaccacaaagtctctgatgaatttacaaccaattttctggattggactgatcagttcagtttgctgtgtgtttgctcaaacagatgaaaatagatgtttaaaagcaaatgccaaatcatgtggagaatgtatacaagcagggccaaattgtgggtggtgcacaaattcaacatttttacaggaaggaatgcctacttctgcacgatgtgatgatttagaagccttaaaaaagaagggttgccctccagatgacatagaaaatcccagaggctccaaagatataaagaaaaataaaaatgtaaccaaccgtagcaaaggaacagcagagaagctcaagccagaggatattactcagatccaaccacagcagttggttttgcgattaagatc

SEQ ID NO: 143293 - DNA, 861 bp, Homo sapiens
  Payload ID: 8310
  Gene Symbol: ITGB1
  Gene Name: integrin, beta 1 (fibronectin receptor, beta polypeptide, antigen CD29 includes MDF2, MSK12)
  ENST ID: ENST00000488427
  CDS Start-End: 1-211
tgtagctggtgtggttgctggaattgttcttattggccttgcattactgctgatatggaagcttttaatgataattcatgacagaagggagtttgctaaatttgaaaaggagaaaatgaatgccaaatgggacacgcaagaaaatccgatttacaagagtcctattaataatttcaagaatccaaactacggacgtaaagctggtctctaaattgccggtgaaaatcctatttataagagtgccgtaacaactgtggtcaatccgaagtatgagggaaaatgagtactgcccgtgcaaatcccacaacactgaatgcaaagtagcaatttccatagtcacagttaggtagctttagggcaatattgccatggttttactcatgtgcaggttttgaaaatgtacaatatgtataatttttaaaatgttttattattttgaaaataatgttgtaattcatgccagggactgacaaaagacttgagacaggatggttactcttgtcagctaaggtcacattgtgcctttttgaccttttcttcctggactattgaaatcaagcttattggattaagtgatatttctatagcgattgaaagggcaatagttaaagtaatgagcatgatgagagtttctgttaatcatgtattaaaactgatttttagctttacaaatatgtcagtttgcagttatgcagaatccaaagtaaatgtcctgctagctagttaaggattgttttaaatctgttattttgctatttgcctgttagacatgactgatgacatatctgaaagacaagtatgttgagagttgctggtgtaaaatacgtttgaaatagttgatctacaaaggccatgggaaaa

SEQ ID NO: 143294 - DNA, 585 bp, Homo sapiens
  Payload ID: 8310
  Gene Symbol: ITGB1
  Gene Name: integrin, beta 1 (fibronectin receptor, beta polypeptide, antigen CD29 includes MDF2, MSK12)
  ENST ID: ENST00000480226
  CDS Start-End: 95-585
aatgaaaagtggtcaaacaacttaacatggtgccagttttcctaagcgtgcttgccactgattgtaatgcttttattgtttggcttcttgataaatgaatttacaaccaattttctggattggactgatcagttcagtttgctgtgtgtttgctcaaacagatgaaaatagatgtttaaaagcaaatgccaaatcatgtggagaatgtatacaagcagggccaaattgtgggtggtgcacaaattcaacatttttacaggaaggaatgcctacttctgcacgatgtgatgatttagaagccttaaaaaagaagggttgccctccagatgacatagaaaatcccagaggctccaaagatataaagaaaaataaaaatgtaaccaaccgtagcaaaggaacagcagagaagctcaagccagaggatattactcagatccaaccacagcagttggttttgcgattaagatcaggggagccacagacatttacattaaaattcaagagagctgaagactatcccattgacctctactaccttatggacctgtcttactcaatgaaagacgatttggagaatgtaaaaag

SEQ ID NO: 143295 - DNA, 562 bp, Homo sapiens
  Payload ID: 8310
  Gene Symbol: ITGB1
  Gene Name: integrin, beta 1 (fibronectin receptor, beta polypeptide, antigen CD29 includes MDF2, MSK12)
  ENST ID: ENST00000494395
  CDS Start-End: 1-325
agacatggatgcttactgcaggaaagaaaacagttcagaaatctgcagtaacaatggagagtgcgtctgcggacagtgtgtttgtaggaagagggataatacaaatgaaatttattctggcaaattctgcgagtgtgataatttcaactgtgatagatccaatggcttaatttgtggaggaaatggtgtttgcaagtgtcgtgtgtgtgagtgcaaccccaactacactggcagtgcatgtgactgttctttggatactagtacttgtgaagccagcaacggacagatctgcaatggccggggcatctgcgagtgtggtgtctagtgtcccactggtccagacatcattccaattgtagctggtgtggttgctggaattgttcttattggccttgcattactgctgatatggaagcttttaatgataattcatgacagaagggagtttgctaaatttgaaaaggagaaaatgaatgccaaatgggacacgggtgaaaatcctatttataagagtgccgtaacaactgtggtcaatccgaagtatgagggaaaatgagtactg

SEQ ID NO: 143296 - DNA, 540 bp, Homo sapiens
  Payload ID: 8310
  Gene Symbol: ITGB1
  Gene Name: integrin, beta 1 (fibronectin receptor, beta polypeptide, antigen CD29 includes MDF2, MSK12)
  ENST ID: ENST00000488494
  CDS Start-End: 84-540
agcccgcgggagaggcccagcgggagtcgcggaacagcaggcccgagcccaccgcgccgggccccggacgccgcgcggaaaagatgaatttacaaccaattttctggattggactgatcagttcagtttgctgtgtgtttgctcaaacagatgaaaatagatgtttaaaagcaaatgccaaatcatgtggagaatgtatacaagcagggccaaattgtgggtggtgcacaaattcagtaagtaagacatttttacaggaaggaatgcctacttctgcacgatgtgatgatttagaagccttaaaaaagaagggttgccctccagatgacatagaaaatcccagaggctccaaagatataaagaaaaataaaaatgtaaccaaccgtagcaaaggaacagcagagaagctcaagccagaggatattactcagatccaaccacagcagttggttttgcgattaagatcaggggagccacagacatttacattaaaattcaagagagctgaagactatcccattgacctctactaccttatgg

SEQ ID NO: 143297 - DNA, 788 bp, Homo sapiens
  Payload ID: 8310
  Gene Symbol: ITGB1
  Gene Name: integrin, beta 1 (fibronectin receptor, beta polypeptide, antigen CD29 includes MDF2, MSK12)
  ENST ID: ENST00000474568
  CDS Start-End: 493-788
ccgccagcccgcgggagaggcccagcgggagtcgcggaacagcaggcccgagcccaccgcgccgggccccggacgccgcgcggaaaagatgaatttacaaccaattttctggattggactgatcagttcagtttgctgtgtgtttgctcaaacagattttctataagaagcatatgctggttttataatctcagaaaagatacgttggagacagtctgtattagcgcttaccatgtagaaggcatactcttccttaggtagatgcaaagaaacctaaaacatactttgaacatagagcctgagaaattctgggattatggattagatgaatatggacttttcagttatttaacatactgaaagcaaagggaaagccttgaagattcttatgaaaatagatgtttaaaagcaaatgccaaatcatgtggagaatgtatacaagcagggccaaattgtgggtggtgcacaaattcaacatttttacaggaaggaatgcctacttctgcacgatgtgatgatttagaagccttaaaaaagaagggttgccctccagatgacatagaaaatcccagaggctccaaagatataaagaaaaataaaaatgtaaccaaccgtagcaaaggaacagcagagaagctcaagccagaggatattactcagatccaaccacagcagttggttttgcgattaagatcaggggagccacagacatttacattaaaattcaagagagctgaagactatcccattgacctctactaccttatggacctgtcttactcaatgaa

SEQ ID NO: 143298 - DNA, 668 bp, Homo sapiens
  Payload ID: 8310
  Gene Symbol: ITGB1
  Gene Name: integrin, beta 1 (fibronectin receptor, beta polypeptide, antigen CD29 includes MDF2, MSK12)
  ENST ID: ENST00000472147
  CDS Start-End: 627-668
tgttggctgggttggtctcaaactcctgacctcaggatgttggccttagcctgaagaaataaaaactgatgaagcgcattgttagcagagggatgacttgatcaggtttttgaaaacgaatgttcagcattgaggtaactgaggcatctggatatgctggtctgggcccctgggagccgcaggagataatggagatagagattctatgggctgagaccattgatgaatttacaaccaattttctggattggactgatcagttcagtttgctgtgtgtttgctcaaacagattttctataagaagcatatgctggttttataatctcagaaaagatacgttggagacagtctgtattagcgcttaccatgtagaaggcatactcttccttaggtagatgcaaagaaacctaaaacatactttgaacatagagcctgagaaattctgggattatggattagatgaatatggacttttcagttatttaacatactgaaagcaaagggaaagccttgaagattcttatgaaaatagatgtttaaaagcaaatgccaaatcatgtggagaatgtatacaagcagggccaaattgtgggtggtgcacaaattcaacatttttacaggaaggaatgcctacttctgcacgatgtgatgatttagaagccttaaaa

SEQ ID NO: 143299 - DNA, 366 bp, Homo sapiens
  Payload ID: 8310
  Gene Symbol: ITGB1
  Gene Name: integrin, beta 1 (fibronectin receptor, beta polypeptide, antigen CD29 includes MDF2, MSK12)
  ENST ID: ENST00000493758
  CDS Start-End: 274-366
atgaatttacaaccaattttctggattggactgatcagttcagtttgctgtgtgtttgctcaaacagattttctataagaagcatatgctggttttataatctcagaaaagatacgttggagacagtctgtattagcgcttaccatgtagaaggcatactcttccttagatgaaaatagatgtttaaaagcaaatgccaaatcatgtggagaatgtatacaagcagggccaaattgtgggtggtgcacaaattcaacatttttacaggaaggaatgcctacttctgcacgatgtgatgatttagaagccttaaaaaagaagggttgccctccagatgacatagaaaatcccagaggctccaaagat

SEQ ID NO: 143300 - DNA, 562 bp, Homo sapiens
  Payload ID: 8310
  Gene Symbol: ITGB1
  Gene Name: integrin, beta 1 (fibronectin receptor, beta polypeptide, antigen CD29 includes MDF2, MSK12)
  ENST ID: ENST00000534049
  CDS Start-End: 134-562
gagtttctgtgcacacactctcctgcctgctgccacgtaagacgtgccttttgcctgccgccatgtaatatgtgcctttgctcctccttcgccttctgccatgattgtgaggtctccccagccatgctgaactatgaatttacaaccaattttctggattggactgatcagttcagtttgctgtgtgtttgctcaaacagatgaaaatagatgtttaaaagcaaatgccaaatcatgtggagaatgtatacaagcagggccaaattgtgggtggtgcacaaattcaacatttttacaggaaggaatgcctacttctgcacgatgtgatgatttagaagccttaaaaaagaagggttgccctccagatgacatagaaaatcccagaggctccaaagatataaagaaaaataaaaatgtaaccaaccgtagcaaaggaacagcagagaagctcaagccagaggatattactcagatccaaccacagcagttggttttgcgattaagatcaggggagccacagacatttacattaaaattcaagagagctgaagactatcccatt

SEQ ID NO: 143301 - DNA, 546 bp, Homo sapiens
  Payload ID: 8310
  Gene Symbol: ITGB1
  Gene Name: integrin, beta 1 (fibronectin receptor, beta polypeptide, antigen CD29 includes MDF2, MSK12)
  ENST ID: ENST00000528877
  CDS Start-End: 234-546
agaaatcttaaagtagaagcgtcacaggacttgttcttccaaatgctgcatggcaaatattattaggaaatatacttaacatttatttatttttattctcaataaggagttacattcaaagtaactggaagtgacggatgagaaaaatatatctaggttggtgcacacagccatctggtcgaccttagacacgggaaggcaagcaccccctggttgaccttagacatggaaagatgaatttacaaccaattttctggattggactgatcagttcagtttgctgtgtgtttgctcaaacagatgaaaatagatgtttaaaagcaaatgccaaatcatgtggagaatgtatacaagcagggccaaattgtgggtggtgcacaaattcaacatttttacaggaaggaatgcctacttctgcacgatgtgatgatttagaagccttaaaaaagaagggttgccctccagatgacatagaaaatcccagaggctccaaagatataaagaaaaataaaaatgtaaccaaccgtagcaaaggaacagcagaga

SEQ ID NO: 143302 - DNA, 2955 bp, Homo sapiens
  Payload ID: 8311
  Gene Symbol: ITGB2
  Gene Name: integrin, beta 2 (complement component 3 receptor 3 and 4 subunit)
  Uniprot ID: P05107
  ENST ID: ENST00000302347
  CDS Start-End: 234-2543
gggccgctctctgacatcagagctgctgtagagcggagaggggcaggggtgaagggccacggtggtgcaacccaccacttcctccaaggaggagctgagaggaacaggaagtgtcaggactttacgacccgcgcctccagctgaggtttctagacgtgacccagggcagactggtagcaaagcccccacgcccagccaggagcaccgccgaggactccagcacaccgagggacatgctgggcctgcgccccccactgctcgccctggtggggctgctctccctcgggtgcgtcctctctcaggagtgcacgaagttcaaggtcagcagctgccgggaatgcatcgagtcggggcccggctgcacctggtgccagaagctgaacttcacagggccgggggatcctgactccattcgctgcgacacccggccacagctgctcatgaggggctgtgcggctgacgacatcatggaccccacaagcctcgctgaaacccaggaagaccacaatgggggccagaagcagctgtccccacaaaaagtgacgctttacctgcgaccaggccaggcagcagcgttcaacgtgaccttccggcgggccaagggctaccccatcgacctgtactatctgatggacctctcctactccatgcttgatgacctcaggaatgtcaagaagctaggtggcgacctgctccgggccctcaacgagatcaccgagtccggccgcattggcttcgggtccttcgtggacaagaccgtgctgccgttcgtgaacacgcaccctgataagctgcgaaacccatgccccaacaaggagaaagagtgccagcccccgtttgccttcaggcacgtgctgaagctgaccaacaactccaaccagtttcagaccgaggtcgggaagcagctgatttccggaaacctggatgcacccgagggtgggctggacgccatgatgcaggtcgccgcctgcccggaggaaatcggctggcgcaacgtcacgcggctgctggtgtttgccactgatgacggcttccatttcgcgggcgacgggaagctgggcgccatcctgacccccaacgacggccgctgtcacctggaggacaacttgtacaagaggagcaacgaattcgactacccatcggtgggccagctggcgcacaagctggctgaaaacaacatccagcccatcttcgcggtgaccagtaggatggtgaagacctacgagaaactcaccgagatcatccccaagtcagccgtgggggagctgtctgaggactccagcaatgtggtccatctcattaagaatgcttacaataaactctcctccagggtcttcctggatcacaacgccctccccgacaccctgaaagtcacctacgactccttctgcagcaatggagtgacgcacaggaaccagcccagaggtgactgtgatggcgtgcagatcaatgtcccgatcaccttccaggtgaaggtcacggccacagagtgcatccaggagcagtcgtttgtcatccgggcgctgggcttcacggacatagtgaccgtgcaggttcttccccagtgtgagtgccggtgccgggaccagagcagagaccgcagcctctgccatggcaagggcttcttggagtgcggcatctgcaggtgtgacactggctacattgggaaaaactgtgagtgccagacacagggccggagcagccaggagctggaaggaagctgccggaaggacaacaactccatcatctgctcagggctgggggactgtgtctgcgggcagtgcctgtgccacaccagcgacgtccccggcaagctgatatacgggcagtactgcgagtgtgacaccatcaactgtgagcgctacaacggccaggtctgcggcggcccggggagggggctctgcttctgcgggaagtgccgctgccacccgggctttgagggctcagcgtgccagtgcgagaggaccactgagggctgcctgaacccgcggcgtgttgagtgtagtggtcgtggccggtgccgctgcaacgtatgcgagtgccattcaggctaccagctgcctctgtgccaggagtgccccggctgcccctcaccctgtggcaagtacatctcctgcgccgagtgcctgaagttcgaaaagggcccctttgggaagaactgcagcgcggcgtgtccgggcctgcagctgtcgaacaaccccgtgaagggcaggacctgcaaggagagggactcagagggctgctgggtggcctacacgctggagcagcaggacgggatggaccgctacctcatctatgtggatgagagccgagagtgtgtggcaggccccaacatcgccgccatcgtcgggggcaccgtggcaggcatcgtgctgatcggcattctcctgctggtcatctggaaggctctgatccacctgagcgacctccgggagtacaggcgctttgagaaggagaagctcaagtcccagtggaacaatgataatccccttttcaagagcgccaccacgacggtcatgaaccccaagtttgctgagagttaggagcacttggtgaagacaaggccgtcaggacccaccatgtctgccccatcacgcggccgagacatggcttgccacagctcttgaggatgtcaccaattaaccagaaatccagttattttccgccctcaaaatgacagccatggccggccgggtgcttctgggggctcgtcggggggacagctccactctgactggcacagtctttgcatggagacttgaggagggagggcttgaggttggtgaggttaggtgcgtgtttcctgtgcaagtcaggacatcagtctgattaaaggtggtgccaatttatttacatttaaacttgtcagggtataaaatgacatcccattaattatattgttaatcaatcacgtgtatagaaaaaaaataaaacttcaatacaggctgtccatgg

SEQ ID NO: 143303 - DNA, 966 bp, Homo sapiens
  Payload ID: 8311
  Gene Symbol: ITGB2
  Gene Name: integrin, beta 2 (complement component 3 receptor 3 and 4 subunit)
  ENST ID: ENST00000320216
  CDS Start-End: 1-966
gggaggctggggaaggaccttgccactggggtcctctctcaggagtgcacgaagttcaaggtcagcagctgccgggaatgcatcgagtcggggcccggctgcacctggtgccagaagctgaacttcacagggccgggggatcctgactccattcgctgcgacacccggccacagctgctcatgaggggctgtgcggctgacgacatcatggaccccacaagcctcgctgaaacccaggaagaccacaatgggggccagaagcagctgtccccacaaaaagtgacgctttacctgcgaccaggccaggcagcagcgttcaacgtgaccttccggcgggccaagggctaccccatcgacctgtactatctgatggacctctcctactccatgcttgatgacctcaggaatgtcaagaagctaggtggcgacctgctccgggccctcaacgagatcaccgagtccggccgcattggcttcgggtccttcgtggacaagaccgtgctgccgttcgtgaacacgcaccctgataagctgcgaaacccatgccccaacaaggagaaagagtgccagcccccgtttgccttcaggcacgtgctgaagctgaccaacaactccaaccagtttcagaccgaggtcgggaagcagctgatttccggaaacctggatgcacccgagggtgggctggacgccatgatgcaggtcgccgcctgcccggaggaaatcggctggcgcaacgtcacgcggctgctggtgtttgccactgatgacggcttccatttcgcgggcgacgggaagctgggcgccatcctgacccccaacgacggccgctgtcacctggaggacaacttgtacaagaggagcaacgaattcgactacccatcggtgggccagctggcgcacaagctggctgaaaacaacatccagcccatcttcgcggtgaccagtaggatggtgaagacctacgag

SEQ ID NO: 143304 - DNA, 2913 bp, Homo sapiens
  Payload ID: 8311
  Gene Symbol: ITGB2
  Gene Name: integrin, beta 2 (complement component 3 receptor 3 and 4 subunit)
  Uniprot ID: P05107
  ENST ID: ENST00000355153
  CDS Start-End: 189-2498
atccagggtgaggaaggcagcccacacttttcttggagacacatccccaaagaagtcctcacgtggctccgtttgggcagaaaccatgaattgaacgggaaaagaaatatgtcaagtatcagaaagaagagtggcatgctttgacagcaagtggactccgagtccagggcagagcctcagttagggacatgctgggcctgcgccccccactgctcgccctggtggggctgctctccctcgggtgcgtcctctctcaggagtgcacgaagttcaaggtcagcagctgccgggaatgcatcgagtcggggcccggctgcacctggtgccagaagctgaacttcacagggccgggggatcctgactccattcgctgcgacacccggccacagctgctcatgaggggctgtgcggctgacgacatcatggaccccacaagcctcgctgaaacccaggaagaccacaatgggggccagaagcagctgtccccacaaaaagtgacgctttacctgcgaccaggccaggcagcagcgttcaacgtgaccttccggcgggccaagggctaccccatcgacctgtactatctgatggacctctcctactccatgcttgatgacctcaggaatgtcaagaagctaggtggcgacctgctccgggccctcaacgagatcaccgagtccggccgcattggcttcgggtccttcgtggacaagaccgtgctgccgttcgtgaacacgcaccctgataagctgcgaaacccatgccccaacaaggagaaagagtgccagcccccgtttgccttcaggcacgtgctgaagctgaccaacaactccaaccagtttcagaccgaggtcgggaagcagctgatttccggaaacctggatgcacccgagggtgggctggacgccatgatgcaggtcgccgcctgcccggaggaaatcggctggcgcaacgtcacgcggctgctggtgtttgccactgatgacggcttccatttcgcgggcgacgggaagctgggcgccatcctgacccccaacgacggccgctgtcacctggaggacaacttgtacaagaggagcaacgaattcgactacccatcggtgggccagctggcgcacaagctggctgaaaacaacatccagcccatcttcgcggtgaccagtaggatggtgaagacctacgagaaactcaccgagatcatccccaagtcagccgtgggggagctgtctgaggactccagcaatgtggtccatctcattaagaatgcttacaataaactctcctccagggtcttcctggatcacaacgccctccccgacaccctgaaagtcacctacgactccttctgcagcaatggagtgacgcacaggaaccagcccagaggtgactgtgatggcgtgcagatcaatgtcccgatcaccttccaggtgaaggtcacggccacagagtgcatccaggagcagtcgtttgtcatccgggcgctgggcttcacggacatagtgaccgtgcaggttcttccccagtgtgagtgccggtgccgggaccagagcagagaccgcagcctctgccatggcaagggcttcttggagtgcggcatctgcaggtgtgacactggctacattgggaaaaactgtgagtgccagacacagggccggagcagccaggagctggaaggaagctgccggaaggacaacaactccatcatctgctcagggctgggggactgtgtctgcgggcagtgcctgtgccacaccagcgacgtccccggcaagctgatatacgggcagtactgcgagtgtgacaccatcaactgtgagcgctacaacggccaggtctgcggcggcccggggagggggctctgcttctgcgggaagtgccgctgccacccgggctttgagggctcagcgtgccagtgcgagaggaccactgagggctgcctgaacccgcggcgtgttgagtgtagtggtcgtggccggtgccgctgcaacgtatgcgagtgccattcaggctaccagctgcctctgtgccaggagtgccccggctgcccctcaccctgtggcaagtacatctcctgcgccgagtgcctgaagttcgaaaagggcccctttgggaagaactgcagcgcggcgtgtccgggcctgcagctgtcgaacaaccccgtgaagggcaggacctgcaaggagagggactcagagggctgctgggtggcctacacgctggagcagcaggacgggatggaccgctacctcatctatgtggatgagagccgagagtgtgtggcaggccccaacatcgccgccatcgtcgggggcaccgtggcaggcatcgtgctgatcggcattctcctgctggtcatctggaaggctctgatccacctgagcgacctccgggagtacaggcgctttgagaaggagaagctcaagtcccagtggaacaatgataatccccttttcaagagcgccaccacgacggtcatgaaccccaagtttgctgagagttaggagcacttggtgaagacaaggccgtcaggacccaccatgtctgccccatcacgcggccgagacatggcttgccacagctcttgaggatgtcaccaattaaccagaaatccagttattttccgccctcaaaatgacagccatggccggccgggtgcttctgggggctcgtcggggggacagctccactctgactggcacagtctttgcatggagacttgaggagggagggcttgaggttggtgaggttaggtgcgtgtttcctgtgcaagtcaggacatcagtctgattaaaggtggtgccaatttatttacatttaaacttgtcagggtataaaatgacatcccattaattatattgttaatcaatcacgtgtatagaaaaaaaataaaacttcaatacaggctgtccatggaaa

SEQ ID NO: 143305 - DNA, 422 bp, Homo sapiens
  Payload ID: 8311
  Gene Symbol: ITGB2
  Gene Name: integrin, beta 2 (complement component 3 receptor 3 and 4 subunit)
  ENST ID: ENST00000397846
  CDS Start-End: 80-406
cgtgacccagggcagactggtagcaaagcccccacgcccagccaggagcaccgccgaggactccagcacaccgagggacatgctgggcctgcgccccccactgctcgccctggtggggctgctctccctcgggtgcgtcctctctcaggagtgcacgaagttcaaggtcagcagctgccgggaatgcatcgagtcggggcccggctgcacctggtgccagaagctgggagcggctttgggtcctccagcccacgccaccgcggcgagcagtccccggaggagaagccgggtggctcccgtctgtcctcggactgagcagggtggccaggccccaggtggaaactaccttggtcaggctgggttttttccctcccctttctggaggttttcagctcctctgaaataaacacctttcagtgaga

SEQ ID NO: 143306 - DNA, 3178 bp, Homo sapiens
  Payload ID: 8311
  Gene Symbol: ITGB2
  Gene Name: integrin, beta 2 (complement component 3 receptor 3 and 4 subunit)
  Uniprot ID: P05107
  ENST ID: ENST00000397850
  CDS Start-End: 454-2763
acaggcatccagggtgaggaaggctgcccacaggcatccagggtgaggaaggcagcccacacttttcttggagacacatccccaaagaagtcctcacgtggctccgtttgggcagaaaccatgaattgaacgggaaaagaaatatgtcaagtatcagaaagaagagtggcatgctttgacagcaagtggactccgagtccagggcagagcctcagttagggggccgctctctgacatcagagctgctgtagagcggagaggggcaggggtgaagggccacggtggtgcaacccaccacttcctccaaggaggagctgagaggaacaggaagtgtcaggactttacgacccgcgcctccagctgaggtttctagacgtgacccagggcagactggtagcaaagcccccacgcccagccaggagcaccgccgaggactccagcacaccgagggacatgctgggcctgcgccccccactgctcgccctggtggggctgctctccctcgggtgcgtcctctctcaggagtgcacgaagttcaaggtcagcagctgccgggaatgcatcgagtcggggcccggctgcacctggtgccagaagctgaacttcacagggccgggggatcctgactccattcgctgcgacacccggccacagctgctcatgaggggctgtgcggctgacgacatcatggaccccacaagcctcgctgaaacccaggaagaccacaatgggggccagaagcagctgtccccacaaaaagtgacgctttacctgcgaccaggccaggcagcagcgttcaacgtgaccttccggcgggccaagggctaccccatcgacctgtactatctgatggacctctcctactccatgcttgatgacctcaggaatgtcaagaagctaggtggcgacctgctccgggccctcaacgagatcaccgagtccggccgcattggcttcgggtccttcgtggacaagaccgtgctgccgttcgtgaacacgcaccctgataagctgcgaaacccatgccccaacaaggagaaagagtgccagcccccgtttgccttcaggcacgtgctgaagctgaccaacaactccaaccagtttcagaccgaggtcgggaagcagctgatttccggaaacctggatgcacccgagggtgggctggacgccatgatgcaggtcgccgcctgcccggaggaaatcggctggcgcaacgtcacgcggctgctggtgtttgccactgatgacggcttccatttcgcgggcgacgggaagctgggcgccatcctgacccccaacgacggccgctgtcacctggaggacaacttgtacaagaggagcaacgaattcgactacccatcggtgggccagctggcgcacaagctggctgaaaacaacatccagcccatcttcgcggtgaccagtaggatggtgaagacctacgagaaactcaccgagatcatccccaagtcagccgtgggggagctgtctgaggactccagcaatgtggtccatctcattaagaatgcttacaataaactctcctccagggtcttcctggatcacaacgccctccccgacaccctgaaagtcacctacgactccttctgcagcaatggagtgacgcacaggaaccagcccagaggtgactgtgatggcgtgcagatcaatgtcccgatcaccttccaggtgaaggtcacggccacagagtgcatccaggagcagtcgtttgtcatccgggcgctgggcttcacggacatagtgaccgtgcaggttcttccccagtgtgagtgccggtgccgggaccagagcagagaccgcagcctctgccatggcaagggcttcttggagtgcggcatctgcaggtgtgacactggctacattgggaaaaactgtgagtgccagacacagggccggagcagccaggagctggaaggaagctgccggaaggacaacaactccatcatctgctcagggctgggggactgtgtctgcgggcagtgcctgtgccacaccagcgacgtccccggcaagctgatatacgggcagtactgcgagtgtgacaccatcaactgtgagcgctacaacggccaggtctgcggcggcccggggagggggctctgcttctgcgggaagtgccgctgccacccgggctttgagggctcagcgtgccagtgcgagaggaccactgagggctgcctgaacccgcggcgtgttgagtgtagtggtcgtggccggtgccgctgcaacgtatgcgagtgccattcaggctaccagctgcctctgtgccaggagtgccccggctgcccctcaccctgtggcaagtacatctcctgcgccgagtgcctgaagttcgaaaagggcccctttgggaagaactgcagcgcggcgtgtccgggcctgcagctgtcgaacaaccccgtgaagggcaggacctgcaaggagagggactcagagggctgctgggtggcctacacgctggagcagcaggacgggatggaccgctacctcatctatgtggatgagagccgagagtgtgtggcaggccccaacatcgccgccatcgtcgggggcaccgtggcaggcatcgtgctgatcggcattctcctgctggtcatctggaaggctctgatccacctgagcgacctccgggagtacaggcgctttgagaaggagaagctcaagtcccagtggaacaatgataatccccttttcaagagcgccaccacgacggtcatgaaccccaagtttgctgagagttaggagcacttggtgaagacaaggccgtcaggacccaccatgtctgccccatcacgcggccgagacatggcttgccacagctcttgaggatgtcaccaattaaccagaaatccagttattttccgccctcaaaatgacagccatggccggccgggtgcttctgggggctcgtcggggggacagctccactctgactggcacagtctttgcatggagacttgaggagggagggcttgaggttggtgaggttaggtgcgtgtttcctgtgcaagtcaggacatcagtctgattaaaggtggtgccaatttatttacatttaaacttgtcagggtataaaatgacatcccattaattatattgttaatcaatcacgtgtatagaaaaaaaataaaacttcaatacaggctgtccatggaaa

SEQ ID NO: 143307 - DNA, 2769 bp, Homo sapiens
  Payload ID: 8311
  Gene Symbol: ITGB2
  Gene Name: integrin, beta 2 (complement component 3 receptor 3 and 4 subunit)
  Uniprot ID: P05107
  ENST ID: ENST00000397852
  CDS Start-End: 45-2354
gttgggcctgagaccgtcaccaagaccccttccctccacaggacatgctgggcctgcgccccccactgctcgccctggtggggctgctctccctcgggtgcgtcctctctcaggagtgcacgaagttcaaggtcagcagctgccgggaatgcatcgagtcggggcccggctgcacctggtgccagaagctgaacttcacagggccgggggatcctgactccattcgctgcgacacccggccacagctgctcatgaggggctgtgcggctgacgacatcatggaccccacaagcctcgctgaaacccaggaagaccacaatgggggccagaagcagctgtccccacaaaaagtgacgctttacctgcgaccaggccaggcagcagcgttcaacgtgaccttccggcgggccaagggctaccccatcgacctgtactatctgatggacctctcctactccatgcttgatgacctcaggaatgtcaagaagctaggtggcgacctgctccgggccctcaacgagatcaccgagtccggccgcattggcttcgggtccttcgtggacaagaccgtgctgccgttcgtgaacacgcaccctgataagctgcgaaacccatgccccaacaaggagaaagagtgccagcccccgtttgccttcaggcacgtgctgaagctgaccaacaactccaaccagtttcagaccgaggtcgggaagcagctgatttccggaaacctggatgcacccgagggtgggctggacgccatgatgcaggtcgccgcctgcccggaggaaatcggctggcgcaacgtcacgcggctgctggtgtttgccactgatgacggcttccatttcgcgggcgacgggaagctgggcgccatcctgacccccaacgacggccgctgtcacctggaggacaacttgtacaagaggagcaacgaattcgactacccatcggtgggccagctggcgcacaagctggctgaaaacaacatccagcccatcttcgcggtgaccagtaggatggtgaagacctacgagaaactcaccgagatcatccccaagtcagccgtgggggagctgtctgaggactccagcaatgtggtccatctcattaagaatgcttacaataaactctcctccagggtcttcctggatcacaacgccctccccgacaccctgaaagtcacctacgactccttctgcagcaatggagtgacgcacaggaaccagcccagaggtgactgtgatggcgtgcagatcaatgtcccgatcaccttccaggtgaaggtcacggccacagagtgcatccaggagcagtcgtttgtcatccgggcgctgggcttcacggacatagtgaccgtgcaggttcttccccagtgtgagtgccggtgccgggaccagagcagagaccgcagcctctgccatggcaagggcttcttggagtgcggcatctgcaggtgtgacactggctacattgggaaaaactgtgagtgccagacacagggccggagcagccaggagctggaaggaagctgccggaaggacaacaactccatcatctgctcagggctgggggactgtgtctgcgggcagtgcctgtgccacaccagcgacgtccccggcaagctgatatacgggcagtactgcgagtgtgacaccatcaactgtgagcgctacaacggccaggtctgcggcggcccggggagggggctctgcttctgcgggaagtgccgctgccacccgggctttgagggctcagcgtgccagtgcgagaggaccactgagggctgcctgaacccgcggcgtgttgagtgtagtggtcgtggccggtgccgctgcaacgtatgcgagtgccattcaggctaccagctgcctctgtgccaggagtgccccggctgcccctcaccctgtggcaagtacatctcctgcgccgagtgcctgaagttcgaaaagggcccctttgggaagaactgcagcgcggcgtgtccgggcctgcagctgtcgaacaaccccgtgaagggcaggacctgcaaggagagggactcagagggctgctgggtggcctacacgctggagcagcaggacgggatggaccgctacctcatctatgtggatgagagccgagagtgtgtggcaggccccaacatcgccgccatcgtcgggggcaccgtggcaggcatcgtgctgatcggcattctcctgctggtcatctggaaggctctgatccacctgagcgacctccgggagtacaggcgctttgagaaggagaagctcaagtcccagtggaacaatgataatccccttttcaagagcgccaccacgacggtcatgaaccccaagtttgctgagagttaggagcacttggtgaagacaaggccgtcaggacccaccatgtctgccccatcacgcggccgagacatggcttgccacagctcttgaggatgtcaccaattaaccagaaatccagttattttccgccctcaaaatgacagccatggccggccgggtgcttctgggggctcgtcggggggacagctccactctgactggcacagtctttgcatggagacttgaggagggagggcttgaggttggtgaggttaggtgcgtgtttcctgtgcaagtcaggacatcagtctgattaaaggtggtgccaatttatttacatttaaacttgtcagggtataaaatgacatcccattaattatattgttaatcaatcacgtgtatagaaaaaaaataaaacttcaatacaggctgtccatggaaa

SEQ ID NO: 143308 - DNA, 2592 bp, Homo sapiens
  Payload ID: 8311
  Gene Symbol: ITGB2
  Gene Name: integrin, beta 2 (complement component 3 receptor 3 and 4 subunit)
  ENST ID: ENST00000397854
  CDS Start-End: 39-2177
ccaggagcaccgccgaggactccagcacaccgagggacatgctgggcctgcgccccccactgctcgccctggtggggctgctctccctcgggtgcgtcctctctcaggagtgcacgaagttcaaggtcagcagctgccgggaatgcatcgagtcggggcccggctgcacctggtgccagaagctgaacttcacagggccgggggatcctgactccattcgctgcgacacccggccacagctgctcatgaggggctgtgcggctgacgacatcatggaccccacaagcctcgctgaaacccaggaagaccacaatgggggccagaagcagctgtccccacaaaaagtgacgctttacctgcgaccaggcttcgggtccttcgtggacaagaccgtgctgccgttcgtgaacacgcaccctgataagctgcgaaacccatgccccaacaaggagaaagagtgccagcccccgtttgccttcaggcacgtgctgaagctgaccaacaactccaaccagtttcagaccgaggtcgggaagcagctgatttccggaaacctggatgcacccgagggtgggctggacgccatgatgcaggtcgccgcctgcccggaggaaatcggctggcgcaacgtcacgcggctgctggtgtttgccactgatgacggcttccatttcgcgggcgacgggaagctgggcgccatcctgacccccaacgacggccgctgtcacctggaggacaacttgtacaagaggagcaacgaattcgactacccatcggtgggccagctggcgcacaagctggctgaaaacaacatccagcccatcttcgcggtgaccagtaggatggtgaagacctacgagaaactcaccgagatcatccccaagtcagccgtgggggagctgtctgaggactccagcaatgtggtccatctcattaagaatgcttacaataaactctcctccagggtcttcctggatcacaacgccctccccgacaccctgaaagtcacctacgactccttctgcagcaatggagtgacgcacaggaaccagcccagaggtgactgtgatggcgtgcagatcaatgtcccgatcaccttccaggtgaaggtcacggccacagagtgcatccaggagcagtcgtttgtcatccgggcgctgggcttcacggacatagtgaccgtgcaggttcttccccagtgtgagtgccggtgccgggaccagagcagagaccgcagcctctgccatggcaagggcttcttggagtgcggcatctgcaggtgtgacactggctacattgggaaaaactgtgagtgccagacacagggccggagcagccaggagctggaaggaagctgccggaaggacaacaactccatcatctgctcagggctgggggactgtgtctgcgggcagtgcctgtgccacaccagcgacgtccccggcaagctgatatacgggcagtactgcgagtgtgacaccatcaactgtgagcgctacaacggccaggtctgcggcggcccggggagggggctctgcttctgcgggaagtgccgctgccacccgggctttgagggctcagcgtgccagtgcgagaggaccactgagggctgcctgaacccgcggcgtgttgagtgtagtggtcgtggccggtgccgctgcaacgtatgcgagtgccattcaggctaccagctgcctctgtgccaggagtgccccggctgcccctcaccctgtggcaagtacatctcctgcgccgagtgcctgaagttcgaaaagggcccctttgggaagaactgcagcgcggcgtgtccgggcctgcagctgtcgaacaaccccgtgaagggcaggacctgcaaggagagggactcagagggctgctgggtggcctacacgctggagcagcaggacgggatggaccgctacctcatctatgtggatgagagccgagagtgtgtggcaggccccaacatcgccgccatcgtcgggggcaccgtggcaggcatcgtgctgatcggcattctcctgctggtcatctggaaggctctgatccacctgagcgacctccgggagtacaggcgctttgagaaggagaagctcaagtcccagtggaacaatgataatccccttttcaagagcgccaccacgacggtcatgaaccccaagtttgctgagagttaggagcacttggtgaagacaaggccgtcaggacccaccatgtctgccccatcacgcggccgagacatggcttgccacagctcttgaggatgtcaccaattaaccagaaatccagttattttccgccctcaaaatgacagccatggccggccgggtgcttctgggggctcgtcggggggacagctccactctgactggcacagtctttgcatggagacttgaggagggagggcttgaggttggtgaggttaggtgcgtgtttcctgtgcaagtcaggacatcagtctgattaaaggtggtgccaatttatttacatttaaacttgtcagggtataaaatgacatcccattaattatattgttaatcaatcacgtgtatagaaaaaaaataaaacttcaatacaggctgtccatggaaa

SEQ ID NO: 143309 - DNA, 2813 bp, Homo sapiens
  Payload ID: 8311
  Gene Symbol: ITGB2
  Gene Name: integrin, beta 2 (complement component 3 receptor 3 and 4 subunit)
  Uniprot ID: P05107
  ENST ID: ENST00000397857
  CDS Start-End: 89-2398
gacagggccaagcccagctctcctccaagcacaggctctgctcacggaggacctggggcacactggggcagagtgcacacaccgggacatgctgggcctgcgccccccactgctcgccctggtggggctgctctccctcgggtgcgtcctctctcaggagtgcacgaagttcaaggtcagcagctgccgggaatgcatcgagtcggggcccggctgcacctggtgccagaagctgaacttcacagggccgggggatcctgactccattcgctgcgacacccggccacagctgctcatgaggggctgtgcggctgacgacatcatggaccccacaagcctcgctgaaacccaggaagaccacaatgggggccagaagcagctgtccccacaaaaagtgacgctttacctgcgaccaggccaggcagcagcgttcaacgtgaccttccggcgggccaagggctaccccatcgacctgtactatctgatggacctctcctactccatgcttgatgacctcaggaatgtcaagaagctaggtggcgacctgctccgggccctcaacgagatcaccgagtccggccgcattggcttcgggtccttcgtggacaagaccgtgctgccgttcgtgaacacgcaccctgataagctgcgaaacccatgccccaacaaggagaaagagtgccagcccccgtttgccttcaggcacgtgctgaagctgaccaacaactccaaccagtttcagaccgaggtcgggaagcagctgatttccggaaacctggatgcacccgagggtgggctggacgccatgatgcaggtcgccgcctgcccggaggaaatcggctggcgcaacgtcacgcggctgctggtgtttgccactgatgacggcttccatttcgcgggcgacgggaagctgggcgccatcctgacccccaacgacggccgctgtcacctggaggacaacttgtacaagaggagcaacgaattcgactacccatcggtgggccagctggcgcacaagctggctgaaaacaacatccagcccatcttcgcggtgaccagtaggatggtgaagacctacgagaaactcaccgagatcatccccaagtcagccgtgggggagctgtctgaggactccagcaatgtggtccatctcattaagaatgcttacaataaactctcctccagggtcttcctggatcacaacgccctccccgacaccctgaaagtcacctacgactccttctgcagcaatggagtgacgcacaggaaccagcccagaggtgactgtgatggcgtgcagatcaatgtcccgatcaccttccaggtgaaggtcacggccacagagtgcatccaggagcagtcgtttgtcatccgggcgctgggcttcacggacatagtgaccgtgcaggttcttccccagtgtgagtgccggtgccgggaccagagcagagaccgcagcctctgccatggcaagggcttcttggagtgcggcatctgcaggtgtgacactggctacattgggaaaaactgtgagtgccagacacagggccggagcagccaggagctggaaggaagctgccggaaggacaacaactccatcatctgctcagggctgggggactgtgtctgcgggcagtgcctgtgccacaccagcgacgtccccggcaagctgatatacgggcagtactgcgagtgtgacaccatcaactgtgagcgctacaacggccaggtctgcggcggcccggggagggggctctgcttctgcgggaagtgccgctgccacccgggctttgagggctcagcgtgccagtgcgagaggaccactgagggctgcctgaacccgcggcgtgttgagtgtagtggtcgtggccggtgccgctgcaacgtatgcgagtgccattcaggctaccagctgcctctgtgccaggagtgccccggctgcccctcaccctgtggcaagtacatctcctgcgccgagtgcctgaagttcgaaaagggcccctttgggaagaactgcagcgcggcgtgtccgggcctgcagctgtcgaacaaccccgtgaagggcaggacctgcaaggagagggactcagagggctgctgggtggcctacacgctggagcagcaggacgggatggaccgctacctcatctatgtggatgagagccgagagtgtgtggcaggccccaacatcgccgccatcgtcgggggcaccgtggcaggcatcgtgctgatcggcattctcctgctggtcatctggaaggctctgatccacctgagcgacctccgggagtacaggcgctttgagaaggagaagctcaagtcccagtggaacaatgataatccccttttcaagagcgccaccacgacggtcatgaaccccaagtttgctgagagttaggagcacttggtgaagacaaggccgtcaggacccaccatgtctgccccatcacgcggccgagacatggcttgccacagctcttgaggatgtcaccaattaaccagaaatccagttattttccgccctcaaaatgacagccatggccggccgggtgcttctgggggctcgtcggggggacagctccactctgactggcacagtctttgcatggagacttgaggagggagggcttgaggttggtgaggttaggtgcgtgtttcctgtgcaagtcaggacatcagtctgattaaaggtggtgccaatttatttacatttaaacttgtcagggtataaaatgacatcccattaattatattgttaatcaatcacgtgtatagaaaaaaaataaaacttcaatacaggctgtccatggaaa

SEQ ID NO: 143310 - DNA, 2823 bp, Homo sapiens
  Payload ID: 8311
  Gene Symbol: ITGB2
  Gene Name: integrin, beta 2 (complement component 3 receptor 3 and 4 subunit)
  ENST ID: ENST00000523323
  CDS Start-End: 59-274
agcaaagcccccacgcccagccaggagcaccgccgaggactccagcacaccgagggacatgctgggcctgcgccccccactgctcgccctggtggggctgctctccctcgggtgcgggcggcccagagcacccactcaccagccggcctcgtccctcagtcctctctcaggagtgcacgaagttcaaggtcagcagctgccgggaatgcatcgagtcggggcccggctgcacctggtgccagaagctgaacttcacagggccgggggatcctgactccattcgctgcgacacccggccacagctgctcatgaggggctgtgcggctgacgacatcatggaccccacaagcctcgctgaaacccaggaagaccacaatgggggccagaagcagctgtccccacaaaaagtgacgctttacctgcgaccaggccaggcagcagcgttcaacgtgaccttccggcgggccaagggctaccccatcgacctgtactatctgatggacctctcctactccatgcttgatgacctcaggaatgtcaagaagctaggtggcgacctgctccgggccctcaacgagatcaccgagtccggccgcattggcttcgggtccttcgtggacaagaccgtgctgccgttcgtgaacacgcaccctgataagctgcgaaacccatgccccaacaaggagaaagagtgccagcccccgtttgccttcaggcacgtgctgaagctgaccaacaactccaaccagtttcagaccgaggtcgggaagcagctgatttccggaaacctggatgcacccgagggtgggctggacgccatgatgcaggtcgccgcctgcccggaggaaatcggctggcgcaacgtcacgcggctgctggtgtttgccactgatgacggcttccatttcgcgggcgacgggaagctgggcgccatcctgacccccaacgacggccgctgtcacctggaggacaacttgtacaagaggagcaacgaattcgactacccatcggtgggccagctggcgcacaagctggctgaaaacaacatccagcccatcttcgcggtgaccagtaggatggtgaagacctacgagaaactcaccgagatcatccccaagtcagccgtgggggagctgtctgaggactccagcaatgtggtccatctcattaagaatgcttacaataaactctcctccagggtcttcctggatcacaacgccctccccgacaccctgaaagtcacctacgactccttctgcagcaatggagtgacgcacaggaaccagcccagaggtgactgtgatggcgtgcagatcaatgtcccgatcaccttccaggtgaaggtcacggccacagagtgcatccaggagcagtcgtttgtcatccgggcgctgggcttcacggacatagtgaccgtgcaggttcttccccagtgtgagtgccggtgccgggaccagagcagagaccgcagcctctgccatggcaagggcttcttggagtgcggcatctgcaggtgtgacactggctacattgggaaaaactgtgagtgccagacacagggccggagcagccaggagctggaaggaagctgccggaaggacaacaactccatcatctgctcagggctgggggactgtgtctgcgggcagtgcctgtgccacaccagcgacgtccccggcaagctgatatacgggcagtactgcgagtgtgacaccatcaactgtgagcgctacaacggccaggtctgcggcggcccggggagggggctctgcttctgcgggaagtgccgctgccacccgggctttgagggctcagcgtgccagtgcgagaggaccactgagggctgcctgaacccgcggcgtgttgagtgtagtggtcgtggccggtgccgctgcaacgtatgcgagtgccattcaggctaccagctgcctctgtgccaggagtgccccggctgcccctcaccctgtggcaagtacatctcctgcgccgagtgcctgaagttcgaaaagggcccctttgggaagaactgcagcgcggcgtgtccgggcctgcagctgtcgaacaaccccgtgaagggcaggacctgcaaggagagggactcagagggctgctgggtggcctacacgctggagcagcaggacgggatggaccgctacctcatctatgtggatgagagccgagagtgtgtggcaggccccaacatcgccgccatcgtcgggggcaccgtggcaggcatcgtgctgatcggcattctcctgctggtcatctggaaggctctgatccacctgagcgacctccgggagtacaggcgctttgagaaggagaagctcaagtcccagtggaacaatgataatccccttttcaagagcgccaccacgacggtcatgaaccccaagtttgctgagagttaggagcacttggtgaagacaaggccgtcaggacccaccatgtctgccccatcacgcggccgagacatggcttgccacagctcttgaggatgtcaccaattaaccagaaatccagttattttccgccctcaaaatgacagccatggccggccgggtgcttctgggggctcgtcggggggacagctccactctgactggcacagtctttgcatggagacttgaggagggagggcttgaggttggtgaggttaggtgcgtgtttcctgtgcaagtcaggacatcagtctgattaaaggtggtgccaatttatttacatttaaacttgtcagggtataaaatgacatcccattaattatattgttaatcaatcacgtgtatagaaaaaaaataaaacttcaatacaggctgtccatgg

SEQ ID NO: 143311 - DNA, 606 bp, Homo sapiens
  Payload ID: 8311
  Gene Symbol: ITGB2
  Gene Name: integrin, beta 2 (complement component 3 receptor 3 and 4 subunit)
  ENST ID: ENST00000522688
  CDS Start-End: 458-606
aagtgtcaggactttacgacccgcgcctccagctgaggtttctagacgtgacccagggcagactggtagcaaagcccccacgcccagccaggagcaccgccgaggactccagcacaccgagggacatgctgggcctgcgccccccactgctcgccctggtggggctgctctccctcgggtgcggtgagttctgtgttccacggaggggactccacgcgtgacattccaatcagggagaacagggcctgccctcactttcccatagacagaagttcccgggaggctggggaaggaccttgccactggggtcctctctcaggagtgcacgaagttcaaggtcagcagctgccgggaatgcatcgagtcggggcccggctgcacctggtgccagaagctgaacttcacagggccgggggatcctgactccattcgctgcgacacccggccacagctgctcatgaggggctgtgcggctgacgacatcatggaccccacaagcctcgctgaaacccaggaagaccacaatgggggccagaagcagctgtccccacaaaaagtgacgctttacctgcgaccaggccaggcagcagcgttcaacgtgacctt

SEQ ID NO: 143312 - DNA, 571 bp, Homo sapiens
  Payload ID: 8311
  Gene Symbol: ITGB2
  Gene Name: integrin, beta 2 (complement component 3 receptor 3 and 4 subunit)
  ENST ID: ENST00000517563
  CDS Start-End: 211-571
agaaagaagagtggcatgctttgacagcaagtggactccgagtccagggcagagcctcagttagggaggagctgagaggaacaggaagtgtcaggactttacgacccgcgcctccagctgaggtttctagacgtgacccagggcagactggtagcaaagcccccacgcccagccaggagcaccgccgaggactccagcacaccgagggacatgctgggcctgcgccccccactgctcgccctggtggggctgctctccctcgggtgcgtcctctctcaggagtgcacgaagttcaaggtcagcagctgccgggaatgcatcgagtcggggcccggctgcacctggtgccagaagctgaacttcacagggccgggggatcctgactccattcgctgcgacacccggccacagctgctcatgaggggctgtgcggctgacgacatcatggaccccacaagcctcgctgaaacccaggaagaccacaatgggggccagaagcagctgtccccacaaaaagtgacgctttacctgcgaccaggccaggcagcagcgttcaacgtgaccttccggc

SEQ ID NO: 143313 - DNA, 568 bp, Homo sapiens
  Payload ID: 8311
  Gene Symbol: ITGB2
  Gene Name: integrin, beta 2 (complement component 3 receptor 3 and 4 subunit)
  ENST ID: ENST00000520389
  CDS Start-End: 111-392
acgacccgcgcctccagctgaggtttctagacgtgacccagggcagactggtagcaaagcccccacgcccagccaggagcaccgccgaggactccagcacaccgagggacatgctgggcctgcgccccccactgctcgccctggtggggctgctctccctcgggtgcgtcctctctcaggagtgcacgaagttcaaggtcagcagctgccgggaatgcatcgagtcggggcccggctgcacctggtgccagaagctgggagcggctttgggtcctccagcccacgccaccgcggcgagcagtccccggaggagaagccgggtggctcccgtctgtcctcggactgagcagggtggccaggccccagaacttcacagggccgggggatcctgactccattcgctgcgacacccggccacagctgctcatgaggggctgtgcggctgacgacatcatggaccccacaagcctcgctgaaacccaggaagaccacaatgggggccagaagcagctgtccccacaaaaagtgacgctttacctgcgaccaggccaggcagcagcgttcaacg

SEQ ID NO: 143314 - DNA, 680 bp, Homo sapiens
  Payload ID: 8311
  Gene Symbol: ITGB2
  Gene Name: integrin, beta 2 (complement component 3 receptor 3 and 4 subunit)
  ENST ID: ENST00000523663
  CDS Start-End: 182-680
atgcatgtatatgtgtggtgtgtgcatgcacgtggtgtgtacatgcagtcaggcacacatctgtatgcacgtacacgtgcatgtgtggtgtgtgtacacgtctgcatgtgtgtgtgtgcctgtgttgtgtgcctctgcaggggcccgctgcagctgtcctgggtgcctggctgagcaggacatgctgggcctgcgccccccactgctcgccctggtggggctgctctccctcgggtgcgtcctctctcaggagtgcacgaagttcaaggtcagcagctgccgggaatgcatcgagtcggggcccggctgcacctggtgccagaagctgaacttcacagggccgggggatcctgactccattcgctgcgacacccggccacagctgctcatgaggggctgtgcggctgacgacatcatggaccccacaagcctcgctgaaacccaggaagaccacaatgggggccagaagcagctgtccccacaaaaagtgacgctttacctgcgaccaggccaggcagcagcgttcaacgtgaccttccggcgggccaagggctaccccatcgacctgtactatctgatggacctctcctactccatgcttgatgacctcaggaatgtcaagaagctaggtggcgacctgctccgggccctcaacgagatcaccgagtccggccgcattg

SEQ ID NO: 143315 - DNA, 527 bp, Homo sapiens
  Payload ID: 8311
  Gene Symbol: ITGB2
  Gene Name: integrin, beta 2 (complement component 3 receptor 3 and 4 subunit)
  ENST ID: ENST00000517819
  CDS Start-End: 317-527
ctctcccaagtgtgaatctgatggaagcaggtccttctcgccgggacctcatgtgagaaatgacatgtcccacctgtctcaaggggccgctctctgacatcagagctgctgtagagcggagaggggcaggggtgaagggccacggtggtgcaacccaccacttcctccaaggaggagctgagaggaacaggaagtgtcaggactttacgacccgcgcctccagctgaggtttctagacgtgacccagggcagactggtagcaaagcccccacgcccagccaggagcaccgccgaggactccagcacaccgagggacatgctgggcctgcgccccccactgctcgccctggtggggctgctctccctcgggtgcgtcctctctcaggagtgcacgaagttcaaggtcagcagctgccgggaatgcatcgagtcggggcccggctgcacctggtgccagaagctgaacttcacagggccgggggatcctgactccattcgctgcgacacccggccacagctgctcatga

SEQ ID NO: 143316 - DNA, 573 bp, Homo sapiens
  Payload ID: 8311
  Gene Symbol: ITGB2
  Gene Name: integrin, beta 2 (complement component 3 receptor 3 and 4 subunit)
  ENST ID: ENST00000522931
  CDS Start-End: 94-573
aagggcgactctgatgcaaggttctgagaggcctgtggggctgtggattcctaagcagcctcagctttgggttttgcaccttaggtcttggacatgctgggcctgcgccccccactgctcgccctggtggggctgctctccctcgggtgcgtcctctctcaggagtgcacgaagttcaaggtcagcagctgccgggaatgcatcgagtcggggcccggctgcacctggtgccagaagctgaacttcacagggccgggggatcctgactccattcgctgcgacacccggccacagctgctcatgaggggctgtgcggctgacgacatcatggaccccacaagcctcgctgaaacccaggaagaccacaatgggggccagaagcagctgtccccacaaaaagtgacgctttacctgcgaccaggccaggcagcagcgttcaacgtgaccttccggcgggccaagggctaccccatcgacctgtactatctgatggacctctcctactccatgcttgatgacctcaggaatgtcaagaagctaggtggcgacctgctccgggccctcaacgagatc

SEQ ID NO: 143317 - DNA, 556 bp, Homo sapiens
  Payload ID: 8311
  Gene Symbol: ITGB2
  Gene Name: integrin, beta 2 (complement component 3 receptor 3 and 4 subunit)
  ENST ID: ENST00000521995
  CDS Start-End: 410-556
agccacgttccagggcacctggctgggacctgccgcagcctctgcgcgcagcgggctccatcccccgggccacggattgggagactgaggcaggcgcgaagcccgccgcccagcctccgctagggagaccccggccacctccaggcagttttcctgaagcccggggccaggagaaggggccgctctctgacatcagagctgctgtagagcggagaggggcaggggtgaagggccacggtggtgcaacccaccacttcctccaaggaggagctgagaggaacaggaagtgtcaggactttacgacccgcgcctccagctgaggtttctagacgtgacccagggcagactggtagcaaagcccccacgcccagccaggagcaccgccgaggactccagcacaccgagggacatgctgggcctgcgccccccactgctcgccctggtggggctgctctccctcgggtgcgtcctctctcaggagtgcacgaagttcaaggtcagcagctgccgggaatgcatcgagtcggggcccggctgcacctggtgccagaagctg

SEQ ID NO: 143318 - DNA, 568 bp, Homo sapiens
  Payload ID: 8311
  Gene Symbol: ITGB2
  Gene Name: integrin, beta 2 (complement component 3 receptor 3 and 4 subunit)
  ENST ID: ENST00000524251
  CDS Start-End: 458-568
agacgtgacccagggcagactggtagcaaagcccccacgcccagccaggagcaccgccgaggactccagcacaccgagggacatgctgggcctgcgccccccactgctcgccctggtggggctgctctccctcgggtgcggtgagttctgtgttccacggaggggactccacgcgtgacattccaatcagggagaacagggcctgccctcactttcccatagacagaagttcccgggaggctggggaaggaccttgccactggggggcggcccagagcacccactcaccagccggcctcgtccctcagtcctctctcaggagtgcacgaagttcaaggtcagcagctgccgggaatgcatcgagtcggggcccggctgcacctggtgccagaagctgaacttcacagggccgggggatcctgactccattcgctgcgacacccggccacagctgctcatgaggggctgtgcggctgacgacatcatggaccccacaagcctcgctgaaacccaggaagaccacaatgggggccagaagcagctgtccccacaaaaagtgacgctttac

SEQ ID NO: 143319 - DNA, 2200 bp, Homo sapiens
  Payload ID: 8311
  Gene Symbol: ITGB2
  Gene Name: integrin, beta 2 (complement component 3 receptor 3 and 4 subunit)
  ENST ID: ENST00000610622
  CDS Start-End: 53-1189
gcccccacgcccagccaggagcaccgccgaggactccagcacaccgagggacatgctgggcctgcgccccccactgctcgccctggtggggctgctctccctcgggtgcgtcctctctcaggagtgcacgaagttcaaggtcagcagctgccgggaatgcatcgagtcggggcccggctgcacctggtgccagaagctgaacttcacagggccgggggatcctgactccattcgctgcgacacccggccacagctgctcatgaggggctgtgcggctgacgacatcatggaccccacaagcctcgctgaaacccaggaagaccacaatgggggccagaagcagctgtccccacaaaaagtgacgctttacctgcgaccaggcttcgggtccttcgtggacaagaccgtgctgccgttcgtgaacacgcaccctgataagctgcgaaacccatgccccaacaaggagaaagagtgccagcccccgtttgccttcaggcacgtgctgaagctgaccaacaactccaaccagtttcagaccgaggtcgggaagcagctgatttccggaaacctggatgcacccgagggtgggctggacgccatgatgcaggtcgccgcctgcccggaggaaatcggctggcgcaacgtcacgcggctgctggtgtttgccactgatgacggcttccatttcgcgggcgacgggaagctgggcgccatcctgacccccaacgacggccgctgtcacctggaggacaacttgtacaagaggagcaacgaattcgactacccatcggtgggccagctggcgcacaagctggctgaaaacaacatccagcccatcttcgcggtgaccagtaggatggtgaagacctacgagaaactcaccgagatcatccccaagtcagccgtgggggagctgtctgaggactccagcaatgtggtccatctcattaagaatgcttacaataaactctcctccagggtcttcctggatcacaacgccctccccgacaccctgaaagtcacctacgactccttctgcagcaatggagtgacgcacaggaaccagcccagaggtgactgtgatggcgtgcagatcaatgtcccgatcaccttccaggtgaaggtcacggccacagagtgcatccaggagcagtcgtttgtcatcgggcgctgggcttcacggacatagtgaccgtgcaggttcttccccagtgtgagtgccggtgccgggaccagagcagagaccgcagcctctgccatggcaagggcttcttggagtgcggcatctgcaggtgtgacactggctacattgggaaaaactgtgagtgccagacacagggccggagcagccaggagctggaaggaagctgccggaaggacaacaactccatcatctgctcagggctgggggactgtgtctgcgggcagtgcctgtgccacaccagcgacgtccccggcaagctgatatacgggcagtactgcgagtgtgacaccatcaactgtgagcgctacaacggccaggtctgcggcggcccggggagggggctctgcttctgcgggaagtgccgctgccacccgggctttgagggctcagcgtgccagtgcgagaggaccactgagggctgcctgaacccgcggcgtgttgagtgtagtggtcgtggccggtgccgctgcaacgtatgcgagtgccattcaggctaccagctgcctctgtgccaggagtgccccggctgcccctcaccctgtggcaagtacatctcctgcgccgagtgcctgaagttcgaaaagggcccctttgggaagaactgcagcgcggcgtgtccgggcctgcagctgtcgaacaaccccgtgaagggcaggacctgcaaggagagggactcagagggctgctgggtggcctacacgctggagcagcaggacgggatggaccgctacctcatctatgtggatgagagccgagagtgtgtggcaggccccaacatcgccgccatcgtcgggggcaccgtggcaggcatcgtgctgatcggcattctcctgctggtcatctggaaggctctgatccacctgagcgacctccgggagtacaggcgctttgagaaggagaagctcaagtcccagtggaacaatgataatccccttttcaagagcgccaccacgacggtcatgaaccccaagtttgctgagagttaggagcacttgg

SEQ ID NO: 143320 - DNA, 3995 bp, Homo sapiens
  Payload ID: 8312
  Gene Symbol: ITGB3
  Gene Name: integrin, beta 3 (platelet glycoprotein IIIa, antigen CD61)
  Uniprot ID: P05106
  ENST ID: ENST00000559488
  CDS Start-End: 17-2383
gcgggaggcggacgagatgcgagcgcggccgcggccccggccgctctgggcgactgtgctggcgctgggggcgctggcgggcgttggcgtaggagggcccaacatctgtaccacgcgaggtgtgagctcctgccagcagtgcctggctgtgagccccatgtgtgcctggtgctctgatgaggccctgcctctgggctcacctcgctgtgacctgaaggagaatctgctgaaggataactgtgccccagaatccatcgagttcccagtgagtgaggcccgagtactagaggacaggcccctcagcgacaagggctctggagacagctcccaggtcactcaagtcagtccccagaggattgcactccggctccggccagatgattcgaagaatttctccatccaagtgcggcaggtggaggattaccctgtggacatctactacttgatggacctgtcttactccatgaaggatgatctgtggagcatccagaacctgggtaccaagctggccacccagatgcgaaagctcaccagtaacctgcggattggcttcggggcatttgtggacaagcctgtgtcaccatacatgtatatctccccaccagaggccctcgaaaacccctgctatgatatgaagaccacctgcttgcccatgtttggctacaaacacgtgctgacgctaactgaccaggtgacccgcttcaatgaggaagtgaagaagcagagtgtgtcacggaaccgagatgccccagagggtggctttgatgccatcatgcaggctacagtctgtgatgaaaagattggctggaggaatgatgcatcccacttgctggtgtttaccactgatgccaagactcatatagcattggacggaaggctggcaggcattgtccagcctaatgacgggcagtgtcatgttggtagtgacaatcattactctgcctccactaccatggattatccctctttggggctgatgactgagaagctatcccagaaaaacatcaatttgatctttgcagtgactgaaaatgtagtcaatctctatcagaactatagtgagctcatcccagggaccacagttggggttctgtccatggattccagcaatgtcctccagctcattgttgatgcttatgggaaaatccgttctaaagtagagctggaagtgcgtgacctccctgaagagttgtctctatccttcaatgccacctgcctcaacaatgaggtcatccctggcctcaagtcttgtatgggactcaagattggagacacggtgagcttcagcattgaggccaaggtgcgaggctgtccccaggagaaggagaagtcctttaccataaagcccgtgggcttcaaggacagcctgatcgtccaggtcacctttgattgtgactgtgcctgccaggcccaagctgaacctaatagccatcgctgcaacaatggcaatgggacctttgagtgtggggtatgccgttgtgggcctggctggctgggatcccagtgtgagtgctcagaggaggactatcgcccttcccagcaggacgaatgcagcccccgggagggtcagcccgtctgcagccagcggggcgagtgcctctgtggtcaatgtgtctgccacagcagtgactttggcaagatcacgggcaagtactgcgagtgtgacgacttctcctgtgtccgctacaagggggagatgtgctcaggccatggccagtgcagctgtggggactgcctgtgtgactccgactggaccggctactactgcaactgtaccacgcgtactgacacctgcatgtccagcaatgggctgctgtgcagcggccgcggcaagtgtgaatgtggcagctgtgtctgtatccagccgggctcctatggggacacctgtgagaagtgccccacctgcccagatgcctgcacctttaagaaagaatgtgtggagtgtaagaagtttgaccggggagccctacatgacgaaaatacctgcaaccgttactgccgtgacgagattgagtcagtgaaagagcttaaggacactggcaaggatgcagtgaattgtacctataagaatgaggatgactgtgtcgtcagattccagtactatgaagattctagtggaaagtccatcctgtatgtggtagaagagccagagtgtcccaagggccctgacatcctggtggtcctgctctcagtgatgggggccattctgctcattggccttgccgccctgctcatctggaaactcctcatcaccatccacgaccgaaaagaattcgctaaatttgaggaagaacgcgccagagcaaaatgggacacagccaacaacccactgtataaagaggccacgtctaccttcaccaatatcacgtaccggggcacttaatgataagcagtcatcctcagatcattatcagcctgtgccacgattgcaggagtccctgccatcatgtttacagaggacagtatttgtggggagggatttggggctcagagtggggtaggttgggagaatgtcagtatgtggaagtgtgggtctgtgtgtgtgtatgtgggggtctgtgtgtttatgtgtgtgtgttgtgtgtgggagtgtgtaatttaaaattgtgatgtgtcctgataagctgagctccttagcctttgtcccagaatgcctcctgcagggattcttcctgcttagcttgagggtgactatggagctgagcaggtgttcttcattacctcagtgagaagccagctttcctcatcaggccattgtccctgaagagaagggcagggctgaggcctctcattccagaggaagggacaccaagccttggctctaccctgagttcataaatttatggttctcaggcctgactctcagcagctatggtaggaactgctgggcttggcagcccgggtcatctgtacctctgcctcctttcccctccctcaggccgaaggaggagtcagggagagctgaactattagagctgcctgtgccttttgccatcccctcaacccagctatggttctctcgcaagggaagtccttgcaagctaattctttgacctgttgggagtgaggatgtctgggccactcaggggtcattcatggcctgggggatgtaccagcatctcccagttcataatcacaacccttcagatttgccttattggcagctctactctggaggtttgtttagaagaagtgtgtcacccttaggccagcaccatctctttacctcctaattccacaccctcactgctgtagacatttgctatgagctggggatgtctctcatgaccaaatgcttttcctcaaagggagagagtgctattgtagagccagaggtctggccctatgcttccggcctcctgtccctcatccatagcacctccacatacctggccctgtgccttggtgtgctgtatccatccatggggctgattgtatttaccttctacctcttggctgccttgtgaaggaattattcccatgagttggctgggaataagtgccaggatggaatgatgggtcagttgtatcagcacgtgtggcctgttcttctatgggttggacaacctcattttaactcagtctttaatctgagaggccacagtgcaattttattttatttttctcatgatgaggttttcttaacttaaaagaacatgtatataaacatgcttgcattatatttgtaaatttatgtgatggcaaagaaggagagcataggaaaccacacagacttgggcagggtacagacactcccacttggcatcattcacagcaagtcactggccagtggctggatctgtgaggggctctctcatgatagaaggctatggggatagatgtgtggacacattggacctttcctgaggaagagggactgttcttttgtcccagaaaagcagtggctccattggtgttgacatacatccaacattaaaagccacccccaaatgcccaagaaaaaaagaaagacttatcaacatttgttccatgag

SEQ ID NO: 143321 - DNA, 1668 bp, Homo sapiens
  Payload ID: 8312
  Gene Symbol: ITGB3
  Gene Name: integrin, beta 3 (platelet glycoprotein IIIa, antigen CD61)
  ENST ID: ENST00000571680
  CDS Start-End: 10-1341
gcggacgagatgcgagcgcggccgcggccccggccgctctgggcgactgtgctggcgctgggggcgctggcgggcgttggcgtaggagggcccaacatctgtaccacgcgaggtgtgagctcctgccagcagtgcctggctgtgagccccatgtgtgcctggtgctctgatgaggccctgcctctgggctcacctcgctgtgacctgaaggagaatctgctgaaggataactgtgccccagaatccatcgagttcccagtgagtgaggcccgagtactagaggacaggcccctcagcgacaagggctctggagacagctcccaggtcactcaagtcagtccccagaggattgcactccggctccggccagatgattcgaagaatttctccatccaagtgcggcaggtggaggattaccctgtggacatctactacttgatggacctgtcttactccatgaaggatgatctgtggagcatccagaacctgggtaccaagctggccacccagatgcgaaagctcaccagtaacctgcggattggcttcggggcatttgtggacaagcctgtgtcaccatacatgtatatctccccaccagaggccctcgaaaacccctgctatgatatgaagaccacctgcttgcccatgtttggctacaaacacgtgctgacgctaactgaccaggtgacccgcttcaatgaggaagtgaagaagcagagtgtgtcacggaaccgagatgccccagagggtggctttgatgccatcatgcaggctacagtctgtgatgaaaagattggctggaggaatgatgcatcccacttgctggtgtttaccactgatgccaagactcatatagcattggacggaaggctggcaggcattgtccagcctaatgacgggcagtgtcatgttggtagtgacaatcattactctgcctccactaccatggattatccctctttggggctgatgactgagaagctatcccagaaaaacatcaatttgatctttgcagtgactgaaaatgtagtcaatctctatcagaactatagtgagctcatcccagggaccacagttggggttctgtccatggattccagcaatgtcctccagctcattgttgatgcttatgggaaaatccgttctaaagtagagctggaagtgcgtgacctccctgaagagttgtctctatccttcaatgccacctgcctcaacaatgaggtcatccctggcctcaagtcttgtatgggactcaagattggagacacggtgaggtgggctgggcagggcctttgtcctggagcatctgtgggcacccaaccccctttcttccttttgtagtgactaaaaatggcccccttccaccagaaaaaaaatatgggcaagaaaaatacgtttcctgaaagtcattctaagttagatgtaatggatccaccaatcttttcctctgaggcttctgttgcgtaagccatttctgttacgtgaacttcactctcaggaatttgaaaaacttacaatttggttacctttgtttgtgtatgcacagttgattgcaaaggaaaatatttctttaccttcagtccctcaccagtcgccagcctttccaaggtaattaatacctttcttttgtaaaacgacacaagaaagtaaaatctaaaatgtaaaaca

SEQ ID NO: 143322 - DNA, 408 bp, Homo sapiens
  Payload ID: 8312
  Gene Symbol: ITGB3
  Gene Name: integrin, beta 3 (platelet glycoprotein IIIa, antigen CD61)
  ENST ID: ENST00000573377
  CDS Start-End: 1-108
ctcaagtcttgtatgggactcaagattggagacacggtgaggtgggctgggcagggcctttgtcctggagcatctgtgggcacccaaccccctttcttccttttgtagtgactaaaaatggcccccttccaccagaaaaaaaatatgggcaagaaaaatacgtttcctgaaagtcattctaagttagatgtaatggatccaccaatcttttcctctgaggcttctgttgcgtaagccatttctgttacgtgaacttcactctcaggaatttgaaaaacttacaatttggttacctttgtttgtgtatgcacagttgattgcaaaggaaaatatttctttaccttcagtccctcaccagtcgccagcctttccaaggtgagcttcagcattgaggccaaggtgcgaggc

SEQ ID NO: 143323 - DNA, 5919 bp, Homo sapiens
  Payload ID: 8313
  Gene Symbol: ITGB4
  Gene Name: integrin, beta 4
  Uniprot ID: P16144
  ENST ID: ENST00000200181
  CDS Start-End: 188-5656
gcgctgcccgcctcgtccccacccccccaacccccgcgcccgccctcggacagtccctgctcgcccgcgcgctgcagccccatctcctagcggcagcccaggcgcggagggagcgagtccgccccgaggtaggtccaggacgggcgcacagcagcagccgaggctggccgggagagggaggaagaggatggcagggccacgccccagcccatgggccaggctgctcctggcagccttgatcagcgtcagcctctctgggaccttggcaaaccgctgcaagaaggccccagtgaagagctgcacggagtgtgtccgtgtggataaggactgcgcctactgcacagacgagatgttcagggaccggcgctgcaacacccaggcggagctgctggccgcgggctgccagcgggagagcatcgtggtcatggagagcagcttccaaatcacagaggagacccagattgacaccaccctgcggcgcagccagatgtccccccaaggcctgcgggtccgtctgcggcccggtgaggagcggcattttgagctggaggtgtttgagccactggagagccccgtggacctgtacatcctcatggacttctccaactccatgtccgatgatctggacaacctcaagaagatggggcagaacctggctcgggtcctgagccagctcaccagcgactacactattggatttggcaagtttgtggacaaagtcagcgtcccgcagacggacatgaggcctgagaagctgaaggagccctggcccaacagtgacccccccttctccttcaagaacgtcatcagcctgacagaagatgtggatgagttccggaataaactgcagggagagcggatctcaggcaacctggatgctcctgagggcggcttcgatgccatcctgcagacagctgtgtgcacgagggacattggctggcgcccggacagcacccacctgctggtcttctccaccgagtcagccttccactatgaggctgatggcgccaacgtgctggctggcatcatgagccgcaacgatgaacggtgccacctggacaccacgggcacctacacccagtacaggacacaggactacccgtcggtgcccaccctggtgcgcctgctcgccaagcacaacatcatccccatctttgctgtcaccaactactcctatagctactacgagaagcttcacacctatttccctgtctcctcactgggggtgctgcaggaggactcgtccaacatcgtggagctgctggaggaggccttcaatcggatccgctccaacctggacatccgggccctagacagcccccgaggccttcggacagaggtcacctccaagatgttccagaagacgaggactgggtcctttcacatccggcggggggaagtgggtatataccaggtgcagctgcgggcccttgagcacgtggatgggacgcacgtgtgccagctgccggaggaccagaagggcaacatccatctgaaaccttccttctccgacggcctcaagatggacgcgggcatcatctgtgatgtgtgcacctgcgagctgcaaaaagaggtgcggtcagctcgctgcagcttcaacggagacttcgtgtgcggacagtgtgtgtgcagcgagggctggagtggccagacctgcaactgctccaccggctctctgagtgacattcagccctgcctgcgggagggcgaggacaagccgtgctccggccgtggggagtgccagtgcgggcactgtgtgtgctacggcgaaggccgctacgagggtcagttctgcgagtatgacaacttccagtgtccccgcacttccgggttcctctgcaatgaccgaggacgctgctccatgggccagtgtgtgtgtgagcctggttggacaggcccaagctgtgactgtcccctcagcaatgccacctgcatcgacagcaatgggggcatctgtaatggacgtggccactgtgagtgtggccgctgccactgccaccagcagtcgctctacacggacaccatctgcgagatcaactactcggcgatccacccgggcctctgcgaggacctacgctcctgcgtgcagtgccaggcgtggggcaccggcgagaagaaggggcgcacgtgtgaggaatgcaacttcaaggtcaagatggtggacgagcttaagagagccgaggaggtggtggtgcgctgctccttccgggacgaggatgacgactgcacctacagctacaccatggaaggtgacggcgcccctgggcccaacagcactgtcctggtgcacaagaagaaggactgccctccgggctccttctggtggctcatccccctgctcctcctcctcctgccgctcctggccctgctactgctgctatgctggaagtactgtgcctgctgcaaggcctgcctggcacttctcccgtgctgcaaccgaggtcacatggtgggctttaaggaagaccactacatgctgcgggagaacctgatggcctctgaccacttggacacgcccatgctgcgcagcgggaacctcaagggccgtgacgtggtccgctggaaggtcaccaacaacatgcagcggcctggctttgccactcatgccgccagcatcaaccccacagagctggtgccctacgggctgtccttgcgcctggcccgcctttgcaccgagaacctgctgaagcctgacactcgggagtgcgcccagctgcgccaggaggtggaggagaacctgaacgaggtctacaggcagatctccggtgtacacaagctccagcagaccaagttccggcagcagcccaatgccgggaaaaagcaagaccacaccattgtggacacagtgctgatggcgccccgctcggccaagccggccctgctgaagcttacagagaagcaggtggaacagagggccttccacgacctcaaggtggcccccggctactacaccctcactgcagaccaggacgcccggggcatggtggagttccaggagggcgtggagctggtggacgtacgggtgcccctctttatccggcctgaggatgacgacgagaagcagctgctggtggaggccatcgacgtgcccgcaggcactgccaccctcggccgccgcctggtaaacatcaccatcatcaaggagcaagccagagacgtggtgtcctttgagcagcctgagttctcggtcagccgcggggaccaggtggcccgcatccctgtcatccggcgtgtcctggacggcgggaagtcccaggtctcctaccgcacacaggatggcaccgcgcagggcaaccgggactacatccccgtggagggtgagctgctgttccagcctggggaggcctggaaagagctgcaggtgaagctcctggagctgcaagaagttgactccctcctgcggggccgccaggtccgccgtttccacgtccagctcagcaaccctaagtttggggcccacctgggccagccccactccaccaccatcatcatcagggacccagatgaactggaccggagcttcacgagtcagatgttgtcatcacagccaccccctcacggcgacctgggcgccccgcagaaccccaatgctaaggccgctgggtccaggaagatccatttcaactggctgcccccttctggcaagccaatggggtacagggtaaagtactggattcagggtgactccgaatccgaagcccacctgctcgacagcaaggtgccctcagtggagctcaccaacctgtacccgtattgcgactatgagatgaaggtgtgcgcctacggggctcagggcgagggaccctacagctccctggtgtcctgccgcacccaccaggaagtgcccagcgagccagggcgtctggccttcaatgtcgtctcctccacggtgacccagctgagctgggctgagccggctgagaccaacggtgagatcacagcctacgaggtctgctatggcctggtcaacgatgacaaccgacctattgggcccatgaagaaagtgctggttgacaaccctaagaaccggatgctgcttattgagaaccttcgggagtcccagccctaccgctacacggtgaaggcgcgcaacggggccggctgggggcctgagcgggaggccatcatcaacctggccacccagcccaagaggcccatgtccatccccatcatccctgacatccctatcgtggacgcccagagcggggaggactacgacagcttccttatgtacagcgatgacgttctacgctctccatcgggcagccagaggcccagcgtctccgatgacactggctgcggctggaagttcgagcccctgctgggggaggagctggacctgcggcgcgtcacgtggcggctgcccccggagctcatcccgcgcctgtcggccagcagcgggcgctcctccgacgccgaggcgccccacgggcccccggacgacggcggcgcgggcgggaagggcggcagcctgccccgcagtgcgacacccgggccccccggagagcacctggtgaatggccggatggactttgccttcccgggcagcaccaactccctgcacaggatgaccacgaccagtgctgctgcctatggcacccacctgagcccacacgtgccccaccgcgtgctaagcacatcctccaccctcacacgggactacaactcactgacccgctcagaacactcacactcgaccacactgcccagggactactccaccctcacctccgtctcctcccacgactctcgcctgactgctggtgtgcccgacacgcccacccgcctggtgttctctgccctggggcccacatctctcagagtgagctggcaggagccgcggtgcgagcggccgctgcagggctacagtgtggagtaccagctgctgaacggcggtgagctgcatcggctcaacatccccaaccctgcccagacctcggtggtggtggaagacctcctgcccaaccactcctacgtgttccgcgtgcgggcccagagccaggaaggctggggccgagagcgtgagggtgtcatcaccattgaatcccaggtgcacccgcagagcccactgtgtcccctgccaggctccgccttcactttgagcactcccagtgccccaggcccgctggtgttcactgccctgagcccagactcgctgcagctgagctgggagcggccacggaggcccaatggggatatcgtcggctacctggtgacctgtgagatggcccaaggaggagggccagccaccgcattccgggtggatggagacagccccgagagccggctgaccgtgccgggcctcagcgagaacgtgccctacaagttcaaggtgcaggccaggaccactgagggcttcgggccagagcgcgagggcatcatcaccatagagtcccaggatggaggacccttcccgcagctgggcagccgtgccgggctcttccagcacccgctgcaaagcgagtacagcagcatcaccaccacccacaccagcgccaccgagcccttcctagtggatgggctgaccctgggggcccagcacctggaggcaggcggctccctcacccggcatgtgacccaggagtttgtgagccggacactgaccaccagcggaacccttagcacccacatggaccaacagttcttccaaacttgaccgcaccctgccccacccccgccacgtcccactaggcgtcctcccgactcctctcccggagcctcctcagctactccatccttgcacccctgggggcccagcccacccgcatgcacagagcaggggctaggtgtctcctgggaggcatgaagggggcaaggtccgtcctctgtgggcccaaacctatttgtaaccaaagagctgggagcagcacaaggacccagcctttgttctgcacttaataaatggttttgctactgcta

SEQ ID NO: 143324 - DNA, 5689 bp, Homo sapiens
  Payload ID: 8313
  Gene Symbol: ITGB4
  Gene Name: integrin, beta 4
  Uniprot ID: P16144
  ENST ID: ENST00000449880
  CDS Start-End: 9-5426
ggaagaggatggcagggccacgccccagcccatgggccaggctgctcctggcagccttgatcagcgtcagcctctctgggaccttggcaaaccgctgcaagaaggccccagtgaagagctgcacggagtgtgtccgtgtggataaggactgcgcctactgcacagacgagatgttcagggaccggcgctgcaacacccaggcggagctgctggccgcgggctgccagcgggagagcatcgtggtcatggagagcagcttccaaatcacagaggagacccagattgacaccaccctgcggcgcagccagatgtccccccaaggcctgcgggtccgtctgcggcccggtgaggagcggcattttgagctggaggtgtttgagccactggagagccccgtggacctgtacatcctcatggacttctccaactccatgtccgatgatctggacaacctcaagaagatggggcagaacctggctcgggtcctgagccagctcaccagcgactacactattggatttggcaagtttgtggacaaagtcagcgtcccgcagacggacatgaggcctgagaagctgaaggagccctggcccaacagtgacccccccttctccttcaagaacgtcatcagcctgacagaagatgtggatgagttccggaataaactgcagggagagcggatctcaggcaacctggatgctcctgagggcggcttcgatgccatcctgcagacagctgtgtgcacgagggacattggctggcgcccggacagcacccacctgctggtcttctccaccgagtcagccttccactatgaggctgatggcgccaacgtgctggctggcatcatgagccgcaacgatgaacggtgccacctggacaccacgggcacctacacccagtacaggacacaggactacccgtcggtgcccaccctggtgcgcctgctcgccaagcacaacatcatccccatctttgctgtcaccaactactcctatagctactacgagaagcttcacacctatttccctgtctcctcactgggggtgctgcaggaggactcgtccaacatcgtggagctgctggaggaggccttcaatcggatccgctccaacctggacatccgggccctagacagcccccgaggccttcggacagaggtcacctccaagatgttccagaagacgaggactgggtcctttcacatccggcggggggaagtgggtatataccaggtgcagctgcgggcccttgagcacgtggatgggacgcacgtgtgccagctgccggaggaccagaagggcaacatccatctgaaaccttccttctccgacggcctcaagatggacgcgggcatcatctgtgatgtgtgcacctgcgagctgcaaaaagaggtgcggtcagctcgctgcagcttcaacggagacttcgtgtgcggacagtgtgtgtgcagcgagggctggagtggccagacctgcaactgctccaccggctctctgagtgacattcagccctgcctgcgggagggcgaggacaagccgtgctccggccgtggggagtgccagtgcgggcactgtgtgtgctacggcgaaggccgctacgagggtcagttctgcgagtatgacaacttccagtgtccccgcacttccgggttcctctgcaatgaccgaggacgctgctccatgggccagtgtgtgtgtgagcctggttggacaggcccaagctgtgactgtcccctcagcaatgccacctgcatcgacagcaatgggggcatctgtaatggacgtggccactgtgagtgtggccgctgccactgccaccagcagtcgctctacacggacaccatctgcgagatcaactactcggcgatccacccgggcctctgcgaggacctacgctcctgcgtgcagtgccaggcgtggggcaccggcgagaagaaggggcgcacgtgtgaggaatgcaacttcaaggtcaagatggtggacgagcttaagagagccgaggaggtggtggtgcgctgctccttccgggacgaggatgacgactgcacctacagctacaccatggaaggtgacggcgcccctgggcccaacagcactgtcctggtgcacaagaagaaggactgccctccgggctccttctggtggctcatccccctgctcctcctcctcctgccgctcctggccctgctactgctgctatgctggaagtactgtgcctgctgcaaggcctgcctggcacttctcccgtgctgcaaccgaggtcacatggtgggctttaaggaagaccactacatgctgcgggagaacctgatggcctctgaccacttggacacgcccatgctgcgcagcgggaacctcaagggccgtgacgtggtccgctggaaggtcaccaacaacatgcagcggcctggctttgccactcatgccgccagcatcaaccccacagagctggtgccctacgggctgtccttgcgcctggcccgcctttgcaccgagaacctgctgaagcctgacactcgggagtgcgcccagctgcgccaggaggtggaggagaacctgaacgaggtctacaggcagatctccggtgtacacaagctccagcagaccaagttccggcagcagcccaatgccgggaaaaagcaagaccacaccattgtggacacagtgctgatggcgccccgctcggccaagccggccctgctgaagcttacagagaagcaggtggaacagagggccttccacgacctcaaggtggcccccggctactacaccctcactgcagaccaggacgcccggggcatggtggagttccaggagggcgtggagctggtggacgtacgggtgcccctctttatccggcctgaggatgacgacgagaagcagctgctggtggaggccatcgacgtgcccgcaggcactgccaccctcggccgccgcctggtaaacatcaccatcatcaaggagcaagccagagacgtggtgtcctttgagcagcctgagttctcggtcagccgcggggaccaggtggcccgcatccctgtcatccggcgtgtcctggacggcgggaagtcccaggtctcctaccgcacacaggatggcaccgcgcagggcaaccgggactacatccccgtggagggtgagctgctgttccagcctggggaggcctggaaagagctgcaggtgaagctcctggagctgcaagaagttgactccctcctgcggggccgccaggtccgccgtttccacgtccagctcagcaaccctaagtttggggcccacctgggccagccccactccaccaccatcatcatcagggacccagatgaactggaccggagcttcacgagtcagatgttgtcatcacagccaccccctcacggcgacctgggcgccccgcagaaccccaatgctaaggccgctgggtccaggaagatccatttcaactggctgcccccttctggcaagccaatggggtacagggtaaagtactggattcagggtgactccgaatccgaagcccacctgctcgacagcaaggtgccctcagtggagctcaccaacctgtacccgtattgcgactatgagatgaaggtgtgcgcctacggggctcagggcgagggaccctacagctccctggtgtcctgccgcacccaccaggaagtgcccagcgagccagggcgtctggccttcaatgtcgtctcctccacggtgacccagctgagctgggctgagccggctgagaccaacggtgagatcacagcctacgaggtctgctatggcctggtcaacgatgacaaccgacctattgggcccatgaagaaagtgctggttgacaaccctaagaaccggatgctgcttattgagaaccttcgggagtcccagccctaccgctacacggtgaaggcgcgcaacggggccggctgggggcctgagcgggaggccatcatcaacctggccacccagcccaagaggcccatgtccatccccatcatccctgacatccctatcgtggacgcccagagcggggaggactacgacagcttccttatgtacagcgatgacgttctacgctctccatcgggcagccagaggcccagcgtctccgatgacactgagcacctggtgaatggccggatggactttgccttcccgggcagcaccaactccctgcacaggatgaccacgaccagtgctgctgcctatggcacccacctgagcccacacgtgccccaccgcgtgctaagcacatcctccaccctcacacgggactacaactcactgacccgctcagaacactcacactcgaccacactgcccagggactactccaccctcacctccgtctcctcccacggcctccctcccatctgggaacacgggaggagcaggcttccgctgtcctgggccctggggtcccggagtcgggctcagatgaaagggttccccccttccaggggcccacgagactctataatcctggctgggaggccagcagcgccctcctggggcccagactctcgcctgactgctggtgtgcccgacacgcccacccgcctggtgttctctgccctggggcccacatctctcagagtgagctggcaggagccgcggtgcgagcggccgctgcagggctacagtgtggagtaccagctgctgaacggcggtgagctgcatcggctcaacatccccaaccctgcccagacctcggtggtggtggaagacctcctgcccaaccactcctacgtgttccgcgtgcgggcccagagccaggaaggctggggccgagagcgtgagggtgtcatcaccattgaatcccaggtgcacccgcagagcccactgtgtcccctgccaggctccgccttcactttgagcactcccagtgccccaggcccgctggtgttcactgccctgagcccagactcgctgcagctgagctgggagcggccacggaggcccaatggggatatcgtcggctacctggtgacctgtgagatggcccaaggaggagggccagccaccgcattccgggtggatggagacagccccgagagccggctgaccgtgccgggcctcagcgagaacgtgccctacaagttcaaggtgcaggccaggaccactgagggcttcgggccagagcgcgagggcatcatcaccatagagtcccaggatggaggacccttcccgcagctgggcagccgtgccgggctcttccagcacccgctgcaaagcgagtacagcagcatcaccaccacccacaccagcgccaccgagcccttcctagtggatgggctgaccctgggggcccagcacctggaggcaggcggctccctcacccggcatgtgacccaggagtttgtgagccggacactgaccaccagcggaacccttagcacccacatggaccaacagttcttccaaacttgaccgcaccctgccccacccccgccacgtcccactaggcgtcctcccgactcctctcccggagcctcctcagctactccatccttgcacccctgggggcccagcccacccgcatgcacagagcaggggctaggtgtctcctgggaggcatgaagggggcaaggtccgtcctctgtgggcccaaacctatttgtaaccaaagagctgggagcagcacaaggacccagcctttgttctgcacttaataaatggttttgctactgcta

SEQ ID NO: 143325 - DNA, 5645 bp, Homo sapiens
  Payload ID: 8313
  Gene Symbol: ITGB4
  Gene Name: integrin, beta 4
  Uniprot ID: P16144
  ENST ID: ENST00000450894
  CDS Start-End: 127-5385
cgcccgcgcgctgcagccccatctcctagcggcagcccaggcgcggagggagcgagtccgccccgaggtaggtccaggacgggcgcacagcagcagccgaggctggccgggagagggaggaagaggatggcagggccacgccccagcccatgggccaggctgctcctggcagccttgatcagcgtcagcctctctgggaccttggcaaaccgctgcaagaaggccccagtgaagagctgcacggagtgtgtccgtgtggataaggactgcgcctactgcacagacgagatgttcagggaccggcgctgcaacacccaggcggagctgctggccgcgggctgccagcgggagagcatcgtggtcatggagagcagcttccaaatcacagaggagacccagattgacaccaccctgcggcgcagccagatgtccccccaaggcctgcgggtccgtctgcggcccggtgaggagcggcattttgagctggaggtgtttgagccactggagagccccgtggacctgtacatcctcatggacttctccaactccatgtccgatgatctggacaacctcaagaagatggggcagaacctggctcgggtcctgagccagctcaccagcgactacactattggatttggcaagtttgtggacaaagtcagcgtcccgcagacggacatgaggcctgagaagctgaaggagccctggcccaacagtgacccccccttctccttcaagaacgtcatcagcctgacagaagatgtggatgagttccggaataaactgcagggagagcggatctcaggcaacctggatgctcctgagggcggcttcgatgccatcctgcagacagctgtgtgcacgagggacattggctggcgcccggacagcacccacctgctggtcttctccaccgagtcagccttccactatgaggctgatggcgccaacgtgctggctggcatcatgagccgcaacgatgaacggtgccacctggacaccacgggcacctacacccagtacaggacacaggactacccgtcggtgcccaccctggtgcgcctgctcgccaagcacaacatcatccccatctttgctgtcaccaactactcctatagctactacgagaagcttcacacctatttccctgtctcctcactgggggtgctgcaggaggactcgtccaacatcgtggagctgctggaggaggccttcaatcggatccgctccaacctggacatccgggccctagacagcccccgaggccttcggacagaggtcacctccaagatgttccagaagacgaggactgggtcctttcacatccggcggggggaagtgggtatataccaggtgcagctgcgggcccttgagcacgtggatgggacgcacgtgtgccagctgccggaggaccagaagggcaacatccatctgaaaccttccttctccgacggcctcaagatggacgcgggcatcatctgtgatgtgtgcacctgcgagctgcaaaaagaggtgcggtcagctcgctgcagcttcaacggagacttcgtgtgcggacagtgtgtgtgcagcgagggctggagtggccagacctgcaactgctccaccggctctctgagtgacattcagccctgcctgcgggagggcgaggacaagccgtgctccggccgtggggagtgccagtgcgggcactgtgtgtgctacggcgaaggccgctacgagggtcagttctgcgagtatgacaacttccagtgtccccgcacttccgggttcctctgcaatgaccgaggacgctgctccatgggccagtgtgtgtgtgagcctggttggacaggcccaagctgtgactgtcccctcagcaatgccacctgcatcgacagcaatgggggcatctgtaatggacgtggccactgtgagtgtggccgctgccactgccaccagcagtcgctctacacggacaccatctgcgagatcaactactcggcgatccacccgggcctctgcgaggacctacgctcctgcgtgcagtgccaggcgtggggcaccggcgagaagaaggggcgcacgtgtgaggaatgcaacttcaaggtcaagatggtggacgagcttaagagagccgaggaggtggtggtgcgctgctccttccgggacgaggatgacgactgcacctacagctacaccatggaaggtgacggcgcccctgggcccaacagcactgtcctggtgcacaagaagaaggactgccctccgggctccttctggtggctcatccccctgctcctcctcctcctgccgctcctggccctgctactgctgctatgctggaagtactgtgcctgctgcaaggcctgcctggcacttctcccgtgctgcaaccgaggtcacatggtgggctttaaggaagaccactacatgctgcgggagaacctgatggcctctgaccacttggacacgcccatgctgcgcagcgggaacctcaagggccgtgacgtggtccgctggaaggtcaccaacaacatgcagcggcctggctttgccactcatgccgccagcatcaaccccacagagctggtgccctacgggctgtccttgcgcctggcccgcctttgcaccgagaacctgctgaagcctgacactcgggagtgcgcccagctgcgccaggaggtggaggagaacctgaacgaggtctacaggcagatctccggtgtacacaagctccagcagaccaagttccggcagcagcccaatgccgggaaaaagcaagaccacaccattgtggacacagtgctgatggcgccccgctcggccaagccggccctgctgaagcttacagagaagcaggtggaacagagggccttccacgacctcaaggtggcccccggctactacaccctcactgcagaccaggacgcccggggcatggtggagttccaggagggcgtggagctggtggacgtacgggtgcccctctttatccggcctgaggatgacgacgagaagcagctgctggtggaggccatcgacgtgcccgcaggcactgccaccctcggccgccgcctggtaaacatcaccatcatcaaggagcaagccagagacgtggtgtcctttgagcagcctgagttctcggtcagccgcggggaccaggtggcccgcatccctgtcatccggcgtgtcctggacggcgggaagtcccaggtctcctaccgcacacaggatggcaccgcgcagggcaaccgggactacatccccgtggagggtgagctgctgttccagcctggggaggcctggaaagagctgcaggtgaagctcctggagctgcaagaagttgactccctcctgcggggccgccaggtccgccgtttccacgtccagctcagcaaccctaagtttggggcccacctgggccagccccactccaccaccatcatcatcagggacccagatgaactggaccggagcttcacgagtcagatgttgtcatcacagccaccccctcacggcgacctgggcgccccgcagaaccccaatgctaaggccgctgggtccaggaagatccatttcaactggctgcccccttctggcaagccaatggggtacagggtaaagtactggattcagggtgactccgaatccgaagcccacctgctcgacagcaaggtgccctcagtggagctcaccaacctgtacccgtattgcgactatgagatgaaggtgtgcgcctacggggctcagggcgagggaccctacagctccctggtgtcctgccgcacccaccaggaagtgcccagcgagccagggcgtctggccttcaatgtcgtctcctccacggtgacccagctgagctgggctgagccggctgagaccaacggtgagatcacagcctacgaggtctgctatggcctggtcaacgatgacaaccgacctattgggcccatgaagaaagtgctggttgacaaccctaagaaccggatgctgcttattgagaaccttcgggagtcccagccctaccgctacacggtgaaggcgcgcaacggggccggctgggggcctgagcgggaggccatcatcaacctggccacccagcccaagaggcccatgtccatccccatcatccctgacatccctatcgtggacgcccagagcggggaggactacgacagcttccttatgtacagcgatgacgttctacgctctccatcgggcagccagaggcccagcgtctccgatgacactgagcacctggtgaatggccggatggactttgccttcccgggcagcaccaactccctgcacaggatgaccacgaccagtgctgctgcctatggcacccacctgagcccacacgtgccccaccgcgtgctaagcacatcctccaccctcacacgggactacaactcactgacccgctcagaacactcacactcgaccacactgcccagggactactccaccctcacctccgtctcctcccacgactctcgcctgactgctggtgtgcccgacacgcccacccgcctggtgttctctgccctggggcccacatctctcagagtgagctggcaggagccgcggtgcgagcggccgctgcagggctacagtgtggagtaccagctgctgaacggcggtgagctgcatcggctcaacatccccaaccctgcccagacctcggtggtggtggaagacctcctgcccaaccactcctacgtgttccgcgtgcgggcccagagccaggaaggctggggccgagagcgtgagggtgtcatcaccattgaatcccaggtgcacccgcagagcccactgtgtcccctgccaggctccgccttcactttgagcactcccagtgccccaggcccgctggtgttcactgccctgagcccagactcgctgcagctgagctgggagcggccacggaggcccaatggggatatcgtcggctacctggtgacctgtgagatggcccaaggaggagggccagccaccgcattccgggtggatggagacagccccgagagccggctgaccgtgccgggcctcagcgagaacgtgccctacaagttcaaggtgcaggccaggaccactgagggcttcgggccagagcgcgagggcatcatcaccatagagtcccaggatggaggacccttcccgcagctgggcagccgtgccgggctcttccagcacccgctgcaaagcgagtacagcagcatcaccaccacccacaccagcgccaccgagcccttcctagtggatgggctgaccctgggggcccagcacctggaggcaggcggctccctcacccggcatgtgacccaggagtttgtgagccggacactgaccaccagcggaacccttagcacccacatggaccaacagttcttccaaacttgaccgcaccctgccccacccccgccacgtcccactaggcgtcctcccgactcctctcccggagcctcctcagctactccatccttgcacccctgggggcccagcccacccgcatgcacagagcaggggctaggtgtctcctgggaggcatgaagggggcaaggtccgtcctctgtgggcccaaacctatttgtaaccaaagagctgggagcagcacaaggacccagcctttgttctgcacttaataaatggttttgctactg

SEQ ID NO: 143326 - DNA, 688 bp, Homo sapiens
  Payload ID: 8313
  Gene Symbol: ITGB4
  Gene Name: integrin, beta 4
  ENST ID: ENST00000578318
  CDS Start-End: 1-191
aggccaggaccactgagggcttcgggccagagcgcgagggcatcatcaccatagagtcccaggatggaggacccttcccgcagctgggcagccgtgccgggctcttccagcacccgctgcaaagcgagtacagcagcatcaccaccacccacaccagcgccaccgagcccttcctagtgggtgagcactgagggctaggggatcccggctctcctgggacagggagctagcagagggagaagggcagaccccaagccaggtcatctaatgcctcctcctccacagatgggctgaccctgggggcccagcacctggaggcaggcggctccctcacccggcatgtgacccaggagtttgtgagccggacactgaccaccagcggaacccttagcacccacatggaccaacagttcttccaaacttgaccgcaccctgccccacccccgccacgtcccactaggcgtcctcccgactcctctcccggagcctcctcagctactccatccttgcacccctgggggcccagcccacccgcatgcacagagcaggggctaggtgtctcctgggaggcatgaagggggcaaggtccgtcctctgtgggcccaaacctatttgtaaccaaagagctgggagcagcacaaggacccagcctttgttctgcacttaataaatggttttgctactgcta

SEQ ID NO: 143327 - DNA, 5554 bp, Homo sapiens
  Payload ID: 8313
  Gene Symbol: ITGB4
  Gene Name: integrin, beta 4
  Uniprot ID: P16144
  ENST ID: ENST00000579662
  CDS Start-End: 247-5505
ccggcggcggcacccagctcctgccccgacaggtgcgcgccgcgcgaaggaatgcagccggtctgactcaccagcgcctccttcctacctgcgcgcccgccccataaagcgctgcccgcctcgtccccacccccccaacccccgcgcccgccctcggacagtccctgctcgcccgcgcgctgcagccccatctcctagcggcagcccaggcgcggagggagcgagtccgccccgaggaggaagaggatggcagggccacgccccagcccatgggccaggctgctcctggcagccttgatcagcgtcagcctctctgggaccttggcaaaccgctgcaagaaggccccagtgaagagctgcacggagtgtgtccgtgtggataaggactgcgcctactgcacagacgagatgttcagggaccggcgctgcaacacccaggcggagctgctggccgcgggctgccagcgggagagcatcgtggtcatggagagcagcttccaaatcacagaggagacccagattgacaccaccctgcggcgcagccagatgtccccccaaggcctgcgggtccgtctgcggcccggtgaggagcggcattttgagctggaggtgtttgagccactggagagccccgtggacctgtacatcctcatggacttctccaactccatgtccgatgatctggacaacctcaagaagatggggcagaacctggctcgggtcctgagccagctcaccagcgactacactattggatttggcaagtttgtggacaaagtcagcgtcccgcagacggacatgaggcctgagaagctgaaggagccctggcccaacagtgacccccccttctccttcaagaacgtcatcagcctgacagaagatgtggatgagttccggaataaactgcagggagagcggatctcaggcaacctggatgctcctgagggcggcttcgatgccatcctgcagacagctgtgtgcacgagggacattggctggcgcccggacagcacccacctgctggtcttctccaccgagtcagccttccactatgaggctgatggcgccaacgtgctggctggcatcatgagccgcaacgatgaacggtgccacctggacaccacgggcacctacacccagtacaggacacaggactacccgtcggtgcccaccctggtgcgcctgctcgccaagcacaacatcatccccatctttgctgtcaccaactactcctatagctactacgagaagcttcacacctatttccctgtctcctcactgggggtgctgcaggaggactcgtccaacatcgtggagctgctggaggaggccttcaatcggatccgctccaacctggacatccgggccctagacagcccccgaggccttcggacagaggtcacctccaagatgttccagaagacgaggactgggtcctttcacatccggcggggggaagtgggtatataccaggtgcagctgcgggcccttgagcacgtggatgggacgcacgtgtgccagctgccggaggaccagaagggcaacatccatctgaaaccttccttctccgacggcctcaagatggacgcgggcatcatctgtgatgtgtgcacctgcgagctgcaaaaagaggtgcggtcagctcgctgcagcttcaacggagacttcgtgtgcggacagtgtgtgtgcagcgagggctggagtggccagacctgcaactgctccaccggctctctgagtgacattcagccctgcctgcgggagggcgaggacaagccgtgctccggccgtggggagtgccagtgcgggcactgtgtgtgctacggcgaaggccgctacgagggtcagttctgcgagtatgacaacttccagtgtccccgcacttccgggttcctctgcaatgaccgaggacgctgctccatgggccagtgtgtgtgtgagcctggttggacaggcccaagctgtgactgtcccctcagcaatgccacctgcatcgacagcaatgggggcatctgtaatggacgtggccactgtgagtgtggccgctgccactgccaccagcagtcgctctacacggacaccatctgcgagatcaactactcggcgatccacccgggcctctgcgaggacctacgctcctgcgtgcagtgccaggcgtggggcaccggcgagaagaaggggcgcacgtgtgaggaatgcaacttcaaggtcaagatggtggacgagcttaagagagccgaggaggtggtggtgcgctgctccttccgggacgaggatgacgactgcacctacagctacaccatggaaggtgacggcgcccctgggcccaacagcactgtcctggtgcacaagaagaaggactgccctccgggctccttctggtggctcatccccctgctcctcctcctcctgccgctcctggccctgctactgctgctatgctggaagtactgtgcctgctgcaaggcctgcctggcacttctcccgtgctgcaaccgaggtcacatggtgggctttaaggaagaccactacatgctgcgggagaacctgatggcctctgaccacttggacacgcccatgctgcgcagcgggaacctcaagggccgtgacgtggtccgctggaaggtcaccaacaacatgcagcggcctggctttgccactcatgccgccagcatcaaccccacagagctggtgccctacgggctgtccttgcgcctggcccgcctttgcaccgagaacctgctgaagcctgacactcgggagtgcgcccagctgcgccaggaggtggaggagaacctgaacgaggtctacaggcagatctccggtgtacacaagctccagcagaccaagttccggcagcagcccaatgccgggaaaaagcaagaccacaccattgtggacacagtgctgatggcgccccgctcggccaagccggccctgctgaagcttacagagaagcaggtggaacagagggccttccacgacctcaaggtggcccccggctactacaccctcactgcagaccaggacgcccggggcatggtggagttccaggagggcgtggagctggtggacgtacgggtgcccctctttatccggcctgaggatgacgacgagaagcagctgctggtggaggccatcgacgtgcccgcaggcactgccaccctcggccgccgcctggtaaacatcaccatcatcaaggagcaagccagagacgtggtgtcctttgagcagcctgagttctcggtcagccgcggggaccaggtggcccgcatccctgtcatccggcgtgtcctggacggcgggaagtcccaggtctcctaccgcacacaggatggcaccgcgcagggcaaccgggactacatccccgtggagggtgagctgctgttccagcctggggaggcctggaaagagctgcaggtgaagctcctggagctgcaagaagttgactccctcctgcggggccgccaggtccgccgtttccacgtccagctcagcaaccctaagtttggggcccacctgggccagccccactccaccaccatcatcatcagggacccagatgaactggaccggagcttcacgagtcagatgttgtcatcacagccaccccctcacggcgacctgggcgccccgcagaaccccaatgctaaggccgctgggtccaggaagatccatttcaactggctgcccccttctggcaagccaatggggtacagggtaaagtactggattcagggtgactccgaatccgaagcccacctgctcgacagcaaggtgccctcagtggagctcaccaacctgtacccgtattgcgactatgagatgaaggtgtgcgcctacggggctcagggcgagggaccctacagctccctggtgtcctgccgcacccaccaggaagtgcccagcgagccagggcgtctggccttcaatgtcgtctcctccacggtgacccagctgagctgggctgagccggctgagaccaacggtgagatcacagcctacgaggtctgctatggcctggtcaacgatgacaaccgacctattgggcccatgaagaaagtgctggttgacaaccctaagaaccggatgctgcttattgagaaccttcgggagtcccagccctaccgctacacggtgaaggcgcgcaacggggccggctgggggcctgagcgggaggccatcatcaacctggccacccagcccaagaggcccatgtccatccccatcatccctgacatccctatcgtggacgcccagagcggggaggactacgacagcttccttatgtacagcgatgacgttctacgctctccatcgggcagccagaggcccagcgtctccgatgacactgagcacctggtgaatggccggatggactttgccttcccgggcagcaccaactccctgcacaggatgaccacgaccagtgctgctgcctatggcacccacctgagcccacacgtgccccaccgcgtgctaagcacatcctccaccctcacacgggactacaactcactgacccgctcagaacactcacactcgaccacactgcccagggactactccaccctcacctccgtctcctcccacgactctcgcctgactgctggtgtgcccgacacgcccacccgcctggtgttctctgccctggggcccacatctctcagagtgagctggcaggagccgcggtgcgagcggccgctgcagggctacagtgtggagtaccagctgctgaacggcggtgagctgcatcggctcaacatccccaaccctgcccagacctcggtggtggtggaagacctcctgcccaaccactcctacgtgttccgcgtgcgggcccagagccaggaaggctggggccgagagcgtgagggtgtcatcaccattgaatcccaggtgcacccgcagagcccactgtgtcccctgccaggctccgccttcactttgagcactcccagtgccccaggcccgctggtgttcactgccctgagcccagactcgctgcagctgagctgggagcggccacggaggcccaatggggatatcgtcggctacctggtgacctgtgagatggcccaaggaggagggccagccaccgcattccgggtggatggagacagccccgagagccggctgaccgtgccgggcctcagcgagaacgtgccctacaagttcaaggtgcaggccaggaccactgagggcttcgggccagagcgcgagggcatcatcaccatagagtcccaggatggaggacccttcccgcagctgggcagccgtgccgggctcttccagcacccgctgcaaagcgagtacagcagcatcaccaccacccacaccagcgccaccgagcccttcctagtggatgggctgaccctgggggcccagcacctggaggcaggcggctccctcacccggcatgtgacccaggagtttgtgagccggacactgaccaccagcggaacccttagcacccacatggaccaacagttcttccaaacttgaccgcaccctgccccacccccgccacgtcccactaggcgtcctcccgact

SEQ ID NO: 143328 - DNA, 458 bp, Homo sapiens
  Payload ID: 8313
  Gene Symbol: ITGB4
  Gene Name: integrin, beta 4
  ENST ID: ENST00000582629
  CDS Start-End: 1-345
tccaactccatgtccgatgatctggacaacctcaagaagatggggcagaacctggctcgggtcctgagccagctcaccagcgactacactattggatttggcaagtttgtggacaaagtcagcgtcccgcagacggacatgaggcctgagaagctgaaggagccctggcccaacagtgacccccccttctccttcaagaacgtcatcagcctgacagaagatgtggatgagttccggaataaactgcagggagagcggatctcagctactccatccttgcacccctgggggcccagcccacccgcatgcacagagcaggggctaggtgtctcctgggaggcatgaagggggcaaggtccgtcctctgtgggcccaaacctatttgtaaccaaagagctgggagcagcacaaggacccagcctttgttctgcacttaataaatggttttgctactgcta

SEQ ID NO: 143329 - DNA, 603 bp, Homo sapiens
  Payload ID: 8313
  Gene Symbol: ITGB4
  Gene Name: integrin, beta 4
  ENST ID: ENST00000584939
  CDS Start-End: 1-603
gcaccaactccctgcacaggatgaccacgaccagtgctgctgcctatggcacccacctgagcccacacgtgccccaccgcgtgctaagcacatcctccaccctcacacgggactacaactcactgacccgctcagaacactcacactcgaccacactgcccagggactactccaccctcacctccgtctcctcccacggtgagctgcatcggctcaacatccccaaccctgcccagacctcggtggtggtggaagacctcctgcccaaccactcctacgtgttccgcgtgcgggcccagagccaggaaggctggggccgagagcgtgagggtgtcatcaccattgaatcccaggtgcacccgcagagcccactgtgtcccctgccaggctccgccttcactttgagcactcccagtgccccaggcccgctggtgttcactgccctgagcccagactcgctgcagctgagctgggagcggccacggaggcccaatggggatatcgtcggctacctggtgacctgtgagatggcccaaggaggagggccagccaccgcattccgggtggatggagacagccccgagagccggctgaccgtgccgg

SEQ ID NO: 143330 - DNA, 4372 bp, Homo sapiens
  Payload ID: 8314
  Gene Symbol: ITGB5
  Gene Name: integrin, beta 5
  Uniprot ID: P18084
  ENST ID: ENST00000296181
  CDS Start-End: 298-2697
gcggagccagcccctcccctacccggagcagcccgctggggccgtcccgagcggcgacacactaggagtcccggccggccagccagggcagccgcggtcccgggactcggccgtgagtgctgcgggacggatggtggcggcggggcgcgggccagcgcgggcgccgtgagccggagctgcgcgcggggcatgcggctgcggcccccggccctcggcccccgcgctccggccccagccccggccgccggcccccgcggagtgcagcgaccgcgccgccgctgagggaggcgccccaccatgccgcgggccccggcgccgctgtacgcctgcctcctggggctctgcgcgctcctgccccggctcgcaggtctcaacatatgcactagtggaagtgccacctcatgtgaagaatgtctgctaatccacccaaaatgtgcctggtgctccaaagaggacttcggaagcccacggtccatcacctctcggtgtgatctgagggcaaaccttgtcaaaaatggctgtggaggtgagatagagagcccagccagcagcttccatgtcctgaggagcctgcccctcagcagcaagggttcgggctctgcaggctgggacgtcattcagatgacaccacaggagattgccgtgaacctccggcccggtgacaagaccaccttccagctacaggttcgccaggtggaggactatcctgtggacctgtactacctgatggacctctccctgtccatgaaggatgacttggacaatatccggagcctgggcaccaaactcgcggaggagatgaggaagctcaccagcaacttccggttgggatttgggtcttttgttgataaggacatctctcctttctcctacacggcaccgaggtaccagaccaatccgtgcattggttacaagttgtttccaaattgcgtcccctcctttgggttccgccatctgctgcctctcacagacagagtggacagcttcaatgaggaagttcggaaacagagggtgtcccggaaccgagatgcccctgaggggggctttgatgcagtactccaggcagccgtctgcaaggagaagattggctggcgaaaggatgcactgcatttgctggtgttcacaacagatgatgtgccccacatcgcattggatggaaaattgggaggcctggtgcagccacacgatggccagtgccacctgaacgaggccaacgagtacactgcatccaaccagatggactatccatcccttgccttgcttggagagaaattggcagagaacaacatcaacctcatctttgcagtgacaaaaaaccattatatgctgtacaagaattttacagccctgatacctggaacaacggtggagattttagatggagactccaaaaatattattcaactgattattaatgcatacaatagtatccggtctaaagtggagttgtcagtctgggatcagcctgaggatcttaatctcttctttactgctacctgccaagatggggtatcctatcctggtcagaggaagtgtgagggtctgaagattggggacacggcatcttttgaagtatcattggaggcccgaagctgtcccagcagacacacggagcatgtgtttgccctgcggccggtgggattccgggacagcctggaggtgggggtcacctacaactgcacgtgcggctgcagcgtggggctggaacccaacagcgccaggtgcaacgggagcgggacctatgtctgcggcctgtgtgagtgcagccccggctacctgggcaccaggtgcgagtgccaggatggggagaaccagagcgtgtaccagaacctgtgccgggaggcagagggcaagccactgtgcagcgggcgtggggactgcagctgcaaccagtgctcctgcttcgagagcgagtttggcaagatctatgggcctttctgtgagtgcgacaacttctcctgtgccaggaacaagggagtcctctgctcaggccatggcgagtgtcactgcggggaatgcaagtgccatgcaggttacatcggggacaactgtaactgctcgacagacatcagcacatgccggggcagagatggccagatctgcagcgagcgtgggcactgtctctgtgggcagtgccaatgcacggagccgggggcctttggggagatgtgtgagaagtgccccacctgcccggatgcatgcagcaccaagagagattgcgtcgagtgcctgctgctccactctgggaaacctgacaaccagacctgccacagcctatgcagggatgaggtgatcacatgggtggacaccatcgtgaaagatgaccaggaggctgtgctatgtttctacaaaaccgccaaggactgcgtcatgatgttcacctatgtggagctccccagtgggaagtccaacctgaccgtcctcagggagccagagtgtggaaacacccccaacgccatgaccatcctcctggctgtggtcggtagcatcctccttgttgggcttgcactcctggctatctggaagctgcttgtcaccatccacgaccggagggagtttgcaaagtttcagagcgagcgatccagggcccgctatgaaatggcttcaaatccattatacagaaagcctatctccacgcacactgtggacttcaccttcaacaagttcaacaaatcctacaatggcactgtggactgatgtttccttctccgaggggctggagcggggatctgatgaaaaggtcagactgaaacgccttgcacggctgctcggcttgatcacagctccctaggtaggcaccacagagaagaccttctagtgagcctgggccaggagcccacagtgcctgtacaggaaggtgcctggccatgtcacctggctgctaggccagagccatgccaggctgcgtccctccgagcttgggataaagcaaggggaccttggcgctctcagctttccctgccacatccagcttgttgtcccaatgaaatactgagatgctgggctgtctctcccttccaggaatgctgggcccccagcctggccagacaagaagactgtcaggaagggtcggagtctgtaaaaccagcatacagtttggcttttttcacattgatcatttttatatgaaataaaaagatcctgcatttatggtgtagttctgagtcctgagacttttctgcgtgatggctatgccttgcacacaggtgttggtgatggggctgttgagatgcctgttgaaggtacatcgtttgcaaatgtcagtttcctctcctgtccgtgtttgtttagtacttttataatgaaaagaaacaagattgtttgggattggaagtaaagattaaaaccaaaagaatttgtgtttgtctgatactctctgtgtgtttctttctttctgagcggacttaaaatggtgcccccagtggggattgaagcggccgtgtacttcctcagggatgggacacaggctggtctgatactccagactgcagcttgtcaagtaagcatgaggtgctcggggcagtgagggctgtgcaagggggaacactgagcagatacctttggccccttccagcttttactgacagagagttccaggctagacaccataaaaaccaccccttgttctgaggggctgaggctggaaatagattgtacagacaagcaagggttgagtggtggttcccacacgaagtcatctcttaatcatcattagcaatagcagttcccttccaaggcctcccctcactcccgaaacacttacgtcccatgcaggcccaatgcaaaaaaacacatttgagcttttttcccgcagggccatgaagtccccttaagttcccatatctaagatggttgactgaccctctccccttatgtacagaagaggaaactgattctcagagaggggaagtggcttgcccgagtgtttgttaggaggttactgaatgacaaactgttcctaagaccccatctcatgctggccagagggccagcctcctcattcctgcttgctcttagaaaatctttcactgatcattttttgtcactggaataacttcaaggttattatgctttcattccaaatggatctgtcctcagctctggacccaattccccttacttcattttggcaaacactaagtcaaatagtgaaatgcctgtcactacatagaacctattacctggggcaaatacgaacagattgagtttccttcatcttgtgtaaatatgatgaaacagagacctggtaacttggtgacactgttaaaccctttttgggataaagccaaatgtaaatgaaaacattaaacagataaattgtggtgttgagacttttctgaattgagaaaaataaatgtaattttggaagaaa

SEQ ID NO: 143331 - DNA, 1164 bp, Homo sapiens
  Payload ID: 8314
  Gene Symbol: ITGB5
  Gene Name: integrin, beta 5
  ENST ID: ENST00000465464
  CDS Start-End: 483-605
gggcgtctacgtcccatctcaggccgccggcagtgaggctttgggaggatgaggcggtaccggcacgacccccgtacctgctctccctctcgcagtctagcaaccgcctttggcccaagtaatctcggctcgcctaatacagcgtgccccgcccctttcccgtggcgacgggcggctaagcaacgggagcgggctctactcagtggtttcgagccccccacgccccaagtctcaacatatgcactagtggaagtgccacctcatgtgaagaatgtctgctaatccacccaaaatgtgcctggtgctccaaagaggacttcggaagcccacggtccatcacctctcggtgtgatctgagggcaaaccttgtcaaaaatggctgtggaggtgagatagagagcccagccagcagcttccatgtcctgaggagcctgcccctcagcagcaagggttcgggctctgcaggctgggacgtcattcagatgacaccacaggagattgccgtgaacctccggcccgagcagtggccgagggtaccagatggaggtttgaccagggatgctcagtgccttggaaatggattaacacagtgctgcatgtggtgacaagaccaccttccagctacaggttcgccaggtggaggactatcctgtggacctgtactacctgatggacctctccctgtccatgaaggatgacttggacaatatccggagcctgggcaccaaactcgcggaggagatgaggaagctcaccagcaacttccggttgggatttgggtcttttgttgataaggacatctctcctttctcctacacggcaccgaggtaccagaccaatccgtgcattggttacaagttgtttccaaattgcgtcccctcctttgggttccgccatctgctgcctctcacagacagagtggacagcttcaatgaggaagttcggaaacagagggtgtcccggaaccgagatgcccctgaggggggctttgatgcagtactccaggcagccgtctgcaaggagaagattggctggcgaaaggatgcactgcatttgctggtgttcacaacagatgatgtgccccacatcgcattggatggaaaattgggaggcctggtgcagccacacgatggccagtgccacctgaacgaggccaacgagtac

SEQ ID NO: 143332 - DNA, 789 bp, Homo sapiens
  Payload ID: 8314
  Gene Symbol: ITGB5
  Gene Name: integrin, beta 5
  ENST ID: ENST00000496703
  CDS Start-End: 1-789
ttacaagttgtttccaaattgcgtcccctcctttgggttccgccatctgctgcctctcacagacagagtggacagcttcaatgaggaagttcggaaacagagggtgtcccggaaccgagatgcccctgaggggggctttgatgcagtactccaggcagccgtctgcaaggagaagattggctggcgaaaggatgcactgcatttgctggtgttcacaacagatgatgtgccccacatcgcattggatggaaaattgggaggcctggtgcagccacacgatggccagtgccacctgaacgaggccaacgagtacactgcatccaaccagatggactatccatcccttgccttgcttggagagaaattggcagagaacaacatcaacctcatctttgcagtgacaaaaaaccattatatgctgtacaagagtatccggtctaaagtggagttgtcagtctgggatcagcctgaggatcttaatctcttctttactgctacctgccaagatggggtatcctatcctggtcagaggaagtgtgagggtctgaagattggggacacggcatcttttgaagtatcattggaggcccgaagctgtcccagcagacacacggagcatgtgtttgccctgcggccggtgggattccgggacagcctggaggtgggggtcacctacaactgcacgtgcggctgcagcgtggggctggaacccaacagcgccaggtgcaacgggagcgggacctatgtctgcggcctgtgtgagtgcagccccggctacctgggcaccag

SEQ ID NO: 143333 - DNA, 576 bp, Homo sapiens
  Payload ID: 8314
  Gene Symbol: ITGB5
  Gene Name: integrin, beta 5
  ENST ID: ENST00000483168
  CDS Start-End: 340-576
gtgccccgcccctttcccgtggcgacgggcggctaagcaacgggagcgggctctactcagtggtttcgagccccccacgccccaagtctcaacatatgcactagtggaagtgccacctcatgtgaagaatgtctgctaatccacccaaaatgtgcctggtgctccaaagaggacttcggaagcccacggtccatcacctctcggtgtgatctgagggcaaaccttgtcaaaaatggctgtggaggtgagatagagagcccagccagcagcttccatgtcctgaggagcctgcccctcagcagcaagggttcgggctctgcaggctgggacgtcattcagatgacaccacaggagattgccgtgaacctccggcccggtgacaagaccaccttccagctacaggttcgccaggtggaggactatcctgtggacctgtactacctgatggacctctccctgtccatgaaggatgacttggacaatatccggagcctgggcaccaaactcgcggaggagatgaggaagctcaccagcaacttccggttgggatttgggtcttttgttgataaggacatc

SEQ ID NO: 143334 - DNA, 1202 bp, Homo sapiens
  Payload ID: 8314
  Gene Symbol: ITGB5
  Gene Name: integrin, beta 5
  ENST ID: ENST00000481591
  CDS Start-End: 1-1202
gaaaggatgcactgcatttgctggtgttcacaacagatgatgtgccccacatcgcattggatggaaaattgggaggcctggtgcagccacacgatggccagtgccacctgaacgaggccaacgagtacactgcatccaaccagatggactatccatcccttgccttgcttggagagaaattggcagagaacaacatcaacctcatctttgcagtgacaaaaaaccattatatgctgtacaagaattttacagccctgatacctggaacaacggtggagattttagatggagactccaaaaatattattcaactgattattaatgcatacaatgcatcttttgaagtatcattggaggcccgaagctgtcccagcagacacacggagcatgtgtttgccctgcggccggtgggattccgggacagcctggaggtgggggtcacctacaactgcacgtgcggctgcagcgtggggctggaacccaacagcgccaggtgcaacgggagcgggacctatgtctgcggcctgtgtgagtgcagccccggctacctgggcaccaggtgcgagtgccaggatggggagaaccagagcgtgtaccagaacctgtgccgggaggcagagggcaagccactgtgcagcgggcgtggggactgcagctgcaaccagtgctcctgcttcgagagcgagtttggcaagatctatgggcctttctgtgagtgcgacaacttctcctgtgccaggaacaagggagtcctctgctcaggccatggcgagtgtcactgcggggaatgcaagtgccatgcaggttacatcggggacaactgtaactgctcgacagacatcagcacatgccggggcagagatggccagatctgcagcgagcgtgggcactgtctctgtgggcagtgccaatgcacggagccgggggcctttggggagatgtgtgagaagtgccccacctgcccggatgcatgcagcaccaagagagattgcgtcgagtgcctgctgctccactctgggaaacctgacaaccagacctgccacagcctatgcagggatgaggtgatcacatgggtggacaccatcgtgaaagatgaccaggaggctgtgctatgtttctacaaaaccgccaaggactgcgtcatgatgttcacctatgtggagctccccagtgggaagtccaacctgaccgtcctcagggag

SEQ ID NO: 143335 - DNA, 548 bp, Homo sapiens
  Payload ID: 8314
  Gene Symbol: ITGB5
  Gene Name: integrin, beta 5
  ENST ID: ENST00000608107
  CDS Start-End: 372-548
aaagggagtgagtctgacattacacataccagcacacagcctgtggttttggatcctggagtacctgtctggtacctggtacccggcacactgtgagttcctggacatcaagggctggtctcaacatatgcactagtggaagtgccacctcatgtgaagaatgtctgctaatccacccaaaatgtgcctggtgctccaaagaggacttcggaagcccacggtccatcacctctcggtgtgatctgagggcaaaccttgtcaaaaatggctgtggaggtgagatagagagcccagccagcagcttccatgtcctgaggagcctgcccctcagcagcaagggttcgggctctgcaggctgggacgtcattcagatgacaccacaggagattgccgtgaacctccggcccggtgacaagaccaccttccagctacaggttcgccaggtggaggactatcctgtggacctgtactacctgatggacctctccctgtccatgaaggatgacttggacaatatccggagcctgggcaccaaactcgcggaggag

SEQ ID NO: 143336 - DNA, 825 bp, Homo sapiens
  Payload ID: 8314
  Gene Symbol: ITGB5
  Gene Name: integrin, beta 5
  ENST ID: ENST00000608657
  CDS Start-End: 408-825
aactttcattttattatttctttttatcgagacagagtctcaccctgtcgcccaggctggagtgcagtggcgagatctcgactcactacaacctctgcctcctgggatcaagcgattctcctgcctcagcctcccgaatagctgggattacaggtctcaacatatgcactagtggaagtgccacctcatgtgaagaatgtctgctaatccacccaaaatgtgcctggtgctccaaagaggacttcggaagcccacggtccatcacctctcggtgtgatctgagggcaaaccttgtcaaaaatggctgtggaggtgagatagagagcccagccagcagcttccatgtcctgaggagcctgcccctcagcagcaagggttcgggctctgcaggctgggacgtcattcagatgacaccacaggagattgccgtgaacctccggcccggtgacaagaccaccttccagctacaggttcgccaggtggaggactatcctgtggacctgtactacctgatggacctctccctgtccatgaaggatgacttggacaatatccggagcctgggcaccaaactcgcggaggagatgaggaagctcaccagcaacttccggttgggatttgggtcttttgttgataaggacatctctcctttctcctacacggcaccgaggtaccagaccaatccgtgcattggttacaagttgtttccaaattgcgtcccctcctttgggttccgccatctgctgcctctcacagacagagtggacagcttcaatgaggaagttcggaaacagagggtgtcccggaaccgagatgcccctgagg

SEQ ID NO: 143337 - DNA, 971 bp, Homo sapiens
  Payload ID: 8314
  Gene Symbol: ITGB5
  Gene Name: integrin, beta 5
  ENST ID: ENST00000488466
  CDS Start-End: 1-971
atccggagcctgggcaccaaactcgcggaggagatgaggaagctcaccagcaacttccggttgggatttgggtcttttgttgataaggacatctctcctttctcctacacggcaccgaggtaccagaccaatccgtgcattggttacaagttgtttccaaattgcgtcccctcctttgggttccgccatctgctgcctctcacagacagagtggacagcttcaatgaggaagttcggaaacagagggtgtcccggaaccgagatgcccctgaggggggctttgatgcagtactccaggcagccgtctgcaagagtatccggtctaaagtggagttgtcagtctgggatcagcctgaggatcttaatctcttctttactgctacctgccaagatggggtatcctatcctggtcagaggaagtgtgagggtctgaagattggggacacggcatcttttgaagtatcattggaggcccgaagctgtcccagcagacacacggagcatgtgtttgccctgcggccggtgggattccgggacagcctggaggtgggggtcacctacaactgcacgtgcggctgcagcgtggggctggaacccaacagcgccaggtgcaacgggagcgggacctatgtctgcggcctgtgtgagtgcagccccggctacctgggcaccaggtgcgagtgccaggatggggagaaccagagcgtgtaccagaacctgtgccgggaggcagagggcaagccactgtgcagcgggcgtggggactgcagctgcaaccagtgctcctgcttcgagagcgagtttggcaagatctatgggcctttctgtgagtgcgacaacttctcctgtgccaggaacaagggagtcctctgctcaggccatggcgagtgtcactgcggggaatgcaagtgccatgcaggttacatcggggacaactgtaactgctcgacagacatcagcacatgccgggg

SEQ ID NO: 143338 - DNA, 4675 bp, Homo sapiens
  Payload ID: 8315
  Gene Symbol: ITGB6
  Gene Name: integrin, beta 6
  Uniprot ID: P18564
  ENST ID: ENST00000283249
  CDS Start-End: 239-2605
ttgaagttgcttttaaacacagcttttctgctttacctgtccaggtagcctctgttttcatttcagtcttaatgaaaactttctaacttatatctcaagtttcttttcaaagcagtgtaagtagtatttaaaatgttatacttcaagaaagaaagactttaacgatattcagcgttggtcttgtaacgctgaaggtaattcattttttaatcggtctgcacagcaagaactgaaacgaatggggattgaactgctttgcctgttctttctatttctaggaaggaatgatcacgtacaaggtggctgtgccctgggaggtgcagaaacctgtgaagactgcctgcttattggacctcagtgtgcctggtgtgctcaggagaattttactcatccatctggagttggcgaaaggtgtgataccccagcaaaccttttagctaaaggatgtcaattaaacttcatcgaaaaccctgtctcccaagtagaaatacttaaaaataagcctctcagtgtaggcagacagaaaaatagttctgacattgttcagattgcgcctcaaagcttgatccttaagttgagaccaggtggtgcgcagactctgcaggtgcatgtccgccagactgaggactacccggtggatttgtattacctcatggacctctccgcctccatggatgacgacctcaacacaataaaggagctgggctcccggctttccaaagagatgtctaaattaaccagcaactttagactgggcttcggatcttttgtggaaaaacctgtatccccttttgtgaaaacaacaccagaagaaattgccaacccttgcagtagtattccatacttctgtttacctacatttggattcaagcacattttgccattgacaaatgatgctgaaagattcaatgaaattgtgaagaatcagaaaatttctgctaatattgacacacccgaaggtggatttgatgcaattatgcaagctgctgtgtgtaaggaaaaaattggctggcggaatgactccctccacctcctggtctttgtgagtgatgctgattctcattttggaatggacagcaaactagcaggcatcgtcattcctaatgacgggctctgtcacttggacagcaagaatgaatactccatgtcaactgtcttggaatatccaacaattggacaactcattgataaactggtacaaaacaacgtgttattgatcttcgctgtaacccaagaacaagttcatttatatgagaattacgcaaaacttattcctggagctacagtaggtctacttcagaaggactccggaaacattctccagctgatcatctcagcttatgaagaactgcggtctgaggtggaactggaagtattaggagacactgaaggactcaacttgtcatttacagccatctgtaacaacggtaccctcttccaacaccaaaagaaatgctctcacatgaaagtgggagacacagcttccttcagcgtgactgtgaatatcccacactgcgagagaagaagcaggcacattatcataaagcctgtggggctgggggatgccctggaattacttgtcagcccagaatgcaactgcgactgtcagaaagaagtggaagtgaacagctccaaatgtcaccacgggaacggctctttccagtgtggggtgtgtgcctgccaccctggccacatggggcctcgctgtgagtgtggcgaggacatgctgagcacagattcctgcaaggaggccccagatcatccctcctgcagcggaaggggtgactgctactgtgggcagtgtatctgccacttgtctccctatggaaacatttatgggccttattgccagtgtgacaatttctcctgcgtgagacacaaagggctgctctgcggaggtaacggcgactgtgactgtggtgaatgtgtgtgcaggagcggctggactggcgagtactgcaactgcaccaccagcacggactcctgcgtctctgaagatggagtgctctgcagcgggcgcggggactgtgtttgtggcaagtgtgtttgcacaaaccctggagcctcaggaccaacctgtgaacgatgtcctacctgtggtgacccctgtaactctaaacggagctgcattgagtgccacctgtcagcagctggccaagcccgagaagaatgtgtggacaagtgcaaactagctggtgcgaccatcagtgaagaagaagatttctcaaaggatggttctgtttcctgctctctgcaaggagaaaatgaatgtcttattacattcctaataactacagataatgaggggaaaaccatcattcacagcatcaatgaaaaagattgtccgaagcctccaaacattcccatgatcatgttaggggtttccctggctattcttctcatcggggttgtcctactgtgcatctggaagctactggtgtcatttcatgatcgtaaagaagttgccaaatttgaagcagaacgatcaaaagccaagtggcaaacgggaaccaatccactctacagaggatccacaagtacttttaaaaatgtaacttataaacacagggaaaaacaaaaggtagacctttccacagattgctagaactactttatgcatgaaaaaagtctgtttcactgatatgaaatgttaatgcactatttaatttttttctctttgttgcttcaaaatgaggttggtttaagataataataggacatctgcagataagtcatcctctacatgaaggtgacagactgttggcagtttcaaaataatcaagaagagaaatatccttagcaaagagatgactttggggatcatttgaggaatactaactctgttgcattaatgcttcaaaaaatcatcaaatgattcatgggggcctgatttgcatttgaaaaatgtttgaaattagagtctcatttgtttcaggaatgcagctacctgagttttttgtctcggcaaagtcacaaagcccatatactcacattgtgtgtctatacttgccaattaattctaaacttgtaggaaatatgccctctcttaaaggagaattttttttaaatctctgagaaatgagattctgagtttatttcagctaaaaggttgcaattcttctgaagatatctcaaatataaggttgaaagttaagtgttaataatttttgtgaatttatacacacctaaacgttaagtacacaaatattttatttgttttacaaataaggaataagtaatttataaattaagaagttacctataaaaataaaaagataacaaccctatcatatagcttatttttaaattacctgaaaaacgatattctacactgtttcctttttgactctgagttttcaaactgttacttctcccatatttctcaatccatttcactcagttgcacagtcttttaaaccctgtaattgtcataccaaagtttctttttaaaaaaaaattactttaaatgcttagtttattcaaagagcgatccaataatataaaaggaacatgtgttaaacacaataaaattttaaatggctctaaatcaagcacatcaagagtatacaagtcttaaaggctttttaatacatactcttttcccatctatgtaacccaacttgcacatttcagctgcatgtggtgaatatgcatcatatatttactttaagaggtaagattttacttgcaaaatacatgtgcaaattagggatccatcagttgatggaagagatggactctagaatattatttcttgtggttattactcctttacaaagcactttcgtctcacttgatcctcataaggaaactaaggctcagaatgagtagagctgggttcagaatctagctcttctaactccaagccatctcctctttccactgcaggaaactgcctcttttgtcagtgaaataatagaaagattgtgttagttaagtgataactgtcatttgtttgaaaatgttcgagactgaacaaatagcatttaaactgctggcatatagatgagatattgtacttttgtgcaatgtttattacctttgattaaattgtaatgtgaagcttttactaggtgaatagttcattatgtagtggaggcttcgtggttgtccattgaattgtcacagcaaaatctataagtttcttcaattctacaagatagatccatatacctttgatcacttggagactctttttttgctggtttctagataactcaggtaaatcagacctttacagagtacagggctaggtgaaagaattactgaaaaatcaccttgaaaatccgaagggctgatataccctttatgttcctgactgatgcgcagaacctgggggaaatctacagcaatatacaggttgcaatgctgataacacaacagcaatcctctcctctacgtggacttactgttgtttttttaattattattggaatgggattttagaaaatagaagttacctttgtgtgtgttttagggaaggtagagaagaatctgctctttctctgaatactgttttgaccccaggcaggaccttggaaaggccaaaacattaacagtagtacttctgttcactgaagagttatgttacatgaagataaaatggttttgtcgtgtttattattgtattttgtgttgatataaataaacatggtaatttaaacaatgaacctta

SEQ ID NO: 143339 - DNA, 2501 bp, Homo sapiens
  Payload ID: 8315
  Gene Symbol: ITGB6
  Gene Name: integrin, beta 6
  Uniprot ID: P18564
  ENST ID: ENST00000409872
  CDS Start-End: 135-2501
atgttgaagttgcttttaaacacagcttttctgctttacctgtccaggtagcctctgttttcatttcagtcttaatgaaaactttctaacttatatctcaagtttcttttcaaagcagtcaagaactgaaacgaatggggattgaactgctttgcctgttctttctatttctaggaaggaatgatcacgtacaaggtggctgtgccctgggaggtgcagaaacctgtgaagactgcctgcttattggacctcagtgtgcctggtgtgctcaggagaattttactcatccatctggagttggcgaaaggtgtgataccccagcaaaccttttagctaaaggatgtcaattaaacttcatcgaaaaccctgtctcccaagtagaaatacttaaaaataagcctctcagtgtaggcagacagaaaaatagttctgacattgttcagattgcgcctcaaagcttgatccttaagttgagaccaggtggtgcgcagactctgcaggtgcatgtccgccagactgaggactacccggtggatttgtattacctcatggacctctccgcctccatggatgacgacctcaacacaataaaggagctgggctcccggctttccaaagagatgtctaaattaaccagcaactttagactgggcttcggatcttttgtggaaaaacctgtatccccttttgtgaaaacaacaccagaagaaattgccaacccttgcagtagtattccatacttctgtttacctacatttggattcaagcacattttgccattgacaaatgatgctgaaagattcaatgaaattgtgaagaatcagaaaatttctgctaatattgacacacccgaaggtggatttgatgcaattatgcaagctgctgtgtgtaaggaaaaaattggctggcggaatgactccctccacctcctggtctttgtgagtgatgctgattctcattttggaatggacagcaaactagcaggcatcgtcattcctaatgacgggctctgtcacttggacagcaagaatgaatactccatgtcaactgtcttggaatatccaacaattggacaactcattgataaactggtacaaaacaacgtgttattgatcttcgctgtaacccaagaacaagttcatttatatgagaattacgcaaaacttattcctggagctacagtaggtctacttcagaaggactccggaaacattctccagctgatcatctcagcttatgaagaactgcggtctgaggtggaactggaagtattaggagacactgaaggactcaacttgtcatttacagccatctgtaacaacggtaccctcttccaacaccaaaagaaatgctctcacatgaaagtgggagacacagcttccttcagcgtgactgtgaatatcccacactgcgagagaagaagcaggcacattatcataaagcctgtggggctgggggatgccctggaattacttgtcagcccagaatgcaactgcgactgtcagaaagaagtggaagtgaacagctccaaatgtcaccacgggaacggctctttccagtgtggggtgtgtgcctgccaccctggccacatggggcctcgctgtgagtgtggcgaggacatgctgagcacagattcctgcaaggaggccccagatcatccctcctgcagcggaaggggtgactgctactgtgggcagtgtatctgccacttgtctccctatggaaacatttatgggccttattgccagtgtgacaatttctcctgcgtgagacacaaagggctgctctgcggaggtaacggcgactgtgactgtggtgaatgtgtgtgcaggagcggctggactggcgagtactgcaactgcaccaccagcacggactcctgcgtctctgaagatggagtgctctgcagcgggcgcggggactgtgtttgtggcaagtgtgtttgcacaaaccctggagcctcaggaccaacctgtgaacgatgtcctacctgtggtgacccctgtaactctaaacggagctgcattgagtgccacctgtcagcagctggccaagcccgagaagaatgtgtggacaagtgcaaactagctggtgcgaccatcagtgaagaagaagatttctcaaaggatggttctgtttcctgctctctgcaaggagaaaatgaatgtcttattacattcctaataactacagataatgaggggaaaaccatcattcacagcatcaatgaaaaagattgtccgaagcctccaaacattcccatgatcatgttaggggtttccctggctattcttctcatcggggttgtcctactgtgcatctggaagctactggtgtcatttcatgatcgtaaagaagttgccaaatttgaagcagaacgatcaaaagccaagtggcaaacgggaaccaatccactctacagaggatccacaagtacttttaaaaatgtaacttataaacacagggaaaaacaaaaggtagacctttccacagattgctag

SEQ ID NO: 143340 - DNA, 4500 bp, Homo sapiens
  Payload ID: 8315
  Gene Symbol: ITGB6
  Gene Name: integrin, beta 6
  ENST ID: ENST00000409583
  CDS Start-End: 242-454
atgttgaagttgcttttaaacacagcttttctgctttacctgtccaggtagcctctgttttcatttcagtcttaatgaaaactttctaacttatatctcaagtttcttttcaaagcagtgtaagtagtatttaaaatgttatacttcaagaaagaaagactttaacgatattcagcgttggtcttgtaacgctgaaggtaattcattttttaatcggtctgcacagcaagaactgaaacgaatggggattgaactgctttgcctgttctttctatttctaggaaggaatgatcacgtacaaggtggctgtgccctgggaggtgcagaaacctgtgaagactgcctgcttattggacctcagtgtgcctggtgtgctcaggagaattttactcatccatctggagttggcgaaaggtggtgcgcagactctgcaggtgcatgtccgccagactgaggactacccggtggatttgtattacctcatggacctctccgcctccatggatgacgacctcaacacaataaaggagctgggctcccggctttccaaagagatgtctaaattaaccagcaactttagactgggcttcggatcttttgtggaaaaacctgtatccccttttgtgaaaacaacaccagaagaaattgccaacccttgcagtagtattccatacttctgtttacctacatttggattcaagcacattttgccattgacaaatgatgctgaaagattcaatgaaattgtgaagaatcagaaaatttctgctaatattgacacacccgaaggtggatttgatgcaattatgcaagctgctgtgtgtaaggaaaaaattggctggcggaatgactccctccacctcctggtctttgtgagtgatgctgattctcattttggaatggacagcaaactagcaggcatcgtcattcctaatgacgggctctgtcacttggacagcaagaatgaatactccatgtcaactgtcttggaatatccaacaattggacaactcattgataaactggtacaaaacaacgtgttattgatcttcgctgtaacccaagaacaagttcatttatatgagaattacgcaaaacttattcctggagctacagtaggtctacttcagaaggactccggaaacattctccagctgatcatctcagcttatgaagaactgcggtctgaggtggaactggaagtattaggagacactgaaggactcaacttgtcatttacagccatctgtaacaacggtaccctcttccaacaccaaaagaaatgctctcacatgaaagtgggagacacagcttccttcagcgtgactgtgaatatcccacactgcgagagaagaagcaggcacattatcataaagcctgtggggctgggggatgccctggaattacttgtcagcccagaatgcaactgcgactgtcagaaagaagtggaagtgaacagctccaaatgtcaccacgggaacggctctttccagtgtggggtgtgtgcctgccaccctggccacatggggcctcgctgtgagtgtggcgaggacatgctgagcacagattcctgcaaggaggccccagatcatccctcctgcagcggaaggggtgactgctactgtgggcagtgtatctgccacttgtctccctatggaaacatttatgggccttattgccagtgtgacaatttctcctgcgtgagacacaaagggctgctctgcggaggtaacggcgactgtgactgtggtgaatgtgtgtgcaggagcggctggactggcgagtactgcaactgcaccaccagcacggactcctgcgtctctgaagatggagtgctctgcagcgggcgcggggactgtgtttgtggcaagtgtgtttgcacaaaccctggagcctcaggaccaacctgtgaacgatgtcctacctgtggtgacccctgtaactctaaacggagctgcattgagtgccacctgtcagcagctggccaagcccgagaagaatgtgtggacaagtgcaaactagctggtgcgaccatcagtgaagaagaagatttctcaaaggatggttctgtttcctgctctctgcaaggagaaaatgaatgtcttattacattcctaataactacagataatgaggggaaaaccatcattcacagcatcaatgaaaaagattgtccgaagcctccaaacattcccatgatcatgttaggggtttccctggctattcttctcatcggggttgtcctactgtgcatctggaagctactggtgtcatttcatgatcgtaaagaagttgccaaatttgaagcagaacgatcaaaagccaagtggcaaacgggaaccaatccactctacagaggatccacaagtacttttaaaaatgtaacttataaacacagggaaaaacaaaaggtagacctttccacagattgctagaactactttatgcatgaaaaaagtctgtttcactgatatgaaatgttaatgcactatttaatttttttctctttgttgcttcaaaatgaggttggtttaagataataataggacatctgcagataagtcatcctctacatgaaggtgacagactgttggcagtttcaaaataatcaagaagagaaatatccttagcaaagagatgactttggggatcatttgaggaatactaactctgttgcattaatgcttcaaaaaatcatcaaatgattcatgggggcctgatttgcatttgaaaaatgtttgaaattagagtctcatttgtttcaggaatgcagctacctgagttttttgtctcggcaaagtcacaaagcccatatactcacattgtgtgtctatacttgccaattaattctaaacttgtaggaaatatgccctctcttaaaggagaattttttttaaatctctgagaaatgagattctgagtttatttcagctaaaaggttgcaattcttctgaagatatctcaaatataaggttgaaagttaagtgttaataatttttgtgaatttatacacacctaaacgttaagtacacaaatattttatttgttttacaaataaggaataagtaatttataaattaagaagttacctataaaaataaaaagataacaaccctatcatatagcttatttttaaattacctgaaaaacgatattctacactgtttcctttttgactctgagttttcaaactgttacttctcccatatttctcaatccatttcactcagttgcacagtcttttaaaccctgtaattgtcataccaaagtttctttttaaaaaaaaattactttaaatgcttagtttattcaaagagcgatccaataatataaaaggaacatgtgttaaacacaataaaattttaaatggctctaaatcaagcacatcaagagtatacaagtcttaaaggctttttaatacatactcttttcccatctatgtaacccaacttgcacatttcagctgcatgtggtgaatatgcatcatatatttactttaagaggtaagattttacttgcaaaatacatgtgcaaattagggatccatcagttgatggaagagatggactctagaatattatttcttgtggttattactcctttacaaagcactttcgtctcacttgatcctcataaggaaactaaggctcagaatgagtagagctgggttcagaatctagctcttctaactccaagccatctcctctttccactgcaggaaactgcctcttttgtcagtgaaataatagaaagattgtgttagttaagtgataactgtcatttgtttgaaaatgttcgagactgaacaaatagcatttaaactgctggcatatagatgagatattgtacttttgtgcaatgtttattacctttgattaaattgtaatgtgaagcttttactaggtgaatagttcattatgtagtggaggcttcgtggttgtccattgaattgtcacagcaaaatctataagtttcttcaattctacaagatagatccatatacctttgatcacttggagactctttttttgctggtttctagataactcaggtaaatcagacctttacagagtacagggctaggtgaaagaattactgaaaaatcaccttgaaaatccgaagggctgatataccctttatgttcctgactgatgcgcagaacctgggggaaatctacagcaatatacaggttgcaatgctgataacacaacagcaatcctctcctctacgtggacttactgttgtttttttaattattattggaatgggattttagaaaatagaagttacctttgtgtgtgttttagggaaggtagagaagaatctgctctttctctgaatactgttttgaccccaggcaggaccttggaaaggccaaaacattaacagtagtacttctgttcactgaagagttatgttacatgaagataaaatggttttgtcgtgtttattattgtattttgtgttgatataaataaacatggtaatttaaacaatgaa

SEQ ID NO: 143341 - DNA, 2292 bp, Homo sapiens
  Payload ID: 8315
  Gene Symbol: ITGB6
  Gene Name: integrin, beta 6
  Uniprot ID: P18564
  ENST ID: ENST00000409967
  CDS Start-End: 196-2241
ggtagcctctgttttcatttcagtcttaatgaaaactttctaacttatatctcaagtttcttttcaaagcagtgtaagtagtatttaaaatgttatacttcaagaaagaaagactttaacgatattcagcgttggtcttgtaacgctgaaggtaattcattttttaatcggtctgcacagcaagaactgaaacgaatggggattgaactgctttgcctgttctttctatttctaggaaggaatgatcacgtacaaggtggctgtgccctgggaggtgcagaaacctgtgaagactgcctgcttattggacctcagtgtgcctggtgtgctcaggagaattttactcatccatctggagttggcgaaaggtgtgataccccagcaaaccttttagctaaaggatgtcaattaaacttcatcgaaaaccctgtctcccaagtagaaatacttaaaaataagcctctcagtgtaggcagacagaaaaatagttctgacattgttcagattgcgcctcaaagcttgatccttaagttgagaccaggtggtgcgcagactctgcaggtgcatgtccgccagactgaggactacccggtggatttgtattacctcatggacctctccgcctccatggatgacgacctcaacacaataaaggagctgggctcccggctttccaaagagatgtctaaattaaccagcaactttagactgggcttcggatcttttgtggaaaaacctgtatccccttttgtgaaaacaacaccagaagaaattgccaacccttgcagtagtattccatacttctgtttacctacatttggattcaagcacattttgccattgacaaatgatgctgaaagattcaatgaaattgtgaagaatcagaaaatttctgctaatattgacacacccgaaggtggatttgatgcaattatgcaagctgctgtgtgtaaggaaaaaattggctggcggaatgactccctccacctcctggtctttgtgagtgatgctgattctcattttggaatggacagcaaactagcaggcatcgtcattcctaatgacgggctctgtcacttggacagcaagaatgaatactccatgtcaactgtcttggaatatccaacaattggacaactcattgataaactggtacaaaacaacgtgttattgatcttcgctgtaacccaagaacaagttcatttatatgagaattacgcaaaacttattcctggagctacagtaggtctacttcagaaggactccggaaacattctccagctgatcatctcagcttatgaagaactgcggtctgaggtggaactggaagtattaggagacactgaaggactcaacttgtcatttacagccatctgtaacaacggtaccctcttccaacaccaaaagaaatgctctcacatgaaagtgggagacacagcttccttcagcgtgactgtgaatatcccacactgcgagagaagaagcaggcacattatcataaagcctgtggggctgggggatgccctggaattacttgtcagcccagaatgcaactgcgactgtcagaaagaagtggaagtgaacagctccaaatgtcaccacgggaacggctctttccagtgtggggtgtgtgcctgccaccctggccacatggggcctcgctgtgagtgtggcgaggacatgctgagcacagattcctgcaaggaggccccagatcatccctcctgcagcggaaggggtgactgctactgtgggcagtgtatctgccacttgtctccctatggaaacatttatgggccttattgccagtgtgacaatttctcctgcgtgagacacaaagggctgctctgcggagatttctcaaaggatggttctgtttcctgctctctgcaaggagaaaatgaatgtcttattacattcctaataactacagataatgaggggaaaaccatcattcacagcatcaatgaaaaagattgtccgaagcctccaaacattcccatgatcatgttaggggtttccctggctattcttctcatcggggttgtcctactgtgcatctggaagctactggtgtcatttcatgatcgtaaagaagttgccaaatttgaagcagaacgatcaaaagccaagtggcaaacgggaaccaatccactctacagaggatccacaagtacttttaaaaatgtaacttataaacacagggaaaaacaaaaggtagacctttccacagattgctagaactactttatgcatgaaaaaagtctgtttcactgatatgaaatgttaatg

SEQ ID NO: 143342 - DNA, 2576 bp, Homo sapiens
  Payload ID: 8315
  Gene Symbol: ITGB6
  Gene Name: integrin, beta 6
  ENST ID: ENST00000428609
  CDS Start-End: 236-2476
ctctgttttcatttcagtcttaatgaaaactttctaacttatatctcaagtttcttttcaaagcagtgtaagtagtatttaaaatgttatacttcaagaaagaaagactttaacgatattcagcgttggtcttgtaacgctgaaggtaattcattttttaatcggtctgcacagcaagaactgaaacgaatggggattgaactgctttgcctgttctttctatttctaggaaggaatgatcacgtacaagaattttactcatccatctggagttggcgaaaggtgtgataccccagcaaaccttttagctaaaggatgtcaattaaacttcatcgaaaaccctgtctcccaagtagaaatacttaaaaataagcctctcagtgtaggcagacagaaaaatagttctgacattgttcagattgcgcctcaaagcttgatccttaagttgagaccaggtggtgcgcagactctgcaggtgcatgtccgccagactgaggactacccggtggatttgtattacctcatggacctctccgcctccatggatgacgacctcaacacaataaaggagctgggctcccggctttccaaagagatgtctaaattaaccagcaactttagactgggcttcggatcttttgtggaaaaacctgtatccccttttgtgaaaacaacaccagaagaaattgccaacccttgcagtagtattccatacttctgtttacctacatttggattcaagcacattttgccattgacaaatgatgctgaaagattcaatgaaattgtgaagaatcagaaaatttctgctaatattgacacacccgaaggtggatttgatgcaattatgcaagctgctgtgtgtaaggaaaaaattggctggcggaatgactccctccacctcctggtctttgtgagtgatgctgattctcattttggaatggacagcaaactagcaggcatcgtcattcctaatgacgggctctgtcacttggacagcaagaatgaatactccatgtcaactgtcttggaatatccaacaattggacaactcattgataaactggtacaaaacaacgtgttattgatcttcgctgtaacccaagaacaagttcatttatatgagaattacgcaaaacttattcctggagctacagtaggtctacttcagaaggactccggaaacattctccagctgatcatctcagcttatgaagaactgcggtctgaggtggaactggaagtattaggagacactgaaggactcaacttgtcatttacagccatctgtaacaacggtaccctcttccaacaccaaaagaaatgctctcacatgaaagtgggagacacagcttccttcagcgtgactgtgaatatcccacactgcgagagaagaagcaggcacattatcataaagcctgtggggctgggggatgccctggaattacttgtcagcccagaatgcaactgcgactgtcagaaagaagtggaagtgaacagctccaaatgtcaccacgggaacggctctttccagtgtggggtgtgtgcctgccaccctggccacatggggcctcgctgtgagtgtggcgaggacatgctgagcacagattcctgcaaggaggccccagatcatccctcctgcagcggaaggggtgactgctactgtgggcagtgtatctgccacttgtctccctatggaaacatttatgggccttattgccagtgtgacaatttctcctgcgtgagacacaaagggctgctctgcggaggtaacggcgactgtgactgtggtgaatgtgtgtgcaggagcggctggactggcgagtactgcaactgcaccaccagcacggactcctgcgtctctgaagatggagtgctctgcagcgggcgcggggactgtgtttgtggcaagtgtgtttgcacaaaccctggagcctcaggaccaacctgtgaacgatgtcctacctgtggtgacccctgtaactctaaacggagctgcattgagtgccacctgtcagcagctggccaagcccgagaagaatgtgtggacaagtgcaaactagctggtgcgaccatcagtgaagaagaagatttctcaaaggatggttctgtttcctgctctctgcaaggagaaaatgaatgtcttattacattcctaataactacagataatgaggggaaaaccatcattcacagcatcaatgaaaaagattgtccgaagcctccaaacattcccatgatcatgttaggggtttccctggctattcttctcatcggggttgtcctactgtgcatctggaagctactggtgtcatttcatgatcgtaaagaagttgccaaatttgaagcagaacgatcaaaagccaagtggcaaacgggaaccaatccactctacagaggatccacaagtacttttaaaaatgtaacttataaacacagggaaaaacaaaaggtagacctttccacagattgctagaactactttatgcatgaaaaaagtctgtttcactgatatgaaatgttaatgcactatttaatttttttctctttgttgcttcaaaatgaggttggtttaa

SEQ ID NO: 143343 - DNA, 4401 bp, Homo sapiens
  Payload ID: 8315
  Gene Symbol: ITGB6
  Gene Name: integrin, beta 6
  ENST ID: ENST00000620391
  CDS Start-End: 251-2332
aagtaaatcatgttgaagttgcttttaaacacagcttttctgctttacctgtccaggtagcctctgttttcatttcagtcttaatgaaaactttctaacttatatctcaagtttcttttcaaagcagtgtaagtagtatttaaaatgttatacttcaagaaagaaagactttaacgatattcagcgttggtcttgtaacgctgaaggtaattcattttttaatcggtctgcacagcaagaactgaaacgaatggggattgaactgctttgcctgttctttctatttctaggaaggaatgatcacgtacaaggtggtgcgcagactctgcaggtgcatgtccgccagactgaggactacccggtggatttgtattacctcatggacctctccgcctccatggatgacgacctcaacacaataaaggagctgggctcccggctttccaaagagatgtctaaattaaccagcaactttagactgggcttcggatcttttgtggaaaaacctgtatccccttttgtgaaaacaacaccagaagaaattgccaacccttgcagtagtattccatacttctgtttacctacatttggattcaagcacattttgccattgacaaatgatgctgaaagattcaatgaaattgtgaagaatcagaaaatttctgctaatattgacacacccgaaggtggatttgatgcaattatgcaagctgctgtgtgtaaggaaaaaattggctggcggaatgactccctccacctcctggtctttgtgagtgatgctgattctcattttggaatggacagcaaactagcaggcatcgtcattcctaatgacgggctctgtcacttggacagcaagaatgaatactccatgtcaactgtcttggaatatccaacaattggacaactcattgataaactggtacaaaacaacgtgttattgatcttcgctgtaacccaagaacaagttcatttatatgagaattacgcaaaacttattcctggagctacagtaggtctacttcagaaggactccggaaacattctccagctgatcatctcagcttatgaagaactgcggtctgaggtggaactggaagtattaggagacactgaaggactcaacttgtcatttacagccatctgtaacaacggtaccctcttccaacaccaaaagaaatgctctcacatgaaagtgggagacacagcttccttcagcgtgactgtgaatatcccacactgcgagagaagaagcaggcacattatcataaagcctgtggggctgggggatgccctggaattacttgtcagcccagaatgcaactgcgactgtcagaaagaagtggaagtgaacagctccaaatgtcaccacgggaacggctctttccagtgtggggtgtgtgcctgccaccctggccacatggggcctcgctgtgagtgtggcgaggacatgctgagcacagattcctgcaaggaggccccagatcatccctcctgcagcggaaggggtgactgctactgtgggcagtgtatctgccacttgtctccctatggaaacatttatgggccttattgccagtgtgacaatttctcctgcgtgagacacaaagggctgctctgcggaggtaacggcgactgtgactgtggtgaatgtgtgtgcaggagcggctggactggcgagtactgcaactgcaccaccagcacggactcctgcgtctctgaagatggagtgctctgcagcgggcgcggggactgtgtttgtggcaagtgtgtttgcacaaaccctggagcctcaggaccaacctgtgaacgatgtcctacctgtggtgacccctgtaactctaaacggagctgcattgagtgccacctgtcagcagctggccaagcccgagaagaatgtgtggacaagtgcaaactagctggtgcgaccatcagtgaagaagaagatttctcaaaggatggttctgtttcctgctctctgcaaggagaaaatgaatgtcttattacattcctaataactacagataatgaggggaaaaccatcattcacagcatcaatgaaaaagattgtccgaagcctccaaacattcccatgatcatgttaggggtttccctggctattcttctcatcggggttgtcctactgtgcatctggaagctactggtgtcatttcatgatcgtaaagaagttgccaaatttgaagcagaacgatcaaaagccaagtggcaaacgggaaccaatccactctacagaggatccacaagtacttttaaaaatgtaacttataaacacagggaaaaacaaaaggtagacctttccacagattgctagaactactttatgcatgaaaaaagtctgtttcactgatatgaaatgttaatgcactatttaatttttttctctttgttgcttcaaaatgaggttggtttaagataataataggacatctgcagataagtcatcctctacatgaaggtgacagactgttggcagtttcaaaataatcaagaagagaaatatccttagcaaagagatgactttggggatcatttgaggaatactaactctgttgcattaatgcttcaaaaaatcatcaaatgattcatgggggcctgatttgcatttgaaaaatgtttgaaattagagtctcatttgtttcaggaatgcagctacctgagttttttgtctcggcaaagtcacaaagcccatatactcacattgtgtgtctatacttgccaattaattctaaacttgtaggaaatatgccctctcttaaaggagaattttttttaaatctctgagaaatgagattctgagtttatttcagctaaaaggttgcaattcttctgaagatatctcaaatataaggttgaaagttaagtgttaataatttttgtgaatttatacacacctaaacgttaagtacacaaatattttatttgttttacaaataaggaataagtaatttataaattaagaagttacctataaaaataaaaagataacaaccctatcatatagcttatttttaaattacctgaaaaacgatattctacactgtttcctttttgactctgagttttcaaactgttacttctcccatatttctcaatccatttcactcagttgcacagtcttttaaaccctgtaattgtcataccaaagtttctttttaaaaaaaaattactttaaatgcttagtttattcaaagagcgatccaataatataaaaggaacatgtgttaaacacaataaaattttaaatggctctaaatcaagcacatcaagagtatacaagtcttaaaggctttttaatacatactcttttcccatctatgtaacccaacttgcacatttcagctgcatgtggtgaatatgcatcatatatttactttaagaggtaagattttacttgcaaaatacatgtgcaaattagggatccatcagttgatggaagagatggactctagaatattatttcttgtggttattactcctttacaaagcactttcgtctcacttgatcctcataaggaaactaaggctcagaatgagtagagctgggttcagaatctagctcttctaactccaagccatctcctctttccactgcaggaaactgcctcttttgtcagtgaaataatagaaagattgtgttagttaagtgataactgtcatttgtttgaaaatgttcgagactgaacaaatagcatttaaactgctggcatatagatgagatattgtacttttgtgcaatgtttattacctttgattaaattgtaatgtgaagcttttactaggtgaatagttcattatgtagtggaggcttcgtggttgtccattgaattgtcacagcaaaatctataagtttcttcaattctacaagatagatccatatacctttgatcacttggagactctttttttgctggtttctagataactcaggtaaatcagacctttacagagtacagggctaggtgaaagaattactgaaaaatcaccttgaaaatccgaagggctgatataccctttatgttcctgactgatgcgcagaacctgggggaaatctacagcaatatacaggttgcaatgctgataacacaacagcaatcctctcctctacgtggacttactgttgtttttttaattattattggaatgggattttagaaaatagaagttacctttgtgtgtgttttagggaaggtagagaagaatctgctctttctctgaatactgttttgaccccaggcaggaccttggaaaggccaaaacattaacagtagtacttctgttcactgaagagttatgttacatgaagataaaatggttttgtcgtgtttattattgtattttgtgttgatataaataaacatggtaatttaaacaatgaacctt

SEQ ID NO: 143344 - DNA, 2867 bp, Homo sapiens
  Payload ID: 8316
  Gene Symbol: ITGB7
  Gene Name: integrin, beta 7
  Uniprot ID: P26010
  ENST ID: ENST00000267082
  CDS Start-End: 233-2629
aaatcttccccaccctggggagtgtcacttcctcctctgccgtctcccagatcagtacacaaaggctgctgctgccgccagaggaaggactgctctgcacgcacctatgtggaaactaaagcccagagagaaagtctgacttgccccacagccagtgagtgactgcagcagcaccagaatctggtctgtttcctgtttggctcttctaccactacggcttgggatctcgggcatggtggctttgccaatggtccttgttttgctgctggtcctgagcagaggtgagagtgaattggacgccaagatcccatccacaggggatgccacagaatggcggaatcctcacctgtccatgctggggtcctgccagccagccccctcctgccagaagtgcatcctctcacaccccagctgtgcatggtgcaagcaactgaacttcaccgcgtcgggagaggcggaggcgcggcgctgcgcccgacgagaggagctgctggctcgaggctgcccgctggaggagctggaggagccccgcggccagcaggaggtgctgcaggaccagccgctcagccagggcgcccgcggagagggtgccacccagctggcgccgcagcgggtccgggtcacgctgcggcctggggagccccagcagctccaggtccgcttccttcgtgctgagggatacccggtggacctgtactaccttatggacctgagctactccatgaaggacgacctggaacgcgtgcgccagctcgggcacgctctgctggtccggctgcaggaagtcacccattctgtgcgcattggttttggttcctttgtggacaaaacggtgctgccctttgtgagcacagtaccctccaaactgcgccacccctgccccacccggctggagcgctgccagtcaccattcagctttcaccatgtgctgtccctgacgggggacgcacaagccttcgagcgggaggtggggcgccagagtgtgtccggcaatctggactcgcctgaaggtggcttcgatgccattctgcaggctgcactctgccaggagcagattggctggagaaatgtgtcccggctgctggtgttcacttcagacgacacattccatacagctggggacgggaagttgggcggcattttcatgcccagtgatgggcactgccacttggacagcaatggcctctacagtcgcagcacagagtttgactacccttctgtgggtcaggtagcccaggccctctctgcagcaaatatccagcccatctttgctgtcaccagtgccgcactgcctgtctaccaggagctgagtaaactgattcctaagtctgcagttggggagctgagtgaggactccagcaacgtggtacagctcatcatggatgcttataatagcctgtcttccaccgtgacccttgaacactcttcactccctcctggggtccacatttcttacgaatcccagtgtgagggtcctgagaagagggagggtaaggctgaggatcgaggacagtgcaaccacgtccgaatcaaccagacggtgactttctgggtttctctccaagccacccactgcctcccagagccccatctcctgaggctccgggcccttggcttctcagaggagctgattgtggagttgcacacgctgtgtgactgtaattgcagtgacacccagccccaggctccccactgcagtgatggccagggacacctacaatgtggtgtatgcagctgtgcccctggccgcctaggtcggctctgtgagtgctctgtggcagagctgtcctccccagacctggaatctgggtgccgggctcccaatggcacagggcccctgtgcagtggaaagggtcactgtcaatgtggacgctgcagctgcagtggacagagctctgggcatctgtgcgagtgtgacgatgccagctgtgagcgacatgagggcatcctctgcggaggctttggtcgctgccaatgtggagtatgtcactgtcatgccaaccgcacgggcagagcatgcgaatgcagtggggacatggacagttgcatcagtcccgagggagggctctgcagtgggcatggacgctgcaaatgcaaccgctgccagtgcttggacggctactatggtgctctatgcgaccaatgcccaggctgcaagacaccatgcgagagacaccgggactgtgcagagtgtggggccttcaggactggcccactggccaccaactgcagtacagcttgtgcccataccaatgtgaccctggccttggcccctatcttggatgatggctggtgcaaagagcggaccctggacaaccagctgttcttcttcttggtggaggatgacgccagaggcacggtcgtgctcagagtgagaccccaagaaaagggagcagaccacacgcaggccattgtgctgggctgcgtagggggcatcgtggcagtggggctggggctggtcctggcttaccggctctcggtggaaatctatgaccgccgggaatacagtcgctttgagaaggagcagcaacaactcaactggaagcaggacagtaatcctctctacaaaagtgccatcacgaccaccatcaatcctcgctttcaagaggcagacagtcccactctctgaaggagggagggacacttacccaaggctcttctccttggaggacagtgggaactggagggtgagaggaagggtgggtctgtaagaccttggtaggggactaattcactggcgaggtgcggccaccaccctacttcattttcagagtgacacccaagagggctgcttcccatgcctgcaaccttgcatccatctgggctaccccacccaagtatacaataaagtcttacctcagaccaca

SEQ ID NO: 143345 - DNA, 2791 bp, Homo sapiens
  Payload ID: 8316
  Gene Symbol: ITGB7
  Gene Name: integrin, beta 7
  Uniprot ID: P26010
  ENST ID: ENST00000422257
  CDS Start-End: 162-2558
cacttcctcctctgccgtctcccagatcagtacacaaaggctgctgctgccgccagaggaaggactgctctgcacgcacctatgtggaaactaaagcccagagagaaagtctgacttgccccacagccagtgagtgactgcagcagcaccagaatctgggcatggtggctttgccaatggtccttgttttgctgctggtcctgagcagaggtgagagtgaattggacgccaagatcccatccacaggggatgccacagaatggcggaatcctcacctgtccatgctggggtcctgccagccagccccctcctgccagaagtgcatcctctcacaccccagctgtgcatggtgcaagcaactgaacttcaccgcgtcgggagaggcggaggcgcggcgctgcgcccgacgagaggagctgctggctcgaggctgcccgctggaggagctggaggagccccgcggccagcaggaggtgctgcaggaccagccgctcagccagggcgcccgcggagagggtgccacccagctggcgccgcagcgggtccgggtcacgctgcggcctggggagccccagcagctccaggtccgcttccttcgtgctgagggatacccggtggacctgtactaccttatggacctgagctactccatgaaggacgacctggaacgcgtgcgccagctcgggcacgctctgctggtccggctgcaggaagtcacccattctgtgcgcattggttttggttcctttgtggacaaaacggtgctgccctttgtgagcacagtaccctccaaactgcgccacccctgccccacccggctggagcgctgccagtcaccattcagctttcaccatgtgctgtccctgacgggggacgcacaagccttcgagcgggaggtggggcgccagagtgtgtccggcaatctggactcgcctgaaggtggcttcgatgccattctgcaggctgcactctgccaggagcagattggctggagaaatgtgtcccggctgctggtgttcacttcagacgacacattccatacagctggggacgggaagttgggcggcattttcatgcccagtgatgggcactgccacttggacagcaatggcctctacagtcgcagcacagagtttgactacccttctgtgggtcaggtagcccaggccctctctgcagcaaatatccagcccatctttgctgtcaccagtgccgcactgcctgtctaccaggagctgagtaaactgattcctaagtctgcagttggggagctgagtgaggactccagcaacgtggtacagctcatcatggatgcttataatagcctgtcttccaccgtgacccttgaacactcttcactccctcctggggtccacatttcttacgaatcccagtgtgagggtcctgagaagagggagggtaaggctgaggatcgaggacagtgcaaccacgtccgaatcaaccagacggtgactttctgggtttctctccaagccacccactgcctcccagagccccatctcctgaggctccgggcccttggcttctcagaggagctgattgtggagttgcacacgctgtgtgactgtaattgcagtgacacccagccccaggctccccactgcagtgatggccagggacacctacaatgtggtgtatgcagctgtgcccctggccgcctaggtcggctctgtgagtgctctgtggcagagctgtcctccccagacctggaatctgggtgccgggctcccaatggcacagggcccctgtgcagtggaaagggtcactgtcaatgtggacgctgcagctgcagtggacagagctctgggcatctgtgcgagtgtgacgatgccagctgtgagcgacatgagggcatcctctgcggaggctttggtcgctgccaatgtggagtatgtcactgtcatgccaaccgcacgggcagagcatgcgaatgcagtggggacatggacagttgcatcagtcccgagggagggctctgcagtgggcatggacgctgcaaatgcaaccgctgccagtgcttggacggctactatggtgctctatgcgaccaatgcccaggctgcaagacaccatgcgagagacaccgggactgtgcagagtgtggggccttcaggactggcccactggccaccaactgcagtacagcttgtgcccataccaatgtgaccctggccttggcccctatcttggatgatggctggtgcaaagagcggaccctggacaaccagctgttcttcttcttggtggaggatgacgccagaggcacggtcgtgctcagagtgagaccccaagaaaagggagcagaccacacgcaggccattgtgctgggctgcgtagggggcatcgtggcagtggggctggggctggtcctggcttaccggctctcggtggaaatctatgaccgccgggaatacagtcgctttgagaaggagcagcaacaactcaactggaagcaggacagtaatcctctctacaaaagtgccatcacgaccaccatcaatcctcgctttcaagaggcagacagtcccactctctgaaggagggagggacacttacccaaggctcttctccttggaggacagtgggaactggagggtgagaggaagggtgggtctgtaagaccttggtaggggactaattcactggcgaggtgcggccaccaccctacttcattttcagagtgacacccaagagggctgcttcccatgcctgcaaccttgcatccatctgggctaccccacccaagtatacaataaagtcttacctcaga

SEQ ID NO: 143346 - DNA, 1841 bp, Homo sapiens
  Payload ID: 8316
  Gene Symbol: ITGB7
  Gene Name: integrin, beta 7
  ENST ID: ENST00000542497
  CDS Start-End: 84-1499
acttcctcctctgccgtctcccagatcagtacacaaaggctgctgctgccgccagaggaaggactgctctgcacgcacctggcatggtggctttgccaatggtccttgttttgctgctggtcctgagcagaggtgagagtgaattggacgccaagatcccatccacaggggatgccacagaatggcggaatcctcacctgtccatgctggggtcctgccagccagccccctcctgccagaagtgcatcctctcacaccccagctgtgcatggtgcaagcaactgaacttcaccgcgtcgggagaggcggaggcgcggcgctgcgcccgacgagaggagctgctggctcgaggctgcccgctggaggagctggaggagccccgcggccagcaggaggtgctgcaggaccagccgctcagccagggcgcccgcggagagggtgccacccagctggcgccgcagcgggtccgggtcacgctgcggcctggggagccccagcagctccaggtccgcttccttcgtgctgagggatacccggtggacctgtactaccttatggacctgagctactccatgaaggacgacctggaacgcgtgcgccagctcgggcacgctctgctggtccggctgcaggaagtcacccattctgtgcgcattggttttggttcctttgtggacaaaacggtgctgccctttgtgagcacagtaccctccaaactgcgccacccctgccccacccggctggagcgctgccagtcaccattcagctttcaccatgtgctgtccctgacgggggacgcacaagccttcgagcgggaggtggggcgccagagtgtgtccggcaatctggactcgcctgaaggtggcttcgatgccattctgcaggctgcactctgccaggagcagattggctggagaaatgtgtcccggctgctggtgttcacttcagacgacacattccatacagctggggacgggaagttgggcggcattttcatgcccagtgatgggcactgccacttggacagcaatggcctctacagtcgcagcacagagtttgactacccttctgtgggtcaggtagcccaggccctctctgcagcaaatatccagcccatctttgctgtcaccagtgccgcactgcctgtctaccaggagctgagtaaactgattcctaagtctgcagttggggagctgagtgaggactccagcaacgtggtacagctcatcatggatgcttataatagcctgtcttccaccgtgacccttgaacactcttcactccctcctggggtccacatttcttacgaatcccagtgtgagggtcctgagaagagggagggtaaggctgaggatcgaggacagtgcaaccacgtccgaatcaaccagacgggactgtgcagagtgtggggccttcaggactggcccactggccaccaactgcagtacagcttgtgcccataccaatgtgaccctggccttggcccctatcttggatgatggctggtgcaaagagcggaccctggacaaccagctgttcttcttcttggtggaggatgacgccagaggcacggtcgtgctcagagtgagaccccaagaaaagggagcagaccacacgcaggccattgtgctgggctgcgtagggggcatcgtggcagtggggctggggctggtcctggcttaccggctctcggtggaaatctatgaccgccgggaatacagtcgctttgagaaggagcagcaacaactcaactggaagcaggacagtaatcctctctacaaaagtgccatcacgaccaccatcaatcctcgctttcaagaggcagacagtcccactctctg

SEQ ID NO: 143347 - DNA, 576 bp, Homo sapiens
  Payload ID: 8316
  Gene Symbol: ITGB7
  Gene Name: integrin, beta 7
  ENST ID: ENST00000549086
  CDS Start-End: 311-576
agtacacaaaggctgctgctgccgccagaggaaggactgctctgcacgcacctctcagacttcttcctaatcggcaccttggtcacagactccactgtcctgggacactgaggcccagcagctcagttccgtcccctccttgtgactcccagtgggcagcagagggttctgcttgatttggaagatgtggaaactaaagcccagagagaaagtctgacttgccccacagccagtgagtgactgcagcagcaccagaatctggtctgtttcctgtttggctcttctaccactacggcttgggatctcgggcatggtggctttgccaatggtccttgttttgctgctggtcctgagcagaggtgagagtgaattggacgccaagatcccatccacaggggatgccacagaatggcggaatcctcacctgtccatgctggggtcctgccagccagccccctcctgccagaagtgcatcctctcacaccccagctgtgcatggtgcaagcaactgaacttcaccgcgtcgggagaggcggaggcgcggcgctgcgcccgacgagaggagctgctggctcg

SEQ ID NO: 143348 - DNA, 607 bp, Homo sapiens
  Payload ID: 8316
  Gene Symbol: ITGB7
  Gene Name: integrin, beta 7
  ENST ID: ENST00000552972
  CDS Start-End: 132-607
acttcctcctctgccgtctcccagatcagtacacaaaggctgctgctgccgccagaggaaggactgctctgcacgcacctatgtggaaactaaagcccagagagaaagtctgacttgccccacagccaggcatggtggctttgccaatggtccttgttttgctgctggtcctgagcagaggtgagagtgaattggacgccaagatcccatccacaggggatgccacagaatggcggaatcctcacctgtccatgctggggtcctgccagccagccccctcctgccagaagtgcatcctctcacaccccagctgtgcatggtgcaagcaactgaacttcaccgcgtcgggagaggcggaggcgcggcgctgcgcccgacgagaggagctgctggctcgaggctgcccgctggaggagctggaggagccccgcggccagcaggaggtgctgcaggaccagccgctcagccagggcgcccgcggagagggtgccacccagctggcgccgcagcgggtccgggtcacgctgcggcctggggagccccagcagctccaggtccgcttccttcgtgctgagggatacccggtggacctgtactaccttatgga

SEQ ID NO: 143349 - DNA, 2138 bp, Homo sapiens
  Payload ID: 8316
  Gene Symbol: ITGB7
  Gene Name: integrin, beta 7
  Uniprot ID: P26010
  ENST ID: ENST00000550743
  CDS Start-End: 1-1953
atggtggctttgccaatggtccttgttttgctgctggtcctgagcagaggtgagagtgaattggacgccaagatcccatccacaggggatgccacagaatggcggaatcctcacctgtccatgctggggtcctgccagccagccccctcctgccagaagtgcatcctctcacaccccagctgtgcatggtgcaagcaactgaacttcaccgcgtcgggagaggcggaggcgcggcgctgcgcccgacgagaggagctgctggctcgaggctgcccgctggaggagctggaggagccccgcggccagcaggaggtgctgcaggaccagccgctcagccagggcgcccgcggagagggtgccacccagctggcgccgcagcgggtccgggtcacgctgcggcctggggagccccagcagctccaggtccgcttccttcgtgctgagggatacccggtggacctgtactaccttatggacctgagctactccatgaaggacgacctggaacgcgtgcgccagctcgggcacgctctgctggtccggctgcaggaagtcacccattctgtgcgcattggttttggttcctttgtggacaaaacggtgctgccctttgtgagcacagtaccctccaaactgcgccacccctgccccacccggctggagcgctgccagtcaccattcagctttcaccatgtgctgtccctgacgggggacgcacaagccttcgagcgggaggtggggcgccagagtgtgtccggcaatctggactcgcctgaaggtggcttcgatgccattctgcaggctgcactctgccaggagcagattggctggagaaatgtgtcccggctgctggtgttcacttcagacgacacattccatacagctggggacgggaagttgggcggcattttcatgcccagtgatgggcactgccacttggacagcaatggcctctacagtcgcagcacagagtttgactacccttctgtgggtcaggtagcccaggccctctctgcagcaaatatccagcccatctttgctgtcaccagtgccgcactgcctgtctaccaggagctgagtaaactgattcctaagtctgcagttggggagctgagtgaggactccagcaacgtggtacagctcatcatggatgcttataatagcctgtcttccaccgtgacccttgaacactcttcactccctcctggggtccacatttcttacgaatcccagtgtgagggtcctgagaagagggagggtaaggctgaggatcgaggacagtgcaaccacgtccgaatcaaccagacggtgactttctgggtttctctccaagccacccactgcctcccagagccccatctcctgaggctccgggcccttggcttctcagaggagctgattgtggagttgcacacgctgtgtgactgtaattgcagtgacacccagccccaggctccccactgcagtgatggccagggacacctacaatgtggtgtatgcagggactgtgcagagtgtggggccttcaggactggcccactggccaccaactgcagtacagcttgtgcccataccaatgtgaccctggccttggcccctatcttggatgatggctggtgcaaagagcggaccctggacaaccagctgttcttcttcttggtggaggatgacgccagaggcacggtcgtgctcagagtgagaccccaagaaaagggagcagaccacacgcaggccattgtgctgggctgcgtagggggcatcgtggcagtggggctggggctggtcctggcttaccggctctcggtggaaatctatgaccgccgggaatacagtcgctttgagaaggagcagcaacaactcaactggaagcaggacagtaatcctctctacaaaagtgccatcacgaccaccatcaatcctcgctttcaagaggcagacagtcccactctctgaaggagggagggacacttacccaaggctcttctccttggaggacagtgggaactggagggtgagaggaagggtgggtctgtaagaccttggtaggggactaattcactggcgaggtgcggccaccaccctacttcattttcagagtgacacccaagagggctgcttcccatgcctgcaaccttgca

SEQ ID NO: 143350 - DNA, 513 bp, Homo sapiens
  Payload ID: 8316
  Gene Symbol: ITGB7
  Gene Name: integrin, beta 7
  ENST ID: ENST00000552935
  CDS Start-End: 233-513
cttttctttaattcccagtcactgaccctcttctcttatttagaatccaagattgtaaaagccgccaagtatgtcagactatttattcaacttctccactttgcagatgtggaaactaaagcccagagagaaagtctgacttgccccacagccagtgagtgactgcagcagcaccagaatctggtctgtttcctgtttggctcttctaccactacggcttgggatctcgggcatggtggctttgccaatggtccttgttttgctgctggtcctgagcagaggtgagagtgaattggacgccaagatcccatccacaggggatgccacagaatggcggaatcctcacctgtccatgctggggtcctgccagccagccccctcctgccagaagtgcatcctctcacaccccagctgtgcatggtgcaagcaactgaacttcaccgcgtcgggagaggcggaggcgcggcgctgcgcccgacgagaggagctgctggctcgaggctgcccgctgga

SEQ ID NO: 143351 - DNA, 729 bp, Homo sapiens
  Payload ID: 8316
  Gene Symbol: ITGB7
  Gene Name: integrin, beta 7
  ENST ID: ENST00000551319
  CDS Start-End: 1-353
gcagtacagcttgtgcccataccaatgtgaccctggccttggcccctatcttggatgatggctggtgcaaagagcggaccctggacaaccagctgttcttcttcttggtggaggatgacgccagaggcacggtcgtgctcagagtgagaccccaagaaaagggagcagaccacacgcaggccattgtgctgggctgcgtagggggcatcgtggcagtggggctggggctggtcctggcttaccggctctcggtggaaatctatgaccgccgggaatacagtcgctttgagaaggagcagcaacaactcaactggaagcagctcctaggattcggctcaaggctggcctcttaggtctagaaaggggacgaggaatcctgggatttttgcttataatctgcaacatctttctccaggacagtaatcctctctacaaaagtgccatcacgaccaccatcaatcctcgctttcaagaggcagacagtcccactctctgaaggagggagggacacttacccaaggctcttctccttggaggacagtgggaactggagggtgagaggaagggtgggtctgtaagaccttggtaggggactaattcactggcgaggtgcggccaccaccctacttcattttcagagtgacacccaagagggctgcttcccatgcctgcaaccttgcatccatctgggctaccccacccaagtatacaataaagtcttacctcaga

SEQ ID NO: 143352 - DNA, 8751 bp, Homo sapiens
  Payload ID: 8317
  Gene Symbol: ITGB8
  Gene Name: integrin, beta 8
  Uniprot ID: P26012
  ENST ID: ENST00000222573
  CDS Start-End: 685-2994
cccagagccgcctccccctgttgctggcatcccgagcttcctcccttgccagccaggacgctgccgacttgtctttgcccgctgctccgcagacggggctgcaaagctgcaactaatggtgttggcctccctgcccacctgtggaagcaactgcgctgattgatgcgccacagacttttttcccctcgacctcgccggcgtcccctcccacagatccagcatcacccagtgaatgtacattagggtggtttcccccccagcttcgggctttgtttgggtttgattgtgtttggctcttcgctaagctgatttatgcagcagaagccccaccggctggagagaaacaaaagctcttttctttgtcccggagcaggctgcggagcccttgcagagccctctctccagtcgccgccggggcccttggccgtcgaaggaggtgcttctcgcggagaccgcgggacccgccgtgccgagccgggagggccgcaggggccctgagatgccgagcggtgcccgggcccgcttacctgcaccgcttgctccgagccgcggggtccgcctgctaggcctgcggaaaacgtcctagcgacactcggcccgcgggccccgaggtgcgcccgggaggcgcgagcccgcgtccggaaggcagtcaggcggcgggcgcggggcgggctgttttgcattatgtgcggctcggccctggctttttttaccgctgcatttgtctgcctgcaaaacgaccggcgaggtcccgcctcgttcctctgggcagcctgggtgttttcacttgttcttggactgggccaaggtgaagacaatagatgtgcatcttcaaatgcagcatcctgtgccaggtgccttgcgctgggtccagaatgtggatggtgtgttcaagaggatttcatttcaggtggatcaagaagtgaacgttgtgatattgtttccaatttaataagcaaaggctgctcagttgattcaatagaatacccatctgtgcatgttataatacccactgaaaatgaaattaatacccaggtgacaccaggagaagtgtctatccagctgcgtccaggagccgaagctaattttatgctgaaagttcatcctctgaagaaatatcctgtggatctttattatcttgttgatgtctcagcatcaatgcacaataatatagaaaaattaaattccgttggaaacgatttatctagaaaaatggcatttttctcccgtgactttcgtcttggatttggctcatacgttgataaaacagtttcaccatacattagcatccaccccgaaaggattcataatcaatgcagtgactacaatttagactgcatgcctccccatggatacatccatgtgctgtctttgacagagaacatcactgagtttgagaaagcagttcatagacagaagatctctggaaacatagatacaccagaaggaggttttgacgccatgcttcaggcagctgtctgtgaaagtcatatcggatggcgaaaagaggctaaaagattgctgctggtgatgacagatcagacgtctcatctcgctcttgatagcaaattggcaggcatagtggtgcccaatgacggaaactgtcatctgaaaaacaacgtctatgtcaaatcgacaaccatggaacacccctcactaggccaactttcagagaaattaatagacaacaacattaatgtcatctttgcagttcaaggaaaacaatttcattggtataaggatcttctacccctcttgccaggcaccattgctggtgaaatagaatcaaaggctgcaaacctcaataatttggtagtggaagcctatcagaagctcatttcagaagtgaaagttcaggtggaaaaccaggtacaaggcatctattttaacattaccgccatctgtccagatgggtccagaaagccaggcatggaaggatgcagaaacgtgacgagcaatgatgaagttcttttcaatgtaacagttacaatgaaaaaatgtgatgtcacaggaggaaaaaactatgcaataatcaaacctattggttttaatgaaaccgctaaaattcatatacacagaaactgcagctgtcagtgtgaggacaacagaggacctaaaggaaagtgtgtagatgaaacttttctagattccaagtgtttccagtgtgatgagaataaatgtcattttgatgaagatcagttttcttctgagagttgcaagtcacacaaggatcagcctgtttgcagtggtcgaggagtttgtgtttgtgggaaatgttcatgtcacaaaattaagcttggaaaagtgtatggaaaatactgtgaaaaggatgacttttcttgtccatatcaccatggaaatctgtgtgctgggcatggagagtgtgaagcaggcagatgccaatgcttcagtggctgggaaggtgatcgatgccagtgcccttcagcagcagcccagcactgtgtcaattcaaagggccaagtgtgcagtggaagaggcacgtgtgtgtgtggaaggtgtgagtgcaccgatcccaggagcatcggccgcttctgtgaacactgccccacctgttatacagcctgcaaggaaaactggaattgtatgcaatgccttcaccctcacaatttgtctcaggctatacttgatcagtgcaaaacctcatgtgctctcatggaacaacagcattatgtcgaccaaacttcagaatgtttctccagcccaagctacttgagaatatttttcatcattttcatagttacattcttgattgggttgcttaaagtcctgatcattagacaggtgatactacaatggaatagtaataaaattaagtcctcatcagattacagagtgtcagcctcaaaaaaggataagttgattctgcaaagtgtttgcacaagagcagtcacctaccgacgtgagaagcctgaagaaataaaaatggatatcagcaaattaaatgctcatgaaactttcaggtgcaacttctaaaaaaagatttttaaacacttaatgggaaactggaattgttaataattgctcctaaagattataattttaaaagtcacaggaggagacaaattgctcacggtcatgccagttgctggttgtacactcgaacgaagactgacaagtatcctcatcatgatgtgactcacatagctgctgactttttcagagaaaaatgtgtcttactactgtttgagactagtgtcgttgtagcactttactgtaatatataacttatttagatcagcatagaatgtagatcctctgaagagcactgattacactttacaggtacctgttatccctacgcttcccagagagaacaatgctgtgagagagtttagcattgtgtcactacaagggtacagtaatccctgcactggacatgtgaggaaaaaaataatctggcaagtatattctaaggttgccaaacacttcaacagttggtggttgaatagacaagaacagctagatgaataaatgattcgtgtttcactctttcaagaggtgaacagatacaaccttaatcttaaaagattattgctttttaaagtgtgtagttttatgcatgtgtgtttatggtttgcttatttttgcaagatggatactaattccagcattctctcctctttgcctttatgttttgttttcttttttacaggataagtttatgtatgtcacagatgactggattaattaagtgctaagttactactgccataaaaaactaataatacaatgtcactttatcagaatactagttttaaaagctgaatgttaataggggacactgtaaagtatcatcaaaacctgaatagcttcattgtgcacaagtgtggagttttgtatcctcttacctggtaaactgaagggattgtttggccatttcatttatcttatcattaattcacaagatagttagaaattctgcctcaagcaaagtaccacattttgaatgttttcttagattttgattgcaagtagatatcagcattttttaaatgaaaagctatattatcttctcccttcaaggcagcctaaggatgttctttcccagaatcactccaacccttcttgccagaattcataaaagtacaaaattggagaatagatgatatcttagaaataagctttttttttttttttttttttttttgagacggagtttcactcttgtcacccaggctgaagtgcaatggcgcaattagggttcactgcaacctctgcctcccgggttcaagcagttctcctgcctcagcctcctgagtagctgggattacaggcatccaccaccgtgcccagctaatttttgtatttttagtagagacggggttttgccatgttggacaggttgatctcaaactcctgacctcaggtgatctaccctcctcggcctcccagagtgttgggattacaggcatgagccaccatgccaggctgctaattctcctttttagtgagttagggaactgagcctcagaaaacttaaacgatttctcagaaaacactcaagtgataaagtggccacattggaaaggagtttttatcttctcattgtcaggccagtgttcattgcacaatatcatgctacctcttgaatctttaaaatattcaattggcaaatgtttttcaatgtgatttactcatgtcttaagtgtatgaggaaagttcaaagcaaaatagaaaggaataattcaaactgaattgtccataatcagcttccagtctttcatgctaatcagcttcttaagagactgaagtatggcatacctacaggggaattccttcgcaccatagcctgtatgaacagtgttccctggagttctccagtgctcagcttgagaccttgatacacgggccatgagccctgtcttccccaatggaaatttatttacacttaccttatccctatggacttagtctgattttattggctaggagtctaacagtcctgtgtggatatacagttttgcccatgacaacaaaggaatctatccgaaatatctttttttttataataaacttccaagatttgctgtcttccagcacttgagttaaagtactagatactgcattttgatgaagactaaccccatctcatattctaccctaaagagaactgaaaaacctataataagttgttctggagccaataaacacagcagctctgttagatgtcctctacagccaagcactttcaatgctaacttgaactgcatttccttcctcaaatgagagattgacataattcagtactgtgagtcacttgtataagaaacctttgatcactaaaaataatgtaaaaattgggtttagtagcctaatacacataacgttcttcttaaaaaggaaaatggatggatgcctgacaaccctccaaaagaaaaaagtgtaagatagccattaagatgatgacaatttttgaaatgaacattatgatatttatgaacaataaacaaatttccgtatggaatgaattatccaaaaagagtataacaaaatgaaatccttaaaaatccagagtttatattttttttataccctcacttgtttgcactaactttatagtggaccaaggctgttaccataggaagggacaaacttccttgtaggcaactcagtgttagacgatgattgtggttatgcttgcaaagtcttgtgcttatcttttttgtttttacttaaaaagctaatttttaaagattgtagggcttgtattttacttgaataattgatatcttcctgtgtaatgatttgtgagatgagaattaatatttgactagttagaattaattaaatggtaagggaacacagggtactcttaggttaaataatgtatgcaaatagagtctattttcaactaatatggccacaggagccttttgagattcattgatattaaacacaattaatgaaattttaaattgttaacagaattgagaacttgaacaacacttttagtactgcagcatttttgtgccctaaagtatgtaatgatttataaatgtgccatacatacactacaacataacatttgctttgttatgcattttatttctctggggacaccattgcactgcagtgcacacgtatttataaacatttgttatatttttggaaacttgctaatatttattaagtcatagacttttctggaggacttaaaaattcactaaaaatctgattatgtcttaaatgttcagtttatctttggtttattaaaataaaaaaaaaatctaagattaaacacagtagatatctctggaggcaattttccaaaactcaacattaaaatttgtggatgcatgagatgcaatccttcaaagaatgaatctgaaatatatttttaatatttacttaatatccactgaagatatctttatgcaagacaagagtcagccatcagacactgaaatatattatgatagattatgaagaattttctctgtagaattatattcttcctggaacctggtagagtagattagactcaaaggctttttcttccttttcttactcctgttttttccactcactcttcccaagagatttcctaaagcttcaagcttaataagcctaatagtgaaaaataactgaatttaatggtataatgaagttcttcatttccagacatctttaattgatcttaaagctcatttgagtctttgcccctgaacaaagacagacccattaaaatctaagaattctaaattttcacaactgtttgagcttcttttcattttgaaggatttggaatatatatgttttcataaaagtatcaagtgaaatatagttacatgggagctcaatcatgtgcagattgcattctgttatgttgactcaatatttaatttacaactatccttatttatattgacctcaagaactccattttatgcaatgcagaccactgagatatagctaacattctttcaaataattttccttttcttttataattcctctatagcaaatttttatgtataactgattatacatatccatatttatatttcattgattccaagacatcactttttcaatttaacatctctgaaattgtgacatttcttgcaactgttggcacttcagatgcagtgtttaaaattatgcttgaataaatattacactaatccaactttacctaaatgtttatgcatctaggcaaattttgttttcttataaagatttgagagcccatttatgacaaaatatgaaggcgaaatttaaggacaactgagtcacgcacaactcaacatggagcctaactgattatcagctcagatcccgcatatcttgagtttacaaaagctctttcaggtccccatttatactttacgtgagtgcgaatgatttcagcaaaccctaacttaactaacaagaatgggtaggtatgtctacgtttcattaacaaatttttattatttttattctattatatgagatccttttatattatcatctcacttttaaacaaaattaactggaaaaatattacatggaactgtcatagttaggttttgcagcatcttacatgtcttgtatcaatggcaggagaaaaatatgataaaaacaatcagtgctgtgaaaaacaactttcttctagagtcctcttactttttattcttctttatcatttgtgggtttttcccccttggctctgatcactttaacttcaagcttatgtaacgactgttataaaactgcatatttaaattatttgaattatatgaaataattgttcagctatctgggcagctgttaatgtaaacctgagagtaataacactactcttttatctacctggaatacttttctgcataaaatttatctttgtaagctaactctattaatcaggtttcttctagcctctgcaacctacttcagttagaattgtctaatactgctctattaatcaggtttctagcctctacaacctacttcagttaaaattgtctaatacagcaatatttaaaaaaaaaacactgcaattgtcaaggatggaaaatgtgtgatttgtgtaaacaatttttaccaactttacattttcctacagataaatgtgaaattttgataagaagtctacgcaatgacaagtatggtacataaattttattaagaatattgagtataaagtactttaattctaaattataagaaaatatacatttgcacatattaatatagaaattcattttgtgtatatttaacatagcttttaaactattttacattagctacttcattatggtttcttgaacttctgaaaaaaattagaaatgtattaaacttatcagtaacataaaaacttattttgtttcacctaacgaatactgcgtttgtaaaaataaatttaatatagaatatatttttaaattaaatatttgaatataaaatagctctaagaaagaagcaaattatcactgaacatatttcttattatttctggctttgaattatacgtaacttaaattgtcttaaatgatacagaatattggagaatatgatactttcacataatatactatgaacctgttcatataactctgattgactactaacttctgttttatgtatttattaaagagctgacactgtagtttgtggtgagatgtttatttttctaacagagcttataacagttaggacaaggcatttaattaatgcatcattctgtttagtagtaggtgttaatcaatatgaaattctctgttttaaaataaaaatgtaaaaatctaa

SEQ ID NO: 143353 - DNA, 3420 bp, Homo sapiens
  Payload ID: 8317
  Gene Symbol: ITGB8
  Gene Name: integrin, beta 8
  Uniprot ID: P26012
  ENST ID: ENST00000537992
  CDS Start-End: 1183-3087
ctgcccgggctgcagccgcgcctgcgggcagccgaggcgaggcgctccggtagcgtggggaggtttcctagcaactctctgccctgagtgcacccggctacccgcaggtctggagccccccggggggccagagcaggaccacccctctcccgcccatcgccggcctcgcctctctcgcatcctagccgtgtgcaccccagagcgcgccagcaactcgggctctggactgcgggacgcctgagccgcgcactgaggcgaaaaggacaagggcacgcagcccccgccccgcgaagccgggctccggcacctcgcggaacctcccctcctgcgctcgcagccgcaggccccactccccgccagggagggagcggcgatgcctcgctctgtgcctgcgggtgtcggcgggtgcttctagggcgctcccagagccgcctccccctgttgctggcatcccgagcttcctcccttgccagccaggacgctgccgacttgtctttgcccgctgctccgcagacggggctgcaaagctgcaactaatggtgttggcctccctgcccacctgtggaagcaactgcgctgattgatgcgccacagacttttttcccctcgacctcgccggcgtcccctcccacagatccagcatcacccagtgaatgtacattagggtggtttcccccccagcttcgggctttgtttgggtttgattgtgtttggctcttcgctaagctgatttatgcagcagaagccccaccggctggagagaaacaaaagctcttttctttgtcccggagcaggctgcggagcccttgcagagccctctctccagtcgccgccggggcccttggccgtcgaaggaggtcttgggctggcacgaagagctgcccggccagagcatcccggccagaagacaatagatgtgcatcttcaaatgcagcatcctgtgccaggtgccttgcgctgggtccagaatgtggatggtgtgttcaagaggatttcatttcaggtggatcaagaagtgaacgttgtgatattgtttccaatttaataagcaaaggctgctcagttgattcaatagaatacccatctgtgcatgttataatacccactgaaaatgaaattaatacccaggtgacaccaggagaagtgtctatccagctgcgtccaggagccgaagctaattttatgctgaaagttcatcctctgaagaaatatcctgtggatctttattatcttgttgatgtctcagcatcaatgcacaataatatagaaaaattaaattccgttggaaacgatttatctagaaaaatggcatttttctcccgtgactttcgtcttggatttggctcatacgttgataaaacagtttcaccatacattagcatccaccccgaaaggattcataatcaatgcagtgactacaatttagactgcatgcctccccatggatacatccatgtgctgtctttgacagagaacatcactgagtttgagaaagcagttcatagacagaagatctctggaaacatagatacaccagaaggaggttttgacgccatgcttcaggcagctgtctgtgaaagtcatatcggatggcgaaaagaggctaaaagattgctgctggtgatgacagatcagacgtctcatctcgctcttgatagcaaattggcaggcatagtggtgcccaatgacggaaactgtcatctgaaaaacaacgtctatgtcaaatcgacaaccatggaacacccctcactaggccaactttcagagaaattaatagacaacaacattaatgtcatctttgcagttcaaggaaaacaatttcattggtataaggatcttctacccctcttgccaggcaccattgctggtgaaatagaatcaaaggctgcaaacctcaataatttggtagtggaagcctatcagaagctcatttcagaagtgaaagttcaggtggaaaaccaggtacaaggcatctattttaacattaccgccatctgtccagatgggtccagaaagccaggcatggaaggatgcagaaacgtgacgagcaatgatgaagttcttttcaatgtaacagttacaatgaaaaaatgtgatgtcacaggaggaaaaaactatgcaataatcaaacctattggttttaatgaaaccgctaaaattcatatacacagaaactgcagctgtcagtgtgaggacaacagaggacctaaaggaaagtgtgtagatgaaacttttctagattccaagtgtttccagtgtgatgagaataaatgtcattttgatgaagatcagttttcttctgagagttgcaagtcacacaaggatcagcctgtttgcagtggtcgaggagtttgtgtttgtgggaaatgttcatgtcacaaaattaagcttggaaaagtgtatggaaaatactgtgaaaaggatgacttttcttgtccatatcaccatggaaatctgtgtgctgggcatggagagtgtgaagcaggcagatgccaatgcttcagtggctgggaaggtgatcgatgccagtgcccttcagcagcagcccagcactgtgtcaattcaaagggccaagtgtgcagtggaagaggcacgtgtgtgtgtggaaggtgtgagtgcaccgatcccaggagcatcggccgcttctgtgaacactgccccacctgttatacagcctgcaaggaaaactggaattgtatgcaatgccttcaccctcacaatttgtctcaggctatacttgatcagtgcaaaacctcatgtgctctcatggaacaacagcattatgtcgaccaaacttcagaatgtttctccagcccaagctacttgagaatatttttcatcattttcatagttacattcttgattgggttgcttaaagtcctgatcattagacaggtgatactacaatggaatagtaataaaattaagtcctcatcagattacagagtgtcagcctcaaaaaaggataagttgattctgcaaagtgtttgcacaagagcagtcacctaccgacgtgagaagcctgaagaaataaaaatggatatcagcaaattaaatgctcatgaaactttcaggtgcaacttctaaaaaaagatttttaaacacttaatgggaaactggaattgttaataattgctcctaaagattataattttaaaagtcacaggaggagacaaattgctcacggtcatgccagttgctggttgtacactcgaacgaagactgacaagtatcctcatcatgatgtgactcacatagctgctgactttttcagagaaaaatgtgtcttactactgtttgagactagtgtcgttgtagcactttactgtaatatataacttatttagatcagcatagaatgtagatcctctgaagagcactgattacactttacaggtacctgttatccctacgcttccc

SEQ ID NO: 143354 - DNA, 2007 bp, Homo sapiens
  Payload ID: 8318
  Gene Symbol: ITGBL1
  Gene Name: integrin, beta-like 1 (with EGF-like repeat domains)
  Uniprot ID: O95965
  ENST ID: ENST00000376162
  CDS Start-End: 13-1218
aaactttgtctcatgaacttagttgcagtgatgggagcatttaataaaggccatggtaagtgtgactgtggcaagtgcaagtgtgaccagggatggtatggggatgcttgccagtacccaactaactgtgacttgacaaagaagaaaagtaaccaaatgtgcaagaattcacaagacatcatctgctctaatgcaggtacatgtcactgtggcaggtgtaagtgtgataattcagatggaagtggacttgtgtatggtaaattttgtgagtgtgacgatagagaatgcatagacgatgaaacagaagaaatatgtggaggccatgggaagtgttactgtggaaactgctactgcaaggctggttggcatggagataaatgtgaattccagtgcgatatcaccccctgggaaagcaagcgaagatgcacgtctccagatggcaaaatctgcagtaacagagggacttgtgtatgtggtgaatgtacctgtcacgatgttgatccgactggggactggggagatattcatggggacacctgtgaatgtgatgagagggactgtagagctgtctatgaccgatattctgatgacttctgttcaggtcatggacagtgtaattgcggaagatgtgactgcaaagcaggctggtatgggaagaagtgtgagcacccacagtcctgcacgctgtcagctgaggagagcatcaggaagtgccagggaagctcggatctgccttgctctgggaggggtaaatgtgaatgtggcaaatgcacctgctatcctccaggagatcgccgggtgtatggcaagacttgtgagtgtgatgatcgccgctgtgaagacctcgatggtgtggtctgtggaggccacggcacatgttcctgtggtcgctgtgtttgtgagagaggatggtttggaaagctctgccaacatccgcggaagtgtaacatgacggaagaacaaagcaagaatctgtgtgaatcagcagatggcatattgtgctcggggaagggttcttgtcattgtgggaagtgcatttgttctgctgaagagtggtatatttctggggagttctgtgactgtgatgacagagactgcgacaaacatgatggtctcatttgtacagggaatggaatatgtagctgtggaaactgtgaatgctgggatggatggaatggaaatgcatgtgaaatctggcttggctcagaatatccttaacaattacatgagagaggtctggattcttattttttctgggccattagaacagataaatgcgaaggaaaccatgtatattcaccactaggacaggttaaaaagaccattgtatgtttttctatttctgaattacgaatgaaatccgagtacctattagaaatgagttatgcaaatttagatgcaaataacattagaaaaaaaagattcttccataattaacataagtggttcctaacgagagcaatttttccacccaaaagtcatttggcaacatctacagacaattttgattgtcacactgggtcgggtaggaaggtatgctgcagacatttggtgggtagaggccagggatgctgctgagcatcccgcagtgtacaggacagcccccaaacaaggaattatccagccccaaatgccaatagggctcaaactgagaaacattgagttatatggctattagaaatccacattcttacacaagaaagaccatattagaatctaaggaaaacatgcatattcacattaattaatcgatcagatttttccagaattccgtatcagtcaccattttaatatggggacaatgaagacaagcacacaggaggtagaatatcagagtggggctggatcaagggcaaaaactggtcattaagtcatctgacattaaatcatttagccactaagttatttgtctactctcactttaaactcaccaaagaagattctcttaaagaaattatgaaaaatgtacaatttaacattttaaataaatagtgacagaagttgttt

SEQ ID NO: 143355 - DNA, 2494 bp, Homo sapiens
  Payload ID: 8318
  Gene Symbol: ITGBL1
  Gene Name: integrin, beta-like 1 (with EGF-like repeat domains)
  Uniprot ID: O95965
  ENST ID: ENST00000376180
  CDS Start-End: 220-1704
accagcaccccgcccagagcagtgccgctgcccaaatcctcgcaggcagctcatcaacgcaattgcaactccggctggagccccggacctgcaagcctgggtgtccgtgggtccgtctgcccagccatctgctggtggcacctctccctcctgccgcctccctcggtgaaccccaccttgcagaagtgcagctcgcccggagcagcccaggagctcagcatgcgtcccccaggcttcaggaacttcttgctgctggcgtcctcccttctctttgctgggttgtcagctgttcctcaaagcttctcgccatctctgaggagctggccgggcgccgcctgcaggctgtcccgggccgagtcggagcgacgctgccgcgcacctgggcagcccccgggggccgcgctgtgccacggccggggccgctgcgactgcggcgtctgcatctgccacgtgactgagccgggcatgttcttcgggcccctgtgtgagtgccatgagtgggtgtgcgagacctacgacgggagcacctgtgcaggccatggtaagtgtgactgtggcaagtgcaagtgtgaccagggatggtatggggatgcttgccagtacccaactaactgtgacttgacaaagaagaaaagtaaccaaatgtgcaagaattcacaagacatcatctgctctaatgcaggtacatgtcactgtggcaggtgtaagtgtgataattcagatggaagtggacttgtgtatggtaaattttgtgagtgtgacgatagagaatgcatagacgatgaaacagaagaaatatgtggaggccatgggaagtgttactgtggaaactgctactgcaaggctggttggcatggagataaatgtgaattccagtgcgatatcaccccctgggaaagcaagcgaagatgcacgtctccagatggcaaaatctgcagtaacagagggacttgtgtatgtggtgaatgtacctgtcacgatgttgatccgactggggactggggagatattcatggggacacctgtgaatgtgatgagagggactgtagagctgtctatgaccgatattctgatgacttctgttcaggtcatggacagtgtaattgcggaagatgtgactgcaaagcaggctggtatgggaagaagtgtgagcacccacagtcctgcacgctgtcagctgaggagagcatcaggaagtgccagggaagctcggatctgccttgctctgggaggggtaaatgtgaatgtggcaaatgcacctgctatcctccaggagatcgccgggtgtatggcaagacttgtgagtgtgatgatcgccgctgtgaagacctcgatggtgtggtctgtggaggccacggcacatgttcctgtggtcgctgtgtttgtgagagaggatggtttggaaagctctgccaacatccgcggaagtgtaacatgacggaagaacaaagcaagaatctgtgtgaatcagcagatggcatattgtgctcggggaagggttcttgtcattgtgggaagtgcatttgttctgctgaagagtggtatatttctggggagttctgtgactgtgatgacagagactgcgacaaacatgatggtctcatttgtacagggaatggaatatgtagctgtggaaactgtgaatgctgggatggatggaatggaaatgcatgtgaaatctggcttggctcagaatatccttaacaattacatgagagaggtctggattcttattttttctgggccattagaacagataaatgcgaaggaaaccatgtatattcaccactaggacaggttaaaaagaccattgtatgtttttctatttctgaattacgaatgaaatccgagtacctattagaaatgagttatgcaaatttagatgcaaataacattagaaaaaaaagattcttccataattaacataagtggttcctaacgagagcaatttttccacccaaaagtcatttggcaacatctacagacaattttgattgtcacactgggtcgggtaggaaggtatgctgcagacatttggtgggtagaggccagggatgctgctgagcatcccgcagtgtacaggacagcccccaaacaaggaattatccagccccaaatgccaatagggctcaaactgagaaacattgagttatatggctattagaaatccacattcttacacaagaaagaccatattagaatctaaggaaaacatgcatattcacattaattaatcgatcagatttttccagaattccgtatcagtcaccattttaatatggggacaatgaagacaagcacacaggaggtagaatatcagagtggggctggatcaagggcaaaaactggtcattaagtcatctgacattaaatcatttagccactaagttatttgtctactctcactttaaactcaccaaagaagattctcttaaagaaattatgaaaaatgtacaatttaacattttaaataaatagtgacagaagttgttta

SEQ ID NO: 143356 - DNA, 4808 bp, Homo sapiens
  Payload ID: 8318
  Gene Symbol: ITGBL1
  Gene Name: integrin, beta-like 1 (with EGF-like repeat domains)
  Uniprot ID: O95965
  ENST ID: ENST00000545560
  CDS Start-End: 373-1434
atcaacgcaattgcaactccggctggagccccggacctgcaagcctgggtgtccgtgggtccgtctgcccagccatctgctggtggcacctctccctcctgccgcctccctcggtgaaccccaccttgcagaagtgcagctcgcccggagcagcccaggagctcagcatgcgtcccccaggcttcaggaacttcttgctgctggcgtcctcccttctctttgctgggttgtcagctgttcctcaaagcttctcgccatctctgaggccatggtaagtgtgactgtggcaagtgcaagtgtgaccagggatggtatggggatgcttgccagtacccaactaactgtgacttgacaaagaagaaaagtaaccaaatgtgcaagaattcacaagacatcatctgctctaatgcaggtacatgtcactgtggcaggtgtaagtgtgataattcagatggaagtggacttgtgtatggtaaattttgtgagtgtgacgatagagaatgcatagacgatgaaacagaagaaatatgtggaggccatgggaagtgttactgtggaaactgctactgcaaggctggttggcatggagataaatgtgaattccagtgcgatatcaccccctgggaaagcaagcgaagatgcacgtctccagatggcaaaatctgcagtaacagagggacttgtgtatgtggtgaatgtacctgtcacgatgttgatccgactggggactggggagatattcatggggacacctgtgaatgtgatgagagggactgtagagctgtctatgaccgatattctgatgacttctgttcaggtcatggacagtgtaattgcggaagatgtgactgcaaagcaggctggtatgggaagaagtgtgagcacccacagtcctgcacgctgtcagctgaggagagcatcaggaagtgccagggaagctcggatctgccttgctctgggaggggtaaatgtgaatgtggcaaatgcacctgctatcctccaggagatcgccgggtgtatggcaagacttgtgagtgtgatgatcgccgctgtgaagacctcgatggtgtggtctgtggaggccacggcacatgttcctgtggtcgctgtgtttgtgagagaggatggtttggaaagctctgccaacatccgcggaagtgtaacatgacggaagaacaaagcaagaatctgtgtgaatcagcagatggcatattgtgctcggggaagggttcttgtcattgtgggaagtgcatttgttctgctgaagagtggtatatttctggggagttctgtgactgtgatgacagagactgcgacaaacatgatggtctcatttgtacagggaatggaatatgtagctgtggaaactgtgaatgctgggatggatggaatggaaatgcatgtgaaatctggcttggctcagaatatccttaacaattacatgagagagcaattttgatgacgtattcgctgatgcacagacattggaattcattacattatctagccatcgtaatacaaatgacctttggatttctctatcacggcgcttatcctcctattaaggatcagaaagttaaactttacggaccacgtacgtccctgtctcatattcttctttgttggtttctgtttaatactttaaagctgtaaaaaaaatttaaaaaattccttctgagctcccaggccatacaaaagcaacttaagggtggatttggctggcagctgggcagtactttgtcagcctcagctccactggaactgcccttgattctctatagctcatcacaaaacctcaggtatgtcttatttttcttataatcctctgtatgttattatcctttttattaacaacaacaactacaacaaaagtgctgctctttttcatagtctcatgtaagaagagtgtcaaaaatgtcctcggcatttgttttctcagaaaaagaatttagatattggagaaattatcataccataaaaagttcaaaatgtgattcatctaaaattttggacaaagatgaaaatatagtcagctctgttctagtgttcatttagttagaaaccatagtaccggaactgtattatagtagaagttaatggtacctaaactctaaggaatgctttttctttgaaaacagaaatatttttacttatttctgtccactatgtttgtgtgtatgtgtgtgtttgtgtgtgtatgtgtggttttgatgccagcaatgcaaacaccaatatatctattaagaagtgattgaatttagattggaaaaaataaaatagttacatgtaaagacataaactctttccttcttaaatgtgattttcaactctatgatagaaactccctctaaaaaacaagcagggcaagaacaaacttacttgtaatgggtgagagaaaataagcaaatctcattggctcattcctgtttttaggaagttgcagtgggattaatgtcaattggaagggatgcagcaagtttagagaaggtgttggcactaacgctgcttgtttggcaaatcatcatcactgaggtattccacccagagactttttcaaaaaagtcaactaaagtgctaagtcataagaggagagccattatacccgttgtctttctgggctccttgagtttatctggattccaacagcacttggaaagtaccgccctccactacctcaaatgcaaacacaatctctgccagtagacattggaattagacttagtgaaaaccaggaaaaaaaaaaaaaactaaaatataactcagccttagtttgcagactcaactgtcaacactttgaaaccctactccatattcaagagagtcaacaggccctatgtcacattgtaggctaagaaacctcagctatgactactatttcactcaaagtaagaccatgtacatcctggattttgatatgcctgcattttggaaaaaaaaattgaggatttagcccagtcgctttcccttgatatagccttgttctgaattaaaatggaaaaaatatttcaattattttcatcttgttctcaactggatgttagtcaatgtggtctctttttgaatatgtatcaaatattaatgatccataatattagggagataattttaaatgaagtgatacgtgtctaacttacttaaagaataagtttttggtttttgcttttaaagacaaccaaatctgatattgttcatcctgataaaaataacaacttttagtgcttaaagcattaattaagcaagtggctaggtatgataaagaacttctgcttgctccccaagaggcaaactattagaagaactggagcgggagtcctttggacccatcgtggatctctttaagccactgctacccaaaaacattcaggacaagcaaacatttagagcaagaatctccaaattcttcaggatttgtaatgaaatgatgttcagttccattttgctctttacatagggtggagaattgtcatgtcttctctaatttttccaagtaaagtggtagcaaaatgttttaaaaagcaatcttatattagaaaacaaaaatgttgtcacttgaaataccaaaacaacatttctgagcgttgttgagggactggcaaagcaatcagctactataacaaatcagtagaaataaccctcccacaccagatatgcatgcagaaggaatggagtattatagagacttgatacaatggacatatgcacatggaggtacaaaacacacagtctaaatacaaatgaattccatcagatttactatacggaacatcagtagtgacagattgcacttcttacttaataacagcaaacttaatttctgaggggaaaaaaatggcgaagtcttatcccaaacaaatagcaagagaggtatcatcaaagagctaaaattttctttggcatggtaaagggggaaattgagtttaccaacttatttacatgacatttctctatattggtgagtaatgcaatgccattttgttacataaagttgtttgatgttttttaatatgccttcatataaatattttattcaatatgttgtatttgtgaatttaacaaatgatattaaacacaaactacaatgcagacagacaaactctttgtatgcaaattagcaatacataccaacagttcttgatacacaggtacctactacatgcagctcatcattgctgtcctcttcccatgctacaggtgagaccagacacaaagtaaatgacctaactcaattacaaataacaaggacccctctgcaatatgtctaaacatatattagaagaaagtatttgacatccttcatagggataaatgcccttatagacaccccatatataaaacacaacagagatacacatttacataaatctcagtcatttacaaaaataaatcttgtcttaatttaaaccaataaacagacttgcaggggaaaaagaaaccagcaagtagggctaattatcagtaacaaatagatgggggtgtttgctctgtgtgtgtgtgtgtgtgtgtgtgtgtgtgtgtgtatatgtgtgtgtttgtgtgaagtgaagtgttgctgctgtaagtagtgtccataagcccatttgactgtattacaagttagttaattactcatatagttggccacatattatgggatctatgttttctgaaaataattggttaatggaagttatctaatatattttaactgttcctgttaaaaacaataggcttcaagatgacataacaccaaatcaaaaatgaccaaaggaatcattttgtttgttagatttgtaatttagcatcattggcaataaatctactcaaacgtt

SEQ ID NO: 143357 - DNA, 1487 bp, Homo sapiens
  Payload ID: 8318
  Gene Symbol: ITGBL1
  Gene Name: integrin, beta-like 1 (with EGF-like repeat domains)
  ENST ID: ENST00000490242
  CDS Start-End: 1-625
ctgtgaaggtcatggacagtgtaattgcggaagatgtgactgcaaagcaggctggtatgggaagaagtgtgagcacccacagtcctgcacgctgtcagctgaggagagcatcaggaagtgccagggaagctcggatctgccttgctctgggaggggtaaatgtgaatgtggcaaatgcacctgctatcctccaggagatcgccgggtgtatggcaagacttgtgagtgtgatgatcgccgctgtgaagacctcgatggtgtggtctgtggaggccacggcacatgttcctgtggtcgctgtgtttgtgagagaggatggtttggaaagctctgccaacatccgcggaagtgtaacatgacggaagaacaaagcaagaatctgtgtgaatcagcagatggcatattgtgctcggggaagggttcttgtcattgtgggaagtgcatttgttctgctgaagagtggtatatttctggggagttctgtgactgtgatgacagagactgcgacaaacatgatggtctcatttgtacagggaatggaatatgtagctgtggaaactgtgaatgctgggatggatggaatggaaatgcatgtgaaatctggcttggctcagaatatccttaacaattacatgagagagcaattttgatgacgtattcgctgatgcacagacattggaattcattacattatctagccatcgtaatacaaatgacctttggatttctctatcacggcgcttatcctcctattaaggatcagaaagttaaactttacggaccacgtacgtccctgtctcatattcttctttgttggtttctgtttaatactttaaagctgtaaaaaaaatttaaaaaattccttctgagctcccaggccatacaaaagcaacttaagggtggatttggctggcagctgggcagtactttgtcagcctcagctccactggaactgcccttgattctctatagctcatcacaaaacctcaggtatgtcttatttttcttataatcctctgtatgttattatcctttttattaacaacaacaactacaacaaaagtgctgctctttttcatagtctcatgtaagaagagtgtcaaaaatgtcctcggcatttgttttctcagaaaaagaatttagatattggagaaattatcataccataaaaagttcaaaatgtgattcatctaaaattttggacaaagatgaaaatatagtcagctctgttctagtgttcatttagttagaaaccatagtaccggaactgtattatagtagaagttaatggtacctaaactctaaggaatgctttttctttgaaaacagaaatatttttacttatttctgtccactatgtttgtgtgtatgtgtgtgtttgtgtgtgtatgtgtggttttgatgccagcaatgcaaacaccaatatatctattaagaagtgattgaatttagattggaaaaaataaaatagttacatgtaaagacat

SEQ ID NO: 143358 - DNA, 2369 bp, Homo sapiens
  Payload ID: 8318
  Gene Symbol: ITGBL1
  Gene Name: integrin, beta-like 1 (with EGF-like repeat domains)
  ENST ID: ENST00000622834
  CDS Start-End: 379-1584
agctcatcaacgcaattgcaactccggctggagccccggacctgcaagcctgggtgtccgtgggtccgtctgcccagccatctgctggtggcacctctccctcctgccgcctccctcggtgaaccccaccttgcagaagtgcagctcgcccggagcagcccaggagctcagcatgcgtcccccaggcttcaggaacttcttgctgctggcgtcctcccttctctttgctgggttgtcagctgttcctcaaagcttctcgccatctctgaggagctggccgggcgccgcctgcaggctgtcccgggccgagtcggagcggcgtctgcatctgccacgtgactgagccgggcatgttcttcgggcccctgtgtgagtgccatgagtgggtgtgcgagacctacgacgggagcacctgtgcaggccatggtaagtgtgggcaagtgcaagtgtgaccagggatggtatggggatgcttgccagtacccaactaactgtgacttgacaaagaagaaaagtaaccaaatgtgcaagaattcacaagacatcatctgctctaatgcaggtacatgtcactgtggcaggtgtaagtgtgataattcagatggaagtggacttgtgtatggtaaattttgtgagtgtgacgatagagaatgcatagacgatgaaacagaagaaatatgtggaggccatgggaagtgttactgtggaaactgctactgcaaggctggttggcatggagataaatgtgaattccagtgcgatatcaccccctgggaaagcaagcgaagatgcacgtctccagatggcaaaatctgcagtaacagagggacttgtgtatgtggtgaatgtacctgtcacgatgttgatccgactggggactggggagatattcatggggacacctgtgaatgtgatgagagggactgtagagctgtctatgaccgatattctgatgacttctgttcaggtcatggacagtgtaattgcggaagatgtgactgcaaagcaggctggtatgggaagaagtgtgagcacccacagtcctgcacgctgtcagctgaggagagcatcaggaagtgccagggaagctcggatctgccttgctctgggaggggtaaatgtgaatgtggcaaatgcacctgctatcctccaggagatcgccgggtgtatggcaagacttgtgagtgtgatgatcgccgctgtgaagacctcgatggtgtggtctgtggaggccacggcacatgttcctgtggtcgctgtgtttgtgagagaggatggtttggaaagctctgccaacatccgcggaagtgtaacatgacggaagaacaaagcaagaatctgtgtgaatcagcagatggcatattgtgctcggggaagggttcttgtcattgtgggaagtgcatttgttctgctgaagagtggtatatttctggggagttctgtgactgtgatgacagagactgcgacaaacatgatggtctcatttgtacagggaatggaatatgtagctgtggaaactgtgaatgctgggatggatggaatggaaatgcatgtgaaatctggcttggctcagaatatccttaacaattacatgagagaggtctggattcttattttttctgggccattagaacagataaatgcgaaggaaaccatgtatattcaccactaggacaggttaaaaagaccattgtatgtttttctatttctgaattacgaatgaaatccgagtacctattagaaatgagttatgcaaatttagatgcaaataacattagaaaaaaaagattcttccataattaacataagtggttcctaacgagagcaatttttccacccaaaagtcatttggcaacatctacagacaattttgattgtcacactgggtcgggtaggaaggtatgctgcagacatttggtgggtagaggccagggatgctgctgagcatcccgcagtgtacaggacagcccccaaacaaggaattatccagccccaaatgccaatagggctcaaactgagaaacattgagttatatggctattagaaatccacattcttacacaagaaagaccatattagaatctaaggaaaacatgcatattcacattaattaatcgatcagatttttccagaattccgtatcagtcaccattttaatatggggacaatgaagacaagcacacaggaggtagaatatcagagtggggctggatcaagggcaaaaactggtcattaagtcatctgacattaaatcatttagccactaagttatttgtctactctcactttaaactcaccaaagaagattctcttaaagaaattatgaaaaatgtacaatttaacattttaaataaatagtgacagaagtt

SEQ ID NO: 143359 - DNA, 2368 bp, Homo sapiens
  Payload ID: 8318
  Gene Symbol: ITGBL1
  Gene Name: integrin, beta-like 1 (with EGF-like repeat domains)
  ENST ID: ENST00000618057
  CDS Start-End: 242-1579
actctccactgaggggtttggcaccagcaccccgcccagagcagtgccgctgcccaaatcctcgcaggcagctcatcaacgcaattgcaactccggctggagccccggacctgcaagcctgggtgtccgtgggtccgtctgcccagccatctgctggtggcacctctccctcctgccgcctccctcggtgaaccccaccttgcagaagtgcagctcgcccggagcagcccaggagctcagcatgcgtcccccaggcttcaggaacttcttgctgctggcgtcctcccttctctttgctgggttgtcagctgttcctcaaagcttctcgccatctctgaggagctggccgggcgccgcctgcaggctgtcccgggccgagtcggagcgacgctgccgcgcacctgggcagcccccgggggccgcgctgtgccacggccggggccgctgcgactgcggcgtctgcatctgccacgtgactgagccgggcatgttcttcgggcccctgtgtgagtgccatgagtgggtgtgcgagacctacgacgggagcacctgtgcaggtacatgtcactgtggcaggtgtaagtgtgataattcagatggaagtggacttgtgtatggtaaattttgtgagtgtgacgatagagaatgcatagacgatgaaacagaagaaatatgtggaggccatgggaagtgttactgtggaaactgctactgcaaggctggttggcatggagataaatgtgaattccagtgcgatatcaccccctgggaaagcaagcgaagatgcacgtctccagatggcaaaatctgcagtaacagagggacttgtgtatgtggtgaatgtacctgtcacgatgttgatccgactggggactggggagatattcatggggacacctgtgaatgtgatgagagggactgtagagctgtctatgaccgatattctgatgacttctgttcaggtcatggacagtgtaattgcggaagatgtgactgcaaagcaggctggtatgggaagaagtgtgagcacccacagtcctgcacgctgtcagctgaggagagcatcaggaagtgccagggaagctcggatctgccttgctctgggaggggtaaatgtgaatgtggcaaatgcacctgctatcctccaggagatcgccgggtgtatggcaagacttgtgagtgtgatgatcgccgctgtgaagacctcgatggtgtggtctgtggaggccacggcacatgttcctgtggtcgctgtgtttgtgagagaggatggtttggaaagctctgccaacatccgcggaagtgtaacatgacggaagaacaaagcaagaatctgtgtgaatcagcagatggcatattgtgctcggggaagggttcttgtcattgtgggaagtgcatttgttctgctgaagagtggtatatttctggggagttctgtgactgtgatgacagagactgcgacaaacatgatggtctcatttgtacagggaatggaatatgtagctgtggaaactgtgaatgctgggatggatggaatggaaatgcatgtgaaatctggcttggctcagaatatccttaacaattacatgagagaggtctggattcttattttttctgggccattagaacagataaatgcgaaggaaaccatgtatattcaccactaggacaggttaaaaagaccattgtatgtttttctatttctgaattacgaatgaaatccgagtacctattagaaatgagttatgcaaatttagatgcaaataacattagaaaaaaaagattcttccataattaacataagtggttcctaacgagagcaatttttccacccaaaagtcatttggcaacatctacagacaattttgattgtcacactgggtcgggtaggaaggtatgctgcagacatttggtgggtagaggccagggatgctgctgagcatcccgcagtgtacaggacagcccccaaacaaggaattatccagccccaaatgccaatagggctcaaactgagaaacattgagttatatggctattagaaatccacattcttacacaagaaagaccatattagaatctaaggaaaacatgcatattcacattaattaatcgatcagatttttccagaattccgtatcagtcaccattttaatatggggacaatgaagacaagcacacaggaggtagaatatcagagtggggctggatcaagggcaaaaactggtcattaagtcatctgacattaaatcatttagccactaagttatttgtctactctcactttaaactcaccaaagaagattctcttaaagaaattatgaaaaatgtacaatttaacattttaaataaatagtgacagaagttgttt

SEQ ID NO: 143360 - DNA, 1546 bp, Homo sapiens
  Payload ID: 8319
  Gene Symbol: IBSP
  Gene Name: integrin-binding sialoprotein
  Uniprot ID: P21815
  ENST ID: ENST00000226284
  CDS Start-End: 68-1021
tctgtgccactcactgccttgagcctgcttcctcactccaggactgccagaggaagcaatcaccaaaatgaagactgctttaattttgctcagcattttgggaatggcctgtgctttctcaatgaaaaatttgcatcgaagagtcaaaatagaggattctgaagaaaatggggtctttaagtacaggccacgatattatctttacaagcatgcctacttttatcctcatttaaaacgatttccagttcagggcagtagtgactcatccgaagaaaatggagatgacagttcagaagaggaggaggaagaagaggagacttcaaatgaaggagaaaacaatgaagaatcgaatgaagatgaagactctgaggctgagaataccacactttctgctacaacactgggctatggagaggacgccacgcctggcacagggtatacagggttagctgcaatccagcttcccaagaaggctggggatataacaaataaagctacaaaagagaaggaaagtgatgaagaagaagaggaggaagaggaaggaaatgaaaacgaagaaagcgaagcagaagtggatgaaaacgaacaaggcataaacggcaccagtaccaacagcacagaggcagaaaacggcaacggcagcagcggaggagacaatggagaagaaggggaagaagaaagtgtcactggagccaatgcagaagacaccacagagaccggaaggcagggcaagggcacctcgaagacaacaacctctccaaatggtgggtttgaacctacaaccccaccacaagtctatagaaccacttccccaccttttgggaaaaccaccaccgttgaatacgagggggagtacgaatacacgggcgccaatgaatacgacaatggatatgaaatctatgaaagtgagaacggggaacctcgtggggacaattaccgagcctatgaagatgagtacagctactttaaaggacaaggctacgatggctatgatggtcagaattactaccaccaccagtgaagctccagcctgggatgaattcatccattctggctttgcatccggctaccattttcgaagttcaactcaggaaggtgcaatataacaaatgtgcatattataatgaggaatggtactaccgttccagattttctgtaattgcttctgcaaagtaataggcttcttgtcccttttttttctggcatgttatggaatgatcattgtaaatcaggaccatttatcaagcagtacaccaactcataagatcaaatttcattgaatggtttgaggttgtagctctataaatagtagtttttaacatgcctgtagtattgctaactgcaaaaacatactctttgtacaagaagtgcttctaagaatttcattgacattaatgacactgtatacaataaatgtgtagtttcttaatcgcactacctatgcaacactgtgtattaggtttatcatcctcatgtatttttatgtgacctgtatgtatattctaatctacgagttttatcacaaataaaaatgcaatccttcaaa

SEQ ID NO: 143361 - DNA, 1802 bp, Homo sapiens
  Payload ID: 8320
  Gene Symbol: ILK
  Gene Name: integrin-linked kinase
  Uniprot ID: Q13418
  ENST ID: ENST00000299421
  CDS Start-End: 185-1543
aagagcgccacgggcggggcggggccggcggcgggctgcgggcgcggccggacgggagttccccggagaaggatcctgcagcccgagtcccgaggataaagcttggggttcatcctccttccctggatcactccacagtcctcaggcttccccaatccaggggactcggcgccgggacgctgctatggacgacattttcactcagtgccgggagggcaacgcagtcgccgttcgcctgtggctggacaacacggagaacgacctcaaccagggggacgatcatggcttctcccccttgcactgggcctgccgagagggccgctctgctgtggttgagatgttgatcatgcggggggcacggatcaatgtaatgaaccgtggggatgacacccccctgcatctggcagccagtcatggacaccgtgatattgtacagaagctattgcagtacaaggcagacatcaatgcagtgaatgaacacgggaatgtgcccctgcactatgcctgtttttggggccaagatcaagtggcagaggacctggtggcaaatggggcccttgtcagcatctgtaacaagtatggagagatgcctgtggacaaagccaaggcacccctgagagagcttctccgagagcgggcagagaagatgggccagaatctcaaccgtattccatacaaggacacattctggaaggggaccacccgcactcggccccgaaatggaaccctgaacaaacactctggcattgacttcaaacagcttaacttcctgacgaagctcaacgagaatcactctggagagctatggaagggccgctggcagggcaatgacattgtcgtgaaggtgctgaaggttcgagactggagtacaaggaagagcagggacttcaatgaagagtgtccccggctcaggattttctcgcatccaaatgtgctcccagtgctaggtgcctgccagtctccacctgctcctcatcctactctcatcacacactggatgccgtatggatccctctacaatgtactacatgaaggcaccaatttcgtcgtggaccagagccaggctgtgaagtttgctttggacatggcaaggggcatggccttcctacacacactagagcccctcatcccacgacatgcactcaatagccgtagtgtaatgattgatgaggacatgactgcccgaattagcatggctgatgtcaagttctctttccaatgtcctggtcgcatgtatgcacctgcctgggtagcccccgaagctctgcagaagaagcctgaagacacaaacagacgctcagcagacatgtggagttttgcagtgcttctgtgggaactggtgacacgggaggtaccctttgctgacctctccaatatggagattggaatgaaggtggcattggaaggccttcggcctaccatcccaccaggtatttcccctcatgtgtgtaagctcatgaagatctgcatgaatgaagaccctgcaaagcgacccaaatttgacatgattgtgcctatccttgagaagatgcaggacaagtaggactggaaggtccttgcctgaactccagaggtgtcgggacatggttgggggaatgcacctccccaaagcagcaggcctctggttgcctcccccgcctccagtcatggtactaccccagccatggggtccatccccttcccccatccctaccactgtggccccaagaggggcgggctcagagctttgtcacttgccacatggtgtctcccaacatgggagggatcagccccgcctgtcacaataaagtttattatgaaaa

SEQ ID NO: 143362 - DNA, 2074 bp, Homo sapiens
  Payload ID: 8320
  Gene Symbol: ILK
  Gene Name: integrin-linked kinase
  Uniprot ID: Q13418
  ENST ID: ENST00000396751
  CDS Start-End: 457-1815
agtcccggtgagtgcgagaggacccgcgccccctgtcacccctcacttctcctgagtcccaagtaaggaacggagccaaccctggggaggacccccggtcccctctcccagagtatacggagcctgaacctccccacttcccccaactctgttcgcggatagggtctagttgcctgctctcggacatccgttcagcagacactacctcttcgtcaccccctgcccaccctgacccgcctttacctcgcgtctagaggacacagccagggatcatcccgcagccccgaactccttcacagacccccactagccggggacgcagctcaggccccctacccccaacacaaacacttctctcctgtagaggataaagcttggggttcatcctccttccctggatcactccacagtcctcaggcttccccaatccaggggactcggcgccgggacgctgctatggacgacattttcactcagtgccgggagggcaacgcagtcgccgttcgcctgtggctggacaacacggagaacgacctcaaccagggggacgatcatggcttctcccccttgcactgggcctgccgagagggccgctctgctgtggttgagatgttgatcatgcggggggcacggatcaatgtaatgaaccgtggggatgacacccccctgcatctggcagccagtcatggacaccgtgatattgtacagaagctattgcagtacaaggcagacatcaatgcagtgaatgaacacgggaatgtgcccctgcactatgcctgtttttggggccaagatcaagtggcagaggacctggtggcaaatggggcccttgtcagcatctgtaacaagtatggagagatgcctgtggacaaagccaaggcacccctgagagagcttctccgagagcgggcagagaagatgggccagaatctcaaccgtattccatacaaggacacattctggaaggggaccacccgcactcggccccgaaatggaaccctgaacaaacactctggcattgacttcaaacagcttaacttcctgacgaagctcaacgagaatcactctggagagctatggaagggccgctggcagggcaatgacattgtcgtgaaggtgctgaaggttcgagactggagtacaaggaagagcagggacttcaatgaagagtgtccccggctcaggattttctcgcatccaaatgtgctcccagtgctaggtgcctgccagtctccacctgctcctcatcctactctcatcacacactggatgccgtatggatccctctacaatgtactacatgaaggcaccaatttcgtcgtggaccagagccaggctgtgaagtttgctttggacatggcaaggggcatggccttcctacacacactagagcccctcatcccacgacatgcactcaatagccgtagtgtaatgattgatgaggacatgactgcccgaattagcatggctgatgtcaagttctctttccaatgtcctggtcgcatgtatgcacctgcctgggtagcccccgaagctctgcagaagaagcctgaagacacaaacagacgctcagcagacatgtggagttttgcagtgcttctgtgggaactggtgacacgggaggtaccctttgctgacctctccaatatggagattggaatgaaggtggcattggaaggccttcggcctaccatcccaccaggtatttcccctcatgtgtgtaagctcatgaagatctgcatgaatgaagaccctgcaaagcgacccaaatttgacatgattgtgcctatccttgagaagatgcaggacaagtaggactggaaggtccttgcctgaactccagaggtgtcgggacatggttgggggaatgcacctccccaaagcagcaggcctctggttgcctcccccgcctccagtcatggtactaccccagccatggggtccatccccttcccccatccctaccactgtggccccaagaggggcgggctcagagctttgtcacttgccacatggtgtctcccaacatgggagggatcagccccgcctgtcacaataaagtttattatgaaaa

SEQ ID NO: 143363 - DNA, 1692 bp, Homo sapiens
  Payload ID: 8320
  Gene Symbol: ILK
  Gene Name: integrin-linked kinase
  Uniprot ID: Q13418
  ENST ID: ENST00000420936
  CDS Start-End: 112-1470
gcggcgggctgcgggcgcggccggacgggagttccccggagaaggatcctgcagcccgagtcccgtcctcaggcttccccaatccaggggactcggcgccgggacgctgctatggacgacattttcactcagtgccgggagggcaacgcagtcgccgttcgcctgtggctggacaacacggagaacgacctcaaccagggggacgatcatggcttctcccccttgcactgggcctgccgagagggccgctctgctgtggttgagatgttgatcatgcggggggcacggatcaatgtaatgaaccgtggggatgacacccccctgcatctggcagccagtcatggacaccgtgatattgtacagaagctattgcagtacaaggcagacatcaatgcagtgaatgaacacgggaatgtgcccctgcactatgcctgtttttggggccaagatcaagtggcagaggacctggtggcaaatggggcccttgtcagcatctgtaacaagtatggagagatgcctgtggacaaagccaaggcacccctgagagagcttctccgagagcgggcagagaagatgggccagaatctcaaccgtattccatacaaggacacattctggaaggggaccacccgcactcggccccgaaatggaaccctgaacaaacactctggcattgacttcaaacagcttaacttcctgacgaagctcaacgagaatcactctggagagctatggaagggccgctggcagggcaatgacattgtcgtgaaggtgctgaaggttcgagactggagtacaaggaagagcagggacttcaatgaagagtgtccccggctcaggattttctcgcatccaaatgtgctcccagtgctaggtgcctgccagtctccacctgctcctcatcctactctcatcacacactggatgccgtatggatccctctacaatgtactacatgaaggcaccaatttcgtcgtggaccagagccaggctgtgaagtttgctttggacatggcaaggggcatggccttcctacacacactagagcccctcatcccacgacatgcactcaatagccgtagtgtaatgattgatgaggacatgactgcccgaattagcatggctgatgtcaagttctctttccaatgtcctggtcgcatgtatgcacctgcctgggtagcccccgaagctctgcagaagaagcctgaagacacaaacagacgctcagcagacatgtggagttttgcagtgcttctgtgggaactggtgacacgggaggtaccctttgctgacctctccaatatggagattggaatgaaggtggcattggaaggccttcggcctaccatcccaccaggtatttcccctcatgtgtgtaagctcatgaagatctgcatgaatgaagaccctgcaaagcgacccaaatttgacatgattgtgcctatccttgagaagatgcaggacaagtaggactggaaggtccttgcctgaactccagaggtgtcgggacatggttgggggaatgcacctccccaaagcagcaggcctctggttgcctcccccgcctccagtcatggtactaccccagccatggggtccatccccttcccccatccctaccactgtggccccaagaggggcgggctcagagctttgtcacttgccacatggtgtctcccaacatgggaggga

SEQ ID NO: 143364 - DNA, 851 bp, Homo sapiens
  Payload ID: 8320
  Gene Symbol: ILK
  Gene Name: integrin-linked kinase
  ENST ID: ENST00000526114
  CDS Start-End: 143-253
cgcggccggacgggagttccccggagaaggatcctgcagcccgagtcccgaggataaagcttggggttcatcctccttccctggatcactccacagtcctcaggcttccccaatccaggggactcggcgccgggacgctgctatggacgacattttcactcagtgccgggagggcaacgcagtcgccgttcgcctgtggctggacaacacggagaacgacctcaaccagggtatcgtcttggatgctttgtgaagagcaggtggaaaggaggcaattgcctagttcatcgtagaagtaatgatgtcttggactagaattaggggacgatcatggcttctcccccttgcactgggcctgccgagagggccgctctgctgtggttgagatgttgatcatgcggggggcacggatcaatgtaatgaaccgtggggatgacacccccctgcatctggcagccagtcatggacaccgtgatattgtacagaagctattgcagtacaaggcagacatcaatgcagtgaatgaacacgggaatgtgcccctgcactatgcctgtttttggggccaagatcaagtggcagaggacctggtggcaaatggggcccttgtcagcatctgtaacaagtatggagagatgcctgtggacaaagccaaggcacccctgagagagcttctccgagagcgggcagagaagatgggccagaatctcaaccgtattccatacaaggacacattctggaaggggaccacccgcactcggccccgaaatggaaccctgaacaaacactctggcattgacttcaaacagcttaacttcctgacgaagctcaacgagaatcactctggagag

SEQ ID NO: 143365 - DNA, 1617 bp, Homo sapiens
  Payload ID: 8320
  Gene Symbol: ILK
  Gene Name: integrin-linked kinase
  Uniprot ID: Q13418
  ENST ID: ENST00000532063
  CDS Start-End: 398-1354
agggacggaggcccgcgctgcccaagagcgccacgggcggggcggggccggcggcgggctgcgggcgcggccggacgggagttccccggagaaggatcctgcagcccgagtcccgtcctcaggcttccccaatccaggggactcggcgccgggacgctgctatggacgacattttcactcagtgccgggagggcaacgcagtcgccgttcgcctgtggctggacaacacggagaacgacctcaaccagggctattgcagtacaaggcagacatcaatgcagtgaatgaacacgggaatgtgcccctgcactatgcctgtttttggggccaagatcaagtggcagaggacctggtggcaaatggggcccttgtcagcatctgtaacaagtatggagagatgcctgtggacaaagccaaggcacccctgagagagcttctccgagagcgggcagagaagatgggccagaatctcaaccgtattccatacaaggacacattctggaaggggaccacccgcactcggccccgaaatggaaccctgaacaaacactctggcattgacttcaaacagcttaacttcctgacgaagctcaacgagaatcactctggagagctatggaagggccgctggcagggcaatgacattgtcgtgaaggtgctgaaggttcgagactggagtacaaggaagagcagggacttcaatgaagagtgtccccggctcaggattttctcgcatccaaatgtgctcccagtgctaggtgcctgccagtctccacctgctcctcatcctactctcatcacacactggatgccgtatggatccctctacaatgtactacatgaaggcaccaatttcgtcgtggaccagagccaggctgtgaagtttgctttggacatggcaaggggcatggccttcctacacacactagagcccctcatcccacgacatgcactcaatagccgtagtgtaatgattgatgaggacatgactgcccgaattagcatggctgatgtcaagttctctttccaatgtcctggtcgcatgtatgcacctgcctgggtagcccccgaagctctgcagaagaagcctgaagacacaaacagacgctcagcagacatgtggagttttgcagtgcttctgtgggaactggtgacacgggaggtaccctttgctgacctctccaatatggagattggaatgaaggtggcattggaaggccttcggcctaccatcccaccaggtatttcccctcatgtgtgtaagctcatgaagatctgcatgaatgaagaccctgcaaagcgacccaaatttgacatgattgtgcctatccttgagaagatgcaggacaagtaggactggaaggtccttgcctgaactccagaggtgtcgggacatggttgggggaatgcacctccccaaagcagcaggcctctggttgcctcccccgcctccagtcatggtactaccccagccatggggtccatccccttcccccatccctaccactgtggccccaagaggggcgggctcagagctttgtcacttgccacatggtgtctcccaacatgggagggatcagccccgcctgtcacaataaagtttattatgaaaacagg

SEQ ID NO: 143366 - DNA, 1559 bp, Homo sapiens
  Payload ID: 8320
  Gene Symbol: ILK
  Gene Name: integrin-linked kinase
  Uniprot ID: Q13418
  ENST ID: ENST00000528995
  CDS Start-End: 129-1304
agttccccggagaaggatcctgcagcccgagtcccgaggataaagcttggggttcatcctccttccctggatcactccacagtcctcaggcttccccaatccaggggactcggcgccgggacgctgctatggacgacattttcactcagtgccgggagggcaacgcagtcgccgttcgcctgtggctggacaacacggagaacgacctcaaccagggggacgatcatggcttctcccccttgcactgggcctgccgagagggccgctctgctgtggttgagatgttgatcatgcggggggcacggatcaatgtaatgaaccgtggggatgacacccccctgcatctggcagccagtcatggacaccgtgatattgtacagaagctattgcagtacaaggcagacatcaatgcagtgaatgaacacgggaatgtgcccctgcactatgcctgtttttggggccaagatcaagtggcagagagcgggcagagaagatgggccagaatctcaaccgtattccatacaaggacacattctggaaggggaccacccgcactcggccccctatggaagggccgctggcagggcaatgacattgtcgtgaaggtgctgaaggttcgagactggagtacaaggaagagcagggacttcaatgaagagtgtccccggctcaggattttctcgcatccaaatgtgctcccagtgctaggtgcctgccagtctccacctgctcctcatcctactctcatcacacactggatgccgtatggatccctctacaatgtactacatgaaggcaccaatttcgtcgtggaccagagccaggctgtgaagtttgctttggacatggcaaggggcatggccttcctacacacactagagcccctcatcccacgacatgcactcaatagccgtagtgtaatgattgatgaggacatgactgcccgaattagcatggctgatgtcaagttctctttccaatgtcctggtcgcatgtatgcacctgcctgggtagcccccgaagctctgcagaagaagcctgaagacacaaacagacgctcagcagacatgtggagttttgcagtgcttctgtgggaactggtgacacgggaggtaccctttgctgacctctccaatatggagattggaatgaaggtggcattggaaggccttcggcctaccatcccaccaggtatttcccctcatgtgtgtaagctcatgaagatctgcatgaatgaagaccctgcaaagcgacccaaatttgacatgattgtgcctatccttgagaagatgcaggacaagtaggactggaaggtccttgcctgaactccagaggtgtcgggacatggttgggggaatgcacctccccaaagcagcaggcctctggttgcctcccccgcctccagtcatggtactaccccagccatggggtccatccccttcccccatccctaccactgtggccccaagaggggcgggctcagagctttgtcacttgccacatggtgtctcccaacatgggagggatcagccccgcctgtcacaataaagtttattatg

SEQ ID NO: 143367 - DNA, 891 bp, Homo sapiens
  Payload ID: 8320
  Gene Symbol: ILK
  Gene Name: integrin-linked kinase
  ENST ID: ENST00000527121
  CDS Start-End: 88-198
acgggagttccccggagaaggatcctgcagcccgagtcccgtcctcaggcttccccaatccaggggactcggcgccgggacgctgctatggacgacattttcactcagtgccgggagggcaacgcagtcgccgttcgcctgtggctggacaacacggagaacgacctcaaccagggtatcgtcttggatgctttgtgaagagcaggtggaaaggaggcaattgcctagttcatcgtagaagtaatgatgtcttggactagaattaggggacgatcatggcttctcccccttgcactgggcctgccgagagggccgctctgctgtggttgagatgttgatcatgcggggggcacggatcaatgtaatgaaccgtggggatgacacccccctgcatctggcagccagtcatggacaccgtgatattgtacagaagctattgcagtacaaggcagacatcaatgcagtgaatgaacacgggaatgtgcccctgcactatgcctgtttttggggccaagatcaagtggcagaggacctggtggcaaatggggcccttgtcagcatctgtaacaagtatggagagatgcctgtggacaaagccaaggcacccctgagagagcttctccgagagcgggcagagaagatgggccagaatctcaaccgtattccatacaaggacacattctggaaggggaccacccgcactcggccccgaaatggaaccctgaacaaacactctggcattgacttcaaacagcttaacttcctgacgaagctcaacgagaatcactctggagagctatggaagggccgctggcagggcaatgacattgtcgtgaaggtgctgaaggttcgagactggagtacaaggaagagcagggacttcaatgaaga

SEQ ID NO: 143368 - DNA, 1801 bp, Homo sapiens
  Payload ID: 8320
  Gene Symbol: ILK
  Gene Name: integrin-linked kinase
  ENST ID: ENST00000537806
  CDS Start-End: 126-1577
gcggggcggggccggcggcgggctgcgggcgcggccggacgggagttccccggagaaggatcctgcagcccgagtcccgtcctcaggcttccccaatccaggggactcggcgccgggacgctgctatggacgacattttcactcagtgccgggagggcaacgcagtcgccgttcgcctgtggctggacaacacggagaacgacctcaaccagggggacgatcatggcttctcccccttgcactgggcctgccgagagggccgctctgctgtggttgagatgttgatcatgcggggggcacggatcaatgtaatgaaccgtggggatgacacccccctgcatctggcagccagtcatggacaccgtgatattgtacagaagctattgcagtacaaggcagacatcaatgcagtgaatgaacacgggaatgtgcccctgcactatgcctgtttttggggccaagatcaagtggcagaggacctggtggcaaatggggcccttgtcagcatctgtaacaagtatggagagatgcctgtggacaaagccaaggcacccctgagagagcttctccgaggtccatctccccatcccctagcttgtgtcctctcgtcccttcccacctgtcttctccctctgtaccacagcttaggttgtttttcttccctagagcgggcagagaagatgggccagaatctcaaccgtattccatacaaggacacattctggaaggggaccacccgcactcggccccgaaatggaaccctgaacaaacactctggcattgacttcaaacagcttaacttcctgacgaagctcaacgagaatcactctggagagctatggaagggccgctggcagggcaatgacattgtcgtgaaggtgctgaaggttcgagactggagtacaaggaagagcagggacttcaatgaagagtgtccccggctcaggattttctcgcatccaaatgtgctcccagtgctaggtgcctgccagtctccacctgctcctcatcctactctcatcacacactggatgccgtatggatccctctacaatgtactacatgaaggcaccaatttcgtcgtggaccagagccaggctgtgaagtttgctttggacatggcaaggggcatggccttcctacacacactagagcccctcatcccacgacatgcactcaatagccgtagtgtaatgattgatgaggacatgactgcccgaattagcatggctgatgtcaagttctctttccaatgtcctggtcgcatgtatgcacctgcctgggtagcccccgaagctctgcagaagaagcctgaagacacaaacagacgctcagcagacatgtggagttttgcagtgcttctgtgggaactggtgacacgggaggtaccctttgctgacctctccaatatggagattggaatgaaggtggcattggaaggccttcggcctaccatcccaccaggtatttcccctcatgtgtgtaagctcatgaagatctgcatgaatgaagaccctgcaaagcgacccaaatttgacatgattgtgcctatccttgagaagatgcaggacaagtaggactggaaggtccttgcctgaactccagaggtgtcgggacatggttgggggaatgcacctccccaaagcagcaggcctctggttgcctcccccgcctccagtcatggtactaccccagccatggggtccatccccttcccccatccctaccactgtggccccaagaggggcgggctcagagctttgtcacttgccacatggtgtctcccaacatgggagggatc

SEQ ID NO: 143369 - DNA, 1594 bp, Homo sapiens
  Payload ID: 8320
  Gene Symbol: ILK
  Gene Name: integrin-linked kinase
  ENST ID: ENST00000526711
  CDS Start-End: 139-261
aagagcgccacgggcggggcggggccggcggcgggctgcgggcgcggccggacgggagttccccggagaaggatcctgcagcccgagtcccgtcctcaggcttccccaatccaggggactcggcgccgggacgctgctatggacgacattttcactcagtgccgggagggcaacgcagtcgccgttcgcctgtggctggacaacacggagaacgacctcaaccagggctattgcagtacaaggcagacatcaatgcagtgaatgaacacgggaatgtgcccctgcactatgcctgtttttggggccaagatcaagtggcagaggacctggtggcaaatggggcccttgtcagcatctgtaacaagtatggagagatgcctgtggacaaagccaaggcacccctgagagagcttctccgagagcgggcagagaagatgggccagaatctcaaccgtattccatacaaggacacattctggaaggggaccacccgcactcggccccgaaatggaaccctgaacaaacactctggcattgacttcaaacagcttaacttcctgacgaagctcaacgagaatcactctggagagctatggaagggccgctggcagggcaatgacattgtcgtgaaggtgctgaaggttcgagactggagtacaaggaagagcagggacttcaatgaagagtgtccccggctcaggattttctcgcatccaaatgtgctcccagtgctaggtgcctgccagtctccacctgctcctcatcctactctcatcacacactggatgccgtatggatccctctacaatgtactacatgaaggcaccaatttcgtcgtggaccagagccaggctgtgaagtttgctttggacatggcaaggggcatggccttcctacacacactagagcccctcatcccacgacatgcactcaatagccgtagtgtaatgattgatgaggacatgactgcccgaattagcatggctgatgtcaagttctctttccaatgtcctggtcgcatgtatgcacctgcctgggtagcccccgaagctctgcagaagaagcctgaagacacaaacagacgctcagcagacatgtggagttttgcagtgcttctgtgggaactggtgacacgggaggtaccctttgctgacctctccaatatggagattggaatgaaggtggcattggaaggccttcggcctaccatcccaccaggtatttcccctcatgtgtgtaagctcatgaagatctgcatgaatgaagaccctgcaaagcgacccaaatttgacatgattgtgcctatccttgagaagatgcaggacaagtaggactggaaggtccttgcctgaactccagaggtgtcgggacatggttgggggaatgcacctccccaaagcagcaggcctctggttgcctcccccgcctccagtcatggtactaccccagccatggggtccatccccttcccccatccctaccactgtggccccaagaggggcgggctcagagctttgtcacttgccacatggtgtctcccaacatgggagggatcagccccgcctgtcacaataaagtttattatgaaaacagg

SEQ ID NO: 143370 - DNA, 596 bp, Homo sapiens
  Payload ID: 8320
  Gene Symbol: ILK
  Gene Name: integrin-linked kinase
  ENST ID: ENST00000526318
  CDS Start-End: 1-336
cgggagggcaacgcagtcgccgttcgcctgtggctggacaacacggagaacgacctcaaccagggggacgatcatggcttctcccccttgcactgggcctgccgagagggccgctctgctgtggttgagatgttgatcatgcggggggcacggatcaatgtaatgaaccgtggggatgacacccccctgcatctggcagccagtcatggacaccgtgatattgtacagaagctattgcagtacaaggcagacatcaatgcagtgaatgaacacgggaatgtgcccctgcactatgcctgtttttggggccaagatcaagtggcagaggacaagtaggactggaaggtccttgcctgaactccagaggtgtcgggacatggttgggggaatgcacctccccaaagcagcaggcctctggttgcctcccccgcctccagtcatggtactaccccagccatggggtccatccccttcccccatccctaccactgtggccccaagaggggcgggctcagagctttgtcacttgccacatggtgtctcccaacatgggagggatcagccccgcctgtcacaataaagtttattatgaaaac

SEQ ID NO: 143371 - DNA, 111 bp, Homo sapiens
  Payload ID: 8320
  Gene Symbol: ILK
  Gene Name: integrin-linked kinase
  ENST ID: ENST00000627400
  CDS Start-End: 1-111
atggacgacattttcactcagtgccgggagggcaacgcagtcgccgttcgcctgtggctggacaacacggagaacgacctcaaccagggtatcgtcttggatgctttgtga

SEQ ID NO: 143372 - DNA, 1490 bp, Homo sapiens
  Payload ID: 8321
  Gene Symbol: ILKAP
  Gene Name: integrin-linked kinase-associated serine/threonine phosphatase
  Uniprot ID: Q9H0C8
  ENST ID: ENST00000254654
  CDS Start-End: 177-1355
gggccacgccgcgcgccgattggtggcgtccgggactctccctgcaggtgactgacggcgccggccgcccctgcccgtcgcccgcccgctgctgccgcccgcccggggtgtggagcccggccgctgctcgcgggctgagtgtctgtcgctgctgccgcctccacccagcctccgccatggacctcttcggggacctgccggagcccgagcgctcgccgcgcccggctgccgggaaagaagctcagaaaggacccctgctctttgatgacctccctccggccagcagtactgactcaggatcagggggacctttgctttttgatgatctcccacccgctagcagtggcgattcaggttctcttgccacatcaatatcccagatggtaaagactgaagggaaaggagcaaagagaaaaacctccgaggaagagaagaatggcagtgaagagcttgtggaaaagaaagtttgtaaagcctcttcggtgatctttggtctgaagggctatgtggctgagcggaagggtgagagggaggagatgcaggatgcccacgtcatcctgaacgacatcaccgaggagtgtaggcccccatcgtccctcattactcgggtttcatattttgctgtttttgatggacatggaggaattcgagcctcaaaatttgctgcacagaatttgcatcaaaacttaatcagaaaatttcctaaaggagatgtaatcagtgtagagaaaaccgtgaagagatgccttttggacactttcaagcatactgatgaagagttccttaaacaagcttccagccagaagcctgcctggaaagatgggtccactgccacgtgtgttctggctgtagacaacattctttatattgccaacctcggagatagtcgggcaatcttgtgtcgttataatgaggagagtcaaaaacatgcagccttaagcctcagcaaagagcataatccaactcagtatgaagagcggatgaggatacagaaggctggaggaaacgtcagggatgggcgtgttttgggcgtgctagaggtgtcacgctccattggggacgggcagtacaagcgctgcggtgtcacctctgtgcccgacatcagacgctgccagctgacccccaatgacaggttcattttgttggcctgtgatgggctcttcaaggtctttaccccagaagaagccgtgaacttcatcttgtcctgtctcgaggatgaaaagatccagacccgggaagggaagtccgcagccgacgcccgctacgaagcagcctgcaacaggctggccaacaaggcggtgcagcggggctcggccgacaacgtcactgtgatggtggtgcggatagggcactgaggggtggcgcgcggccaggagcacgcatggtattgacttaaaaggttcattttgtgtgtgtgcacattgtgtgttttgtgtactcctgtgggactcccatggttgtaaataaaggtttctctttttttttcctag

SEQ ID NO: 143373 - DNA, 793 bp, Homo sapiens
  Payload ID: 8321
  Gene Symbol: ILKAP
  Gene Name: integrin-linked kinase-associated serine/threonine phosphatase
  ENST ID: ENST00000457149
  CDS Start-End: 156-793
ggtggcgtccgggactctccctgcaggtgactgacggcgccggccgcccctgcccgtcgcccgcccgctgctgccgcccgcccggggtgtggagcccggccgctgctcgcgggctgagtgtctgtcgctgctgccgcctccacccagcctccgccatggacctcttcggggacctgccggagcccgagcgctcgccgcgcccggctgccgggaaagaagctcagaaaggacccctgctctttgatgacctccctccggccagcagtactgactcaggatcagggggacctttgctttttgatgatctcccacccgctagcagtggcgattcaggttctcttgccacatcaatatcccagatggtaaagactgaagggaaaggagcaaagagaaaaacctccgaggaagagaagaatggcagtgaagagcttgtggaaaagaaagtttcctcttcggtgatctttggtctgaagggctatgtggctgagcggaagggtgagagggaggagatgcaggatgcccacgtcatcctgaacgacatcaccgaggagtgtaggcccccatcgtccctcattactcgggtttcatattttgctgtttttgatggacatggaggaattcgagcctcaaaatttgctgcacagaatttgcatcaaaacttaatcagaaaatttcctaaaggagatgtaatcagtgtagagaaaaccgtgaagagatgccttttggacactttcaagcatactgatgaagagttccttaaacaagcttccagccagaagcctgcctggaaaga

SEQ ID NO: 143374 - DNA, 1024 bp, Homo sapiens
  Payload ID: 8321
  Gene Symbol: ILKAP
  Gene Name: integrin-linked kinase-associated serine/threonine phosphatase
  ENST ID: ENST00000450411
  CDS Start-End: 1-612
gagaaaaccgtgaagagatgccttttggacactttcaagcatactgatgaagagttccttaaacaagcttccagccagaagcctgcctggaaagatgggtccactgccacgtgtgttctggctgtagacaacattctttatattgccaacctcggagatagtcgggcaatcttgtgtcgttataatgaggagagtcaaaaacatgcagccttaagcctcagcaaagagcataatccaactcagtatgaagagcggatgaggatacagaaggctggaggaaacgtcagggatgggcgtgttttgggcgtgctagaggtgtcacgctccattggggacgggcagtacaagcgctgcggtgtcacctctgtgcccgacatcagacgctgccagctgacccccaatgacaggttcattttgttggcctgtgatgggctcttcaaggtctttaccccagaagaagccgtgaacttcatcttgtcctgtctcgaggtgagaaatctcacacgggggtggtggttgtcccaattgtgtcttagttttcagagaagtagaagttctgagaccccatttcctcccattgtgggacagcccttgtgccctttttcagtgtgaactctgcctactgactcactggtcagtttgtcctgccagccctgatggagaccagagcagctcttcttcctggcagtcatgtctcaggaaagtgacagggtgcggggtcactccattcactcattccctttctcatctggtaggatgaaaagatccagacccgggaagggaagtccgcagccgacgcccgctacgaagcagcctgcaacaggctggccaacaaggcggtgcagcggggctcggccgacaacgtcactgtgatggtggtgcggatagggcactgaggggtggcgcgcggccaggagcacgcatggtattgacttaaaaggttcattttgtgtgtgtgcacattgtgtgttttgtgtactcctgtgggactcccatggttgtaaataaaggtttctcttttttt

SEQ ID NO: 143375 - DNA, 1335 bp, Homo sapiens
  Payload ID: 8321
  Gene Symbol: ILKAP
  Gene Name: integrin-linked kinase-associated serine/threonine phosphatase
  ENST ID: ENST00000612675
  CDS Start-End: 131-619
ggtgactgacggcgccggccgcccctgcccgtcgcccgcccgctgctgccgcccgcccggggtgtggagcccggccgctgctcgcgggctgagtgtctgtcgctgctgccgcctccacccagcctccgccatggacctcttcggggacctgccggagcccgagcgctcgccgcgcccggctgccgggaaagaagctcagaaaggacccctgctctttgatgacctccctccggccagcagtactgactcaggatcagggggacctttgctttttgatgatctcccacccgctagcagtggcgattcaggttctcttgccacatcaatatcccagatggtaaagactgaagggaaaggagcaaagagaaaaacctccgaggaagagaagaatggcagtgaagagcttgtggaaaagaaagtttgtaaagcctcttcggtgatctttggtctgaagggctatgtggctgagcggaagggtgagagggaggagatgcaggatgcccacgtcatcctgaacgacatcaccgaggagtgtaggcccccatcgtccctcatgagatgtaatcagtgtagagaaaaccgtgaagagatgccttttggacactttcaagcatactgatgaagagttccttaaacaagcttccagccagaagcctgcctggaaagatgggtccactgccacgtgtgttctggctgtagacaacattctttatattgccaacctcggagatagtcgggcaatcttgtgtcgttataatgaggagagtcaaaaacatgcagccttaagcctcagcaaagagcataatccaactcagtatgaagagcggatgaggatacagaaggctggaggaaacgtcagggatgggcgtgttttgggcgtgctagaggtgtcacgctccattggggacgggcagtacaagcgctgcggtgtcacctctgtgcccgacatcagacgctgccagctgacccccaatgacaggttcattttgttggcctgtgatgggctcttcaaggtctttaccccagaagaagccgtgaacttcatcttgtcctgtctcgaggatgaaaagatccagacccgggaagggaagtccgcagccgacgcccgctacgaagcagcctgcaacaggctggccaacaaggcggtgcagcggggctcggccgacaacgtcactgtgatggtggtgcggatagggcactgaggggtggcgcgcggccaggagcacgcatggtattgacttaaaaggttcattttgtgtgtgtgcacattgtgtgttttgtgtactcctgtgggactcccatggttgtaaataaaggtttctctttttttttcct

SEQ ID NO: 143376 - DNA, 1088 bp, Homo sapiens
  Payload ID: 8321
  Gene Symbol: ILKAP
  Gene Name: integrin-linked kinase-associated serine/threonine phosphatase
  ENST ID: ENST00000622223
  CDS Start-End: 131-955
ggtgactgacggcgccggccgcccctgcccgtcgcccgcccgctgctgccgcccgcccggggtgtggagcccggccgctgctcgcgggctgagtgtctgtcgctgctgccgcctccacccagcctccgccatggacctcttcggggacctgccggagcccgagcgctcgccgcgcccggctgccgggaaagaagctcagaaaggacccctgctctttgatgacctccctccggccagcagtactgactcaggatcagggggacctttgctttttgatgatctcccacccgctagcagtggcgattcaggagatgtaatcagtgtagagaaaaccgtgaagagatgccttttggacactttcaagcatactgatgaagagttccttaaacaagcttccagccagaagcctgcctggaaagatgggtccactgccacgtgtgttctggctgtagacaacattctttatattgccaacctcggagatagtcgggcaatcttgtgtcgttataatgaggagagtcaaaaacatgcagccttaagcctcagcaaagagcataatccaactcagtatgaagagcggatgaggatacagaaggctggaggaaacgtcagggatgggcgtgttttgggcgtgctagaggtgtcacgctccattggggacgggcagtacaagcgctgcggtgtcacctctgtgcccgacatcagacgctgccagctgacccccaatgacaggttcattttgttggcctgtgatgggctcttcaaggtctttaccccagaagaagccgtgaacttcatcttgtcctgtctcgaggatgaaaagatccagacccgggaagggaagtccgcagccgacgcccgctacgaagcagcctgcaacaggctggccaacaaggcggtgcagcggggctcggccgacaacgtcactgtgatggtggtgcggatagggcactgaggggtggcgcgcggccaggagcacgcatggtattgacttaaaaggttcattttgtgtgtgtgcacattgtgtgttttgtgtactcctgtgggactcccatggttgtaaataaaggtttctctttttttttcct

SEQ ID NO: 143377 - DNA, 1183 bp, Homo sapiens
  Payload ID: 8322
  Gene Symbol: ITLN1
  Gene Name: intelectin 1 (galactofuranose binding)
  Uniprot ID: Q8WWA0
  ENST ID: ENST00000326245
  CDS Start-End: 117-1058
aggagcgtttttggagaaagctgcactctgttgagctccagggcgcagtggagggagggagtgaaggagctctctgtacccaaggaaagtgcagctgagactcagacaagattacaatgaaccaactcagcttcctgctgtttctcatagcgaccaccagaggatggagtacagatgaggctaatacttacttcaaggaatggacctgttcttcgtctccatctctgcccagaagctgcaaggaaatcaaagacgaatgtcctagtgcatttgatggcctgtattttctccgcactgagaatggtgttatctaccagaccttctgtgacatgacctctgggggtggcggctggaccctggtggccagcgtgcacgagaatgacatgcgtgggaagtgcacggtgggcgatcgctggtccagtcagcagggcagcaaagcagtctacccagagggggacggcaactgggccaactacaacacctttggatctgcagaggcggccacgagcgatgactacaagaaccctggctactacgacatccaggccaaggacctgggcatctggcacgtgcccaataagtcccccatgcagcactggagaaacagctccctgctgaggtaccgcacggacactggcttcctccagacactgggacataatctgtttggcatctaccagaaatatccagtgaaatatggagaaggaaagtgttggactgacaacggcccggtgatccctgtggtctatgattttggcgacgcccagaaaacagcatcttattactcaccctatggccagcgggaattcactgcgggatttgttcagttcagggtatttaataacgagagagcagccaacgccttgtgtgctggaatgagggtcaccggatgtaacactgagcaccactgcattggtggaggaggatactttccagaggccagtccccagcagtgtggagatttttctggttttgattggagtggatatggaactcatgttggttacagcagcagccgtgagataactgaggcagctgtgcttctattctatcgttgagagttttgtgggagggaacccagacctctcctcccaaccatgagatcccaaggatggagaacaacttacccagtagctagaatgttaatggcagaagagaaaacaataaatcatattgactcaag

SEQ ID NO: 143378 - DNA, 1151 bp, Homo sapiens
  Payload ID: 8323
  Gene Symbol: ITLN2
  Gene Name: intelectin 2
  Uniprot ID: Q8WWU7
  ENST ID: ENST00000368029
  CDS Start-End: 59-1036
gcaggggagctccgagtgtccacaggaagggaactatcagctcctggcatctgtaaggatgctgtccatgctgaggacaatgaccagactctgcttcctgttattcttctctgtggccaccagtgggtgcagtgcagcagcagcctcttctcttgagatgctctcgagggaattcgaaacctgtgccttctccttttcttccctgcctagaagctgcaaagaaatcaaggaacgctgccatagtgcaggtgatggcctgtattttctccgcaccaagaatggtgttgtctaccagaccttctgtgacatgacttctgggggtggcggctggaccctggtggccagcgtgcacgagaatgacatgcgtgggaagtgcacggtgggtgatcgctggtccagtcagcagggcaacaaagcagactacccagagggggatggcaactgggccaactacaacacctttggatctgcagaggcggccacgagcgatgactacaagaaccctggctactacgacatccaggccaaggacctgggcatctggcatgtgcccaacaagtcccccatgcagcattggagaaacagcgccctgctgaggtaccgcaccaacactggcttcctccagagactgggacataatctgtttggcatctaccagaaatacccagtgaaatacagatcagggaaatgttggaatgacaatggcccagccatacctgtggtctatgactttggtgatgctaagaagactgcatcttattactcaccgtatggtcaacgggaatttgttgcaggattcgttcagttccgggtgtttaataacgagagagcagccaacgccctttgtgctgggataaaagttactggctgtaacactgagcatcactgcatcggtggaggagggttcttcccacagggcaaaccccgtcagtgtggggacttctccgcctttgactgggatggatatggaactcacgttaagagcagctgcagtcgggagataacggaggcggctgtactcttgttctatagatgagacagagctctgcggtgtcagggcgagaacccatcttccaaccccggctatttggagacggaaaaactggaattctaacaaggaggagaggagactaaatcacatcaatttgcaa

SEQ ID NO: 143379 - DNA, 6689 bp, Homo sapiens
  Payload ID: 8324
  Gene Symbol: IPCEF1
  Gene Name: interaction protein for cytohesin exchange factors 1
  Uniprot ID: Q8WWN9
  ENST ID: ENST00000265198
  CDS Start-End: 157-1470
tttaagtagaatcctcaagcttggcctcagagtactatgaggcttctgaatccaggaataagactgctcttggatttactctctttgtattgcatgtcaaaggcaacagaactggaccaagaaaattcataactttttgcttttgtttctactaagatgacatcatacatggctattgatggcagtgctcttgttcccttgcgtcagaagcccaggaggaaaactcaaggttttctcacgatgagtcggaggaggatatcgtgtaaagatctgggccatgctgactgccaagggtggctgtataagaaaaaggaaaagggaagtttcctaagcaacaaatggaaaaagttctgggtgatactgaaggggtcgtcactgtactggtatagcaatcaaatggcagagaaagctgatggatttgtcaacctgcctgatttcactgtggaaagagcatctgaatgcaagaaaaagcatgcttttaagatcagccatccacagatcaagaccttttattttgcagctgagaatgtgcaggaaatgaacgtgtggttaaataaacttggatcggctgtaatccatcaggaatccactacaaaggatgaagaatgttacagtgaaagtgaacaggaagatccagaaatagctgcggagacaccaccccctcctcacgcttcccagactcagtctttgactgcacagcaggcatcttcatcctcacccagcctgagtggaacgtcgtattctttctcttccctggaaaatacagtgaagacacccagcagttttccttcctccttatctaaagagagacaatccttgcctgacacagttaacagtttgtctgctgctgaagatgagggacaaccaataacgtttgctgtgcaagttcattcacctgtaccctcagaggcaggcatccacaaggccctggaaaacagttttgtcacatcagaaagtggatttttgaactctttatctagtgatgatacttcttcattgagtagcaatcatgaccatcttactgtcccagataagcctgctggatcaaagatcatggacaaagaagagacaaaagtgtctgaagatgatgaaatggagaagctgtacaaatcattagagcaagctagtctatctcctcttggggaccgacgaccttcgactaaaaaggagttgagaaaatcctttgttaagcggtgtaaaaatccatctataaacgagaaactccacaaaatccgaacattgaatagcacattaaagtgtaaagaacatgatctggccatgattaaccagttgctggatgacccgaagctgacagccaggaaatacagagagtggaaagtcatgaacaccctgctgatccaggacatctatcagcagcagcgggcttcgcctgcccctgatgacactgatgacaccccccaggaactcaagaaatcaccttcttctccctctgttgaaaattccatttgagacaaagtcagggttttctcctcttatattttatcacaagcaactcttcaagatgttgcaaaagcttacatttttccttaaaaggaaaactgaaacccagtccttcaagcatcagcttcccatctaaagatgcacgttagatgaagataatcaccgaatacaccagggctcctcatttcagtcgtaacgcatccattgagattggaatgattgagttcagttgaaaggcgttttttgtgttcctactgggagctcacggtgatgtggggctctaggggggatgtgagaaatgtctcttctgttcattgctctccagagaatgctatggacaagaatcaaattttaccaggagtaattgcccatggaaacattctgtttttcaaaagaagaatgtacatattccacttgactgggaagctgtgtggcccaaatcactgtttgagtggaggaatgttttctagagcagtgactggaaggacaaacgtggtgttgcagaacaaaaattccttgcctttggtatggaatggtggtgccttttccatgtgatgagaaatgcttcatagacagtggcatgtgggagagctgaaggaggaggcgtgttccatattccactcattcaaaggacagcttggtgttttcacactttatgcaggttaggggatctgattaatgtttcctttccttacaacagctagagaaaacatctcatcacaattggagacctctacttcctttgagctttcctactcaatggtaggagataggaatatgttccgcaaagaatgtctactgctcttgtccttggctgtgatccctatacatagtgtgaatttatatccaggtttcccaggatcaatattgacaagacgactttggcatctgaattgttttaatatctttactcaaaaaaacaaaaaaacaaaaacccatggaagcaacaaaagagttaaacatgagggatttatttttgtatgtttatatgtcacttgtgtgctatgtgaatagctatgtttgttatttaaatatatttatagaagttcaaattactagtgtttaaaagatgatatactattatatattgtgcttagtatatatttgatgagtctatactttttgcttgagaaaaatagaaatactattgattcactggtgttatgatgttgcactgtgtctgaggaatgctcaggaaatcttgtgggaaaaaaatggggcatgcattcataatttttcattttcttccccaccccaacccccatgagctcttaaatttagatttctatctcttgtaagtcactcttttaaccagcaaaggactttcatcttagattatcctttctattaaataaactttaagctttgtgccatttatgcctgcaaaccttagaccaaaggcaacacaactaatgtcatcttttcattaaagactaatagaaatttagaaatcattgtgttaaagagagctatagagaaacaatatgaaagtcttcccttactaatcaccatgaatatttctcaccataggaataaccacaacccaccaagtacccatgttggccctgcctacccgtaacaaattgttcacacaacctattttgttttatagcttcaaagtgtggcttgacattcaaatggaaggaaccacctgaattatatctgcaaacaaaatggaaatagttgttgaatagttccccaagctttactaagaagccttaatactctgtaaacaaacaaacaaacaaaaaacaaccttagcattaagaaataaaaacaaaaaacaagaagcaagttgtactgctagaaacttctctaagataagaggccaggccagtcagtttggcccagcaaacatgtgggtacttctccacctagggaagccactgaagatgagtttgacctgtggtgacctgacagagagaacattcagatcctcagattgcaccctgatgccctggtttaggaaagcagtgctttaaccttttgcccctggaaattactgattctttctgtgattagcagataccagaagggaaattatttaggattggcaatgtaaagagtattgaaggaacaacaaataacaatagcagaaataacagtgtgacataaagtgcccttccacctatttttctttggtttgcaacaccagcctgtagacttccagtttttcttaaattgaagagctccagacacttttgagcagggtttgtgaatagctttgaatgctttcctttggcttttcgtgaagacatatttccccagcctttcaactgtaaactcctttagtaccattgaaacttaaggcaaaaaagatccctgggattacttagccaaggcttaaatttatttttcaaagtcaagaacattagcctagaagtttttgctttgctagttaaagcttactttgcagagcttcccaaagtgaaagggaaactgaacttcacaattttgcacctggctttctggagccccattgcctgctcattcgtgtttttccccctgtaaattattttgcttttgaccaggttgtgctagaaagtagggctgcttctgtgagttctcagcctaggctgtggccactaagacgtgggtggggggatagacaggagtgagagggagagtgggtgacactttccgtgacacttaatgtaggaagacatgggcttctctctcttggcctcaagccacttttctggtccaaagaatattgggaaaactggattactttcagtatatttcttgagaccgggtcatctctgaaatgcatttggggtagtttcctggggtccaagggccaattcctatacccagtcctgcagtgtctgtgagctgtggaatgagagagaaaaccatggctgctcaggaaggaagtggagaatctctcagcacacgtagatccaaatctgtggcacctgctaaagattaggatttggagaggactcctctttggggttgtgaagaggaccttttccctctgttgttagcctgtagatccagaacggagcctgatgtgatgccttcactggttgatatattgcaaatagacactctgagccctgcattgcaagggcgtcttttgctttaaagaattcttagttttgccacaacagctcaaatctcagaataggatcaaaggcctagaaagactcctaaagtataggattacaaagactccaggaagcgtaagaaagagattgtgtttggagtcagatttcaatgtgaaacccatgccttacatttacacagcactttgtagtttgcaaattggtgtgttttcagccccctcccgctgccccatgctctgagatgattgtggattattacagtgaagtgcctggcccggagcccccagtgatgaagcaggaacttgagtctcaggactcccagcggctctctgcccatttcctcctctccgccccccacctcgcttcacctgttaccttgtgaagttgctgttggcacatagcccactaggaaaccaagaagtttgactgggagcgtgtgtttcattgcactgggcttagcatacggctggccctggtggctgtttggctaaattctccatttgaaacctaaagggccctctctgtgcttgagcacagtctcctcctagtggtcctgcctcaacctgctggcgggctgtctatggattggggtttcacctaatcatgctgtgtttcctttcttttctttctgtacattagactacttgggaggtgctgtgtgatccttggatgaaaaacatatatttaaagaaatggagagtgtttattttgtttgctttttgaggcatgtgctgtcaaatgttagagaccaaacttagtgattagaggttggtcctttgaccttcttctcttaattgcttttcatgtaatcatgataatttactcaggtagcactccagtcacaaacaatgtcacagagatgaaacagattcaaagaaaaaatatttttaagtcttttgaaaagaagtgctattcaaatttaagacatgtttaaattcataggtacattatctcttagtaagaaatacttttttttttctttttttagacagagtcttgctctgttgcccaggctggagtgcagtggcacgattttagctcactgcaacctctgcctccctggttgaagtgattctcctgcctcagcctcccgagtagctgggactacgcccggctaatttttatatttttagtagagaccggggtttaccatgttgcccaggctggtttcaaactcctgacctcaggtgatctgcctgcctctgcctcccagagtgctgggattacaggtgtgagccaccacacctggccgaaagacagtattttgatatagccacatacatgatttaatgagtaatgttaagtacagaaaagctgccatatccacatagttttagggggcatttcttcttcagtctaacaagaatatgatatccaattgtggttttccaatttatttctcttccaatttcttttgtatacctcacaggagaaattgaatcctagaactgggagatgactgccctgcccagggttttgtaatacataattgaaaataaaagtccctgaaactaaatgtttgcagcctgtatgaaatggactgtggaagggggataatttctctcctcacagaaagccactcgtctccttgaatgaggcattgagcagacacacgtttctctgtgtcgtggggcaggaagcaattcccttgcctcttcagcacatctcagttctttcccacatgaccccagaaccacatagaaaacattgaaaataatggattcttcattgtatttgaattttttttttttaacctttagcccaaaagggaagtgtgcctcgtggaaagagcaaatgccgtaaaatagaaaccaggagttttaatcgccatatattttaatgtgcttgcatgatgggaatgtgacttttagcactgcatggtgtttgggggcaagatattaatgtggaaatcttagcttaagttttactgtgctctcatcctgtgtcagctacccctctaaactgaaaaagaggcatggctcatttctctcctgctttatgtttttgaggttgacttgtaagataaaaataaaaataagaaaaaaatatatctaggcaaatgacatgaaaaaaaagttgaaatatactactggtgttcatttttgtcctgcagtgttgctttctcaaagaaataaacatgtggctggaagtgtttaa

SEQ ID NO: 143380 - DNA, 1658 bp, Homo sapiens
  Payload ID: 8324
  Gene Symbol: IPCEF1
  Gene Name: interaction protein for cytohesin exchange factors 1
  Uniprot ID: Q8WWN9
  ENST ID: ENST00000367220
  CDS Start-End: 126-1442
gtactatgaggcttctgaatccaggaataagactgctcttggatttactctctttgtattgcatgtcaaaggcaacagaactggaccaagaaaattcataactttttgcttttgtttctactaagatgacatcatacatggctattgatggcagtgctcttcaggttcccttgcgtcagaagcccaggaggaaaactcaaggttttctcacgatgagtcggaggaggatatcgtgtaaagatctgggccatgctgactgccaagggtggctgtataagaaaaaggaaaagggaagtttcctaagcaacaaatggaaaaagttctgggtgatactgaaggggtcgtcactgtactggtatagcaatcaaatggcagagaaagctgatggatttgtcaacctgcctgatttcactgtggaaagagcatctgaatgcaagaaaaagcatgcttttaagatcagccatccacagatcaagaccttttattttgcagctgagaatgtgcaggaaatgaacgtgtggttaaataaacttggatcggctgtaatccatcaggaatccactacaaaggatgaagaatgttacagtgaaagtgaacaggaagatccagaaatagctgcggagacaccaccccctcctcacgcttcccagactcagtctttgactgcacagcaggcatcttcatcctcacccagcctgagtggaacgtcgtattctttctcttccctggaaaatacagtgaagacacccagcagttttccttcctccttatctaaagagagacaatccttgcctgacacagttaacagtttgtctgctgctgaagatgagggacaaccaataacgtttgctgtgcaagttcattcacctgtaccctcagaggcaggcatccacaaggccctggaaaacagttttgtcacatcagaaagtggatttttgaactctttatctagtgatgatacttcttcattgagtagcaatcatgaccatcttactgtcccagataagcctgctggatcaaagatcatggacaaagaagagacaaaagtgtctgaagatgatgaaatggagaagctgtacaaatcattagagcaagctagtctatctcctcttggggaccgacgaccttcgactaaaaaggagttgagaaaatcctttgttaagcggtgtaaaaatccatctataaacgagaaactccacaaaatccgaacattgaatagcacattaaagtgtaaagaacatgatctggccatgattaaccagttgctggatgacccgaagctgacagccaggaaatacagagagtggaaagtcatgaacaccctgctgatccaggacatctatcagcagcagcgggcttcgcctgcccctgatgacactgatgacaccccccaggaactcaagaaatcaccttcttctccctctgttgaaaattccatttgagacaaagtcagggttttctcctcttatattttatcacaagcaactcttcaagatgttgcaaaagcttacatttttccttaaaaggaaaactgaaacccagtccttcaagcatcagcttcccatctaaagatgcacgttagatgaagataatcaccgaatacaccagggctcctcatttcagtcgtaacgcatccattgagattggaatgattgagt

SEQ ID NO: 143381 - DNA, 3267 bp, Homo sapiens
  Payload ID: 8324
  Gene Symbol: IPCEF1
  Gene Name: interaction protein for cytohesin exchange factors 1
  Uniprot ID: Q8WWN9
  ENST ID: ENST00000422970
  CDS Start-End: 197-1513
acatgtagtcttctcactttcttcttgccatgagactgagagagtgctccttgggacggagtttcagagtcatcaactgggctcatgagaaccacaagaaacctacgaaggcactgggacagagcctggctgctggtcaaaggcaacagaactggaccaagaaaattcataactttttgcttttgtttctactaagatgacatcatacatggctattgatggcagtgctcttcaggttcccttgcgtcagaagcccaggaggaaaactcaaggttttctcacgatgagtcggaggaggatatcgtgtaaagatctgggccatgctgactgccaagggtggctgtataagaaaaaggaaaagggaagtttcctaagcaacaaatggaaaaagttctgggtgatactgaaggggtcgtcactgtactggtatagcaatcaaatggcagagaaagctgatggatttgtcaacctgcctgatttcactgtggaaagagcatctgaatgcaagaaaaagcatgcttttaagatcagccatccacagatcaagaccttttattttgcagctgagaatgtgcaggaaatgaacgtgtggttaaataaacttggatcggctgtaatccatcaggaatccactacaaaggatgaagaatgttacagtgaaagtgaacaggaagatccagaaatagctgcggagacaccaccccctcctcacgcttcccagactcagtctttgactgcacagcaggcatcttcatcctcacccagcctgagtggaacgtcgtattctttctcttccctggaaaatacagtgaagacacccagcagttttccttcctccttatctaaagagagacaatccttgcctgacacagttaacagtttgtctgctgctgaagatgagggacaaccaataacgtttgctgtgcaagttcattcacctgtaccctcagaggcaggcatccacaaggccctggaaaacagttttgtcacatcagaaagtggatttttgaactctttatctagtgatgatacttcttcattgagtagcaatcatgaccatcttactgtcccagataagcctgctggatcaaagatcatggacaaagaagagacaaaagtgtctgaagatgatgaaatggagaagctgtacaaatcattagagcaagctagtctatctcctcttggggaccgacgaccttcgactaaaaaggagttgagaaaatcctttgttaagcggtgtaaaaatccatctataaacgagaaactccacaaaatccgaacattgaatagcacattaaagtgtaaagaacatgatctggccatgattaaccagttgctggatgacccgaagctgacagccaggaaatacagagagtggaaagtcatgaacaccctgctgatccaggacatctatcagcagcagcgggcttcgcctgcccctgatgacactgatgacaccccccaggaactcaagaaatcaccttcttctccctctgttgaaaattccatttgagacaaagtcagggttttctcctcttatattttatcacaagcaactcttcaagatgttgcaaaagcttacatttttccttaaaaggaaaactgaaacccagtccttcaagcatcagcttcccatctaaagatgcacgttagatgaagataatcaccgaatacaccagggctcctcatttcagtcgtaacgcatccattgagattggaatgattgagttcagttgaaaggcgttttttgtgttcctactgggagctcacggtgatgtggggctctaggggggatgtgagaaatgtctcttctgttcattgctctccagagaatgctatggacaagaatcaaattttaccaggagtaattgcccatggaaacattctgtttttcaaaagaagaatgtacatattccacttgactgggaagctgtgtggcccaaatcactgtttgagtggaggaatgttttctagagcagtgactggaaggacaaacgtggtgttgcagaacaaaaattccttgcctttggtatggaatggtggtgccttttccatgtgatgagaaatgcttcatagacagtggcatgtgggagagctgaaggaggaggcgtgttccatattccactcattcaaaggacagcttggtgttttcacactttatgcaggttaggggatctgattaatgtttcctttccttacaacagctagagaaaacatctcatcacaattggagacctctacttcctttgagctttcctactcaatggtaggagataggaatatgttccgcaaagaatgtctactgctcttgtccttggctgtgatccctatacatagtgtgaatttatatccaggtttcccaggatcaatattgacaagacgactttggcatctgaattgttttaatatctttactcaaaaaaacaaaaaaacaaaaacccatggaagcaacaaaagagttaaacatgagggatttatttttgtatgtttatatgtcacttgtgtgctatgtgaatagctatgtttgttatttaaatatatttatagaagttcaaattactagtgtttaaaagatgatatactattatatattgtgcttagtatatatttgatgagtctatactttttgcttgagaaaaatagaaatactattgattcactggtgttatgatgttgcactgtgtctgaggaatgctcaggaaatcttgtgggaaaaaaatggggcatgcattcataatttttcattttcttccccaccccaacccccatgagctcttaaatttagatttctatctcttgtaagtcactcttttaaccagcaaaggactttcatcttagattatcctttctattaaataaactttaagctttgtgccatttatgcctgcaaaccttagaccaaaggcaacacaactaatgtcatcttttcattaaagactaatagaaatttagaaatcattgtgttaaagagagctatagagaaacaatatgaaagtcttcccttactaatcaccatgaatatttctcaccataggaataaccacaacccaccaagtacccatgttggccctgcctacccgtaacaaattgttcacacaacctattttgttttatagcttcaaagtgtggcttgacattcaaatggaaggaaccacctgaattatatctgcaaacaaaatggaaatagttgttgaatagttccccaagctttactaagaagccttaatactctgtaaacaaacaaacaaacaaaaaacaaccttagca

SEQ ID NO: 143382 - DNA, 558 bp, Homo sapiens
  Payload ID: 8324
  Gene Symbol: IPCEF1
  Gene Name: interaction protein for cytohesin exchange factors 1
  ENST ID: ENST00000519405
  CDS Start-End: 174-558
agaaaaactggcagtgagtcgggaagtagctgtgtattgaggtgggcattaacccttcaacatctattgcataactacggctgttattgttgagaggagctatgttactgcactgatatgcccgccagccttacaattttaattattttcaacttattcttggttttctcacgatgagtcggaggaggatatcgtgtaaagatctgggccatgctgactgccaagggtggctgtataagaaaaaggaaaagggaagtttcctaagcaacaaatggaaaaagttctgggtgatactgaaggggtcgtcactgtactggtatagcaatcaaatggcagagaaagctgatggatttgtcaacctgcctgatttcactgtggaaagagcatctgaatgcaagaaaaagcatgcttttaagatcagccatccacagatcaagaccttttattttgcagctgagaatgtgcaggaaatgaacgtgtggttaaataaacttggatcggctgtaatccatcaggaatccactacaaaggatgaagaatgttacagtgaaagtgaac

SEQ ID NO: 143383 - DNA, 568 bp, Homo sapiens
  Payload ID: 8324
  Gene Symbol: IPCEF1
  Gene Name: interaction protein for cytohesin exchange factors 1
  ENST ID: ENST00000519190
  CDS Start-End: 244-568
tctccattttgtgtacgttgagtgtggcttttctccggggtgccttccttgggatcagatttctgtctgtcttaatgctaataagaggaggtggacggcagattaatttttggttattgttgaatcgattttaagaaatgacgacatgttgttcatttggattaatccctcgtggtatgtcaaaagagcttagaaaaactggcagtgagtcgggaagtagctgtgtattgaggttttctcacgatgagtcggaggaggatatcgtgtaaagatctgggccatgctgactgccaagggtggctgtataagaaaaaggaaaagggaagtttcctaagcaacaaatggaaaaagttctgggtgatactgaaggggtcgtcactgtactggtatagcaatcaaatggcagagaaagctgatggatttgtcaacctgcctgatttcactgtggaaagagcatctgaatgcaagaaaaagcatgcttttaagatcagccatccacagatcaagaccttttattttgcagctgagaatgtgcaggaaatgaacgtgtggttaaataaacttggat

SEQ ID NO: 143384 - DNA, 1621 bp, Homo sapiens
  Payload ID: 8324
  Gene Symbol: IPCEF1
  Gene Name: interaction protein for cytohesin exchange factors 1
  ENST ID: ENST00000519344
  CDS Start-End: 246-1475
agctcaatgtatattgattctaattagcacattttgtgcctcagctagtagctccccgttaagctctgcctggagagtttttttttagattccatcctgctcataaacactgccacctcctccctccttctctctttacaaatgttacaacacaatcagaaatttcctcttttctttccttcctgcattttcagcaggttcccttgcgtcagaagcccaggaggaaaactcaaggttttctcacgatgagtcggaggaggatatcgtgtaaagatctgggccatgctgactgccaagggtggctgtataagaaaaaggaaaagggaagtttcctaagcaacaaatggaaaaagttctgggtgatactgaaggggtcgtcactgtactggtatagcaatcaaatggcagagaaagctgatggatttgtcaacctgcctgatttcactgtggaaagagcatctgaatgcaagaaaaagcatgcttttaagatcagccatccacagatcaagaccttttattttgcagctgagaatgtgcaggaaatgaacgtgtggttaaataaacttggatcggctgtaatccatcaggaatccactacaaaggatgaagaatgttacagtgaaagtgaacaggaagatccagaaatagctgcggagacaccaccccctcctcacgcttcccagactcagtctttgactgcacagcaggcatcttcatcctcacccagcctgagtggaacgtcgtattctttctcttccctggaaaatacagtgaagacacccagcagttttccttcctccttatctaaagagagacaatccttgcctgacacagttaacagtttgtctgctgctgaagatgagggacaaccaataacgtttgctgtgcaagttcattcacctgtaccctcagaggcaggcatccacaaggccctggaaaacagttttgtcacatcagaaagtggatttttgaactctttatctagtgatgatacttcttcattgagtagcaatcatgaccatcttactgtcccagataagcctgctggatcaaagatcatggacaaagaagagacaaaagtgtctgaagatgatgaaatggagaagctgtacaaatcattagagcaagctagtctatctcctcttggggaccgacgaccttcgactaaaaaggagttgagaaaatcctttgttaagcggtgtaaaaatccatctataaacgagaaactccacaaaatccgaacattgaatagcacattaaagtgtaaagaacatgatctggccatgattaaccagttgctggatgacccgaagctgacagccaggaaatacagagagtggaaagtcatgaacaccctgctgatccaggacatctatcagcagcagcgggcttcgcctgcccctgatgacactgatgacaccccccaggaactcaagaaatcaccttcttctccctctgttgaaaattccatttgagacaaagtcagggttttctcctcttatattttatcacaagcaactcttcaagatgttgcaaaagcttacatttttccttaaaaggaaaactgaaacccagtccttcaagcatcagcttcccatctaaagatgcacgttagatgaag

SEQ ID NO: 143385 - DNA, 485 bp, Homo sapiens
  Payload ID: 8324
  Gene Symbol: IPCEF1
  Gene Name: interaction protein for cytohesin exchange factors 1
  ENST ID: ENST00000520261
  CDS Start-End: 251-485
gactgagtttccagagctgaggctgctttaagtagaatcctcaagcttggcctcagagtactatgaggcttctgaatccaggaataagactgctcttggatttactctctttgtattgcatagtcatcaactgggctcatgagaaccacaagaaacctacgaaggcactgggacagagcctggctgctggtcaaaggcaacagaactggaccaagaaaattcataactttttgcttttgtttctactaagatgacatcatacatggctattgatggcagtgctcttgttcccttgcgtcagaagcccaggaggaaaactcaaggttttctcacgatgagtcggaggaggatatcgtgtaaagatctgggccatgctgactgccaagggtggctgtataagaaaaaggaaaagggaagtttcctaagcaacaaatggaaaaagttctgggtgatactgaaggggtcgtcactgtactggtatagca

SEQ ID NO: 143386 - DNA, 580 bp, Homo sapiens
  Payload ID: 8324
  Gene Symbol: IPCEF1
  Gene Name: interaction protein for cytohesin exchange factors 1
  ENST ID: ENST00000517438
  CDS Start-End: 108-580
aaaagttgcctttcactctgtcacataaatcaggataatactttacctaccaaatcagggtaatacattatctacctcttcatgtaatcattgcaggttttctcacgatgagtcggaggaggatatcgtgtaaagatctgggccatgctgactgccaagggtggctgtataagaaaaaggaaaagggaagtttcctaagcaacaaatggaaaaagttctgggtgatactgaaggggtcgtcactgtactggtatagcaatcaaatggcagagaaagctgatggatttgtcaacctgcctgatttcactgtggaaagagcatctgaatgcaagaaaaagcatgcttttaagatcagccatccacagatcaagaccttttattttgcagctgagaatgtgcaggaaatgaacgtgtggttaaataaacttggatcggctgtaatccatcaggaatccactacaaaggatgaagaatgttacagtgaaagtgaacaggaagatccagaaatagctgcggagacaccaccccctcctcacgcttcccagactcagtctttgactgcacagcaggcatcttcatc

SEQ ID NO: 143387 - DNA, 7927 bp, Homo sapiens
  Payload ID: 8325
  Gene Symbol: ICE1
  Gene Name: interactor of little elongation complex ELL subunit 1
  Uniprot ID: Q9Y2F5
  ENST ID: ENST00000296564
  CDS Start-End: 223-7023
ggggccgcgccgggtagcgtttctttttagtgcctgaggcagctctggctcggagagccttttgctagccccacggggacctctgtgcacggatggacccgcccggacctggcgggaagcggcctggcaggcggcggccccggcggcatcagcagagacaggacggggccgacgccgcgggcccctgaggcgtgcgtgcccaccgggcccggcggcggcaccatgatgccgggcgagacccattcggcggcgcccgggacggcggcggacctgtcgcgatgtcagggctgcgcctctctgcagcagaatttgaatgaatatgttgaagcattaattaccttgaaacaaaaaattatcaatacagataatttgttaacagaatatcagaagaaatgtgatgagctgcagtttgcaagaagagagaatagtaatctgcatcaccaagtggaagagatgcttcaaaaaatttctcctctacagaaatgtcaggaagaactgggatctttaaaagcagagctagaagagaaaaagagttctttaaagttgtatcaggatactcatcaggaatatgctcgtgtaaaggaagaatgcttgaagagtgatgctcagaagaagaaactagaagctaaggtgaagaagctgcaagaggctgctgtcaagcaaactcaggacttcaagcaactgagaaatgaaaagaaaatacttgaaaaggaatttaagaagacacaggaaaggcttgacgaattttctaaacagaaaaatgaaaaggagttgagacatattggaacacaaatttcaagtgattcatatggaagcatagataaaagaaaagtgaaactgcttctgaaggaactctggctctgtgtaaacacaacacacagactacctggtgaaggcagcaggtgtgtcccagaaaaacctgccaaagcaatcaccagctccagagtgcctggggaagatggtacgctacctccaacacagggcagccctctcaggacctcaaatgtgcagacatgcctcacaaaactgtccatggagataaaggaggactttttatgtcaaaatgtggaaaaacagagctccagtggaacaaattgtagttctgaccatgtttttaatgagaatggaaatcttgaggttttagtacaaagtcatcgtgacggtggtagtactgaatttgttgatcatgatcatttttttgatgaagatcttcaagctgcaattgacttcttcaaacttccccctcctcttctgtcaccagtgccctcgccccctccgatgtcatcacctcacccgggttccttaccgtcttcatttgcacctgaaacctactttggagaatacacagattccagcgataatgactcagtccagcttagaaattctgctgagtgtgtttcagaagatgatacaactgaatcacagaattattttggctcattgagaaaaaataaaggaagtggcacatgggaggaaaagcccaaatcacatgaagctatccaagctctgaatacatgggaagtaaataaagtgacaacttctggactcgagactttcacagcaacactgagagaatcttctgccacacactccttagttggtgaaaaacactggaccacagcatctcgatccatgagtgatagaaaaagagacattttacatgagacaaaaacacaaatggaggttagggagatggataagtcagtacaaactgagaagaccattcataaactcactcgaggtctatgcattgagagattgtctgccagccctgcacaagagaaggaagctgcccctgggaagtctgagttgtgttcttctccccttggcaaaaggccattaaatgaactcatggaatctgaaggaaaaaccgtattgtctaaaatgatgggatcgcccaaatcagagtttactaagtggacacgaattaatgaaatcacttctgaaccagaccgtatcacagtttctggccattttcacagactatctagagaattggaaaaggaaaaagaagatactcaagggttcactttaggagaatcacctgaatcagaagatgatgactcaggtgatggaatggatgtagcagggcttgacattgaaaccagtttttcttcctcttctaccttggtagcattgtctgttggcagtaatccccagtcttcttctgggttagactgtggtaatgatacagatattactactaaagtattctctactgaaccgcatcattcagaacataaattgcaaactaaaactttaaacacattacatctgcagtctgagccaccggagtgttctataggaggaaacaacttggagaatagcttgtgtgccttgagccctgaattgggagcatctaattttaatgatcagaagagcagtgggatagaatatacaaaagtagtaaaaggcttgaccaaaatacattcacttcctcggtcagtatttatgaaagctacaaaagatgggcaatgtgaaagtcaagatccaagaattgagctcacactaaataagccagatttcacatcattaataggttctcaggctgccttgatcaagagtggtttgggttttgttaaaagtacttcatggcaccatagtgatttattaaggaaaggtggcgaagaaagtctgagagccaaatcagaacatgaacagaagactagccatcagttacaaaaggcaatgccattcctacaaaatagaggaccaacacccaagcctgatcttcttagagaaaataacaatcctgtagaattcaagaccactgcatcggtgttgcctaatcaagtatcagttatcacaaaacagacaagacctgaaaaggttcagagtgccaaattggaacacttgaggccacatagggttgagcctaccttagtaacagaaaatagtggcaacaaaaccggtatgtcaactgtagcaaaatgtgatggggaaagagatgatacaacacaaaacatcacggaggtggctgctgtgaaaagcatttcaccagaagtttctgcctctaggagaaaattagattttaattctccaggtggttcttcaccagtagaaaattctgattgttccacaaatagcagattatctttctctcctgaaaatatcctcatccaaaaccaagacattgtgagagaagctgcagtgcagggagatgggcagaagcaaaggcagcctcaggccacagatctggactccagtgggacacatggcagtgagatgcttccagccacagaagtgactgtgtcaggagggttttctgttgaagaaaccagctgtggagacacagggagatctggtggtgaggccctggctgttgcaaatgattctaccagcacaccacaaaatgctaatggactttggaaattgaaatctacaactcccggtggtgctttgcctgagtgttttggcaccacagacactactttttcttcagcattttgcagaaaacatggagagacacaggatacctcccaaagtagcctgcctggtaccttacattgttacacaggcattcgagaggggggagacgacactgaggtagagagtgaggcatttagctgcagtgaggggagcgaacagcaagatgctcctgatgactcacagaaaaatttaggagacacagatgctgctgtagccgaggtgagaccttccttagaggtaggttatttgacgtcagctctgcaagattttaacataagtactttttctgagctggatagactttccacatcagaggttgtgatgtttcttgagagctgtcagttaggggattatagttcaggggactctgtttctgaatgttctagtaaaggaaccctaagtaaagaaatgaacaaagaattaaaggcaagtgaaataggagaaaaatacagaaagcaaccctgtgaggaagaaacacttggaacctgtgaagagtggattgaatcagaggaagatgattattcgttaaaaaatacaagtcagctcactcagtgttctttggaaactctgtctgaggttctgaccaagattaggcaagaacttcaaacaaattctgaagattgcaatggtaaagatactggcagtttattgctcttaaatgtaaataacaacatgaccactgagaatttaaaagagaaaagtccatttcgggaaacgactggctcctcatcacatgcttcagaaccaaccccacaagcagctgccttggacactgagggcagctctcccatcagcggtatgcctcagaatgaaaaccctcagagcagaccagaggcccgttcagatgcaggcaggcaaaccgatggtggggaagaagacctgccagaacctgtggagccatcagccttgtgctctgactctgtgatggagccatccatagagcaaagttctaactgcgaggccgaaacaacatttcagtgtcagatagcaacagtgacctcagaagttataaacgtacttataaataaggatcagaatctagtcattgaaaagggggacaactggacaatcatcagtggtgtagctgtcttgccacatgtggaccaggtcacactgtgtgacattcctggagacatccctatttctcaggatcaaggagagctggaagctggttgcatcccagtgacttctgctgagaagtccccagaggccagtcacactggccctgcatttcaggaggctccatgtggcaataatctttcatgtccccaagaggatgtttcaagcagtggtcagagcaccaactttgataagagtcgtttgcgaaatagacccgttaagcctagtatatggattagttctcaaatctatgatcaaaacttcgagactcagattgttgcgtctgatcacacatattataactcaaaactagagccatctggcaaaaataagaatcgatcaaagatttcaaacaaagatcagtcaaacaaaccagtaaaaacttcagcgtcgagcagagttgaaactcatcagagtgaagttgctcagtcattttcaggggaaaaagctaatacaaaaactcaaagaagccaaactcagaccattttagcaaatgctgatacatccactcctacagattgttctcctgacacactgagtaaaatacggcaagaggtggggcctcctttgccgcctctgcttgctcctctgatagctacacctccaaggacttcacagccactgtctccactgatatcgagttctagtccttcctcaccagcctctcctgttggccaggtttctcccttccgtgaaaccccagtgcctcctgccatgtctccatggccagaggaccccagacgtgcctctcctccagatccttctccatctccatctgcagcttcagccagtgagagggtagtgccgtctcctctgcagttctgtgcggccacgccgaagcacgcacttcctgtgcctggccgactcccaccctgtgcatctggccacgctgctgtgggagggcctcaggagaattctgtgaaaatccttgacaccatgtatccagagttatctgccagggcccggaccctcaacatcctcaaagggaatattcaactcacacgaggtccgcctgctgactgtaagaatttaccgggacctgccagtgctatgataggattcaaaacgatcacttcagcagcaactgcttttgtcaaaactgggagcagctctggtggtgactgtaaccaagacaagtcaagagatttggggactcagcaggattcaagcgggaaaagaacactgtcaacgtctacactgagaagtgctaaaagactgcgcctggacactgggtccccagaaccagaaaccaggggagtcactgcagaaggaatccacaaaaacctcccagggaacctccctccagctgaagttgcaacaacaaatgaggaaagaagttgttctagtccagccgtcagtgcagtttcacagttgcctttaagcccaaaagaaactgtggagtcccatgataaagccatagctaatgccctgaagaaaattgcagagttttcttttgatctgttacctgtcattcgtagtcatgtgtatgtgggaaatatctccaaaaagcccgtaatgagagatcaagagaaggaagttgtttatgaatttagcacaacaaaaaagcatttagcagagtgcttgcttcactctattctctcagaactaaaaattcagaagatatctatggaccacaattacattcacgccctctgcagggtgtatgtgggtatttgtcggcaactcggagacttggaaagagctcgtttgttttgctacagcctacttaaagaagattttccggagtctgaaaaattaactttgtttattgcaaacatgtggcatgatatatttctctctcaatcggtgattaataaagcaatgcagttagttgccaggcaacgtgctaaaggagaggttctgaactgcttgagagcttttcttaattgggaaaagaatgccccggtagatgttggcttcatggtttctaagctgcttttgaccatacagttatgtccaaaaacagaatttcaacctagtgaaaaatttggtgaagacctaagtgataacacttgggaatacatatttgccattgatctgctctgctgccatcagaaatggatctggacgcatgataacatcataagtaaggagctgtggcctgtgatggataaatggataaaatacagaaaaggacatgcaaacattgcgtatactcctgatattattatagcctcaatactgaggctgattggtcgtttaggccaattgggtttgaaagaaggatttccatctgctgtgaaaaatattagttcggttattggtatgtttatacagcatgctcacgatgaagatataccatggggtatacagttagcagccgtgtatgctctttgtgacttgagtcccagcaatccagcagaaatttccaagatcctggaagcttggcggagagaggcctccaaaagcgttccgtctgcgattgtcagctgcctagaggaagtcagtgccctgagcacagaggagcttggctgacctgggatgccactgaggcttgagaagtgccttgacacattttgaacacaaatagtttgatcagctttcagaatacaaagggaggtttcaaaacaaaaagacataaaatagataaaacagaccagaggctctccttattgtttggcaaggagacaggagaaacaagcagtcgcatagtcgtttttccctaaatctaatacgtttcacttaaggctgttgtgatctgtgacatatgggttatattattgtgtctttgtcaaacaacaaaaacttgaacttagccctttttttgctgcagaaagtgtccttttagtggcttcttaaaattgagtggcattttataatgaacttaccaatataaaaacatgatttggttcctgagctgttgttgttggacttgtgttccaatgagtgactaggaaaaaataaattggcaaaaacctagagttttctgctatctttgctggaaatgagttgcaaaagtttttctcaagatgtagtgcgtaattgatcagagcaaaacatgcagagcccttagcagaaacccactttaatgcattttcttcatatccctaaagttccttaaaaatatgtgacaatgcatcaggaagaggagaactgaagagtagaagttcccttgcagatttttttatcagtgacatgtaatgagcaattcacagatgagcgcaggcagagctctgtgtgccgtgtacatatggaccgtgctatgatgtgtctcacattggatgatattccactttgggaattttagtatttgtatatagaaaatgggtttaataactcaccatggttttgatttgtcttatattcgttatttcttaaaactcttgtatgtgtttttataataaaaaataaaagtaagccatggatattactgttctga

SEQ ID NO: 143388 - DNA, 613 bp, Homo sapiens
  Payload ID: 8325
  Gene Symbol: ICE1
  Gene Name: interactor of little elongation complex ELL subunit 1
  ENST ID: ENST00000512608
  CDS Start-End: 177-613
agatgtcttgagaactggctttgagaaagaatttgaatgaatatgttgaagcattaattaccttgaaacaaaaaattatcaatacagataatttgttaacagaatatcagaagaaatgtgatgagctgcagtttgcaagaagagagaatagtaatctgcatcaccaagtggaagagatgcttcaaaaaatttctcctctacagaaatgtcaggaagaactgggatctttaaaagcagagctagaagagaaaaagagttctttaaagttgtatcaggatactcatcaggaatatgctcgtgtaaaggaagaatgcttgaagagtgatgctcagaagaagaaactagaagctaaggtgaagaagctgcaagaggctgctgtcaagcaaactcaggacttcaagcaactgagaaatgaaaagaaaatacttgaaaaggaatttaagaagacacaggaaaggcttgacgaattttctaaacagaaaaatgaaaaggagttgagacatattggaacacaaatttcaagtgattcatatggaagcatagataaaagaaaagtgaaactgcttctgaaggaactctggctctgtgtaaacacaacacacagactacctgg

SEQ ID NO: 143389 - DNA, 7209 bp, Homo sapiens
  Payload ID: 8326
  Gene Symbol: ICE2
  Gene Name: interactor of little elongation complex ELL subunit 2
  Uniprot ID: Q659A1
  ENST ID: ENST00000261520
  CDS Start-End: 236-3184
gacgtcatcacgcagggccgagtcggcgcggccacatcctttaaatatggtcttttttgggcgcgcgcgacaatgtgaggagtggggtggagcgtgtgtggtgtgtggctgcggcctgggcaagagccgccgcggaccatgagctgagtaagttctggagggatcctgcctcttggagccttcgcagccaggcagctgtgaactgtgagctagagtgaagcagaaatctaggaagatgagctccaagatggtcataagtgaaccaggactgaattgggatatttcccccaaaaatggccttaagacatttttctctcgagaaaattataaagatcattccatggctccaagtttaaaagaactacgtgttttatccaacagacgtataggagaaaatttgaatgcctcagcaagttctgtagaaaatgagccggcagttagttcagcaactcaagcaaaggaaaaagttaaaaccacaattggaatggttcttcttccaaaaccaagagttccttatcctcgtttctctcgtttctcacagagagagcagaggagttatgtggacttgttggttaaatacgcaaagattcctgcaaattccaaagctgttggaataaataaaaatgactacttgcagtacttggatatgaaaaaacatgtgaacgaagaagttactgagttcctaaagtttttgcagaattctgcaaagaaatgtgcgcaggattataatatgctttctgatgatgcccgtctcttcacagagaaaattttaagagcttgcattgaacaagtgaaaaagtattcagaattctatactctccacgaggtcaccagcttaatgggattcttcccattcagagtagagatgggattaaagttagaaaaaactcttctcgcattgggcagtgtaaaatatgtgaaaacagtatttccctcaatgcctataaagttgcagctgtcaaaggacgatatagctaccattgaaacgtcagaacaaacagctgaagctatgcattatgatattagtaaagatccaaatgcagagaagcttgtttccagatatcaccctcagatagctctaactagtcagtcattatttaccttattaaataatcatggaccaacgtacaaggaacagtgggaaattccagtgtgtattcaagtaatacctgttgcaggttcaaaaccagttaaagtaatatatattaattcaccacttccccaaaagaaaatgactatgagagagagaaatcaaatctttcatgaagttccattaaaatttatgatgtccaaaaacacatctgttccagtctctgcagtctttatggacaaacctgaagagtttatatctgaaatggacatgtcctgtgaagtcaacgagtgccgaaaaattgagagtcttgaaaacttgtatttggattttgatgatgatgtcacagaacttgaaacttttggagtaaccaccaccaaagtatcaaaatcaccaagtccagcaagtacttccacagtacctaacatgacagatgctcctacagcccccaaagcaggaactacaactgtggcaccaagtgcaccagacatttctgctaattctagaagtttatctcagattctgatggaacaattgcaaaaggagaaacagctggtcactggtatggatggtggccctgaggaatgcaaaaataaagatgatcagggatttgaatcatgtgaaaaggtatcaaattctgacaagcctttgatacaagatagtgacttgaaaacatctgatgccttacagttagaaaattctcaggaaattgaaacttctaataaaaatgatatgactatagatatattacatgctgatggtgaaagacctaatgttctagaaaacctagacaactcaaaggaaaagactgttggatcagaagcagcaaaaactgaagatacagttctctgcagcagtgatacagatgaggagtgtttaatcattgatacagaatgtaaaaataatagtgatggaaagacagctgttgtgggttctaacttaagttccagaccagctagtccaaattcttcctcaggacaggcttctgtaggaaaccagactaatactgcttgtagtcctgaagagtcatgtgttttaaaaaaacctatcaaacgagtatataaaaaatttgatccagttggagagattttaaaaatgcaggatgagctcttaaagccaatttccagaaaagtaccagaattgcccttaatgaatttagaaaattctaaacagccttctgtttctgagcaattgtctggtccttcagactcctctagttggccgaaatctggatggccttctgcatttcagaagccaaaaggacgattgccatatgaacttcaggactatgttgaagatacatcggaatacctagctcctcaggaaggaaattttgtttataagttatttagcctgcaagacctgttgttactcgtacgctgcagtgtccagaggatagagacaagaccacgttctaaaaaacggaagaaaatcagaagacaatttccagtttatgtactaccaaaagtagagtatcaagcttgttatggagttgaagctctgactgaaagtgaactttgtcgcttatggactgaaagtttattgcattccaacagctcattttatgttgggcatatcgatgcatttacttcaaaactttttctactggaagaaattacctcagaagaattaaaagaaaagctttcagcactcaagatttccaatttatttaacatcctccaacacattctaaagaaactaagtagcttgcaggagggttcctacttgttatctcatgcagcagaagattcttcactcctgatttataaggcctctgatggaaaagttactaggacagcatacaatttgtataaaacacattgcggccttcctggtgtaccttccagtctctcagttccctgggtcccattagatcccagcctgttattaccatatcatatccatcatggaagaataccttgtacttttccaccgaaatcactggataccacaacacaacaaaagattggtggaacgagaatgcctacacgcagccacaggaatccagtttccatggaaaccaaaagcagttgcttgcctgctcagcaagttgaaactgaaggagtggctccacataaaagaaaaataacttgaggactgtaccatggaaaactaaatttaaaaaaacagttataacagtgtttaatttagataagtttgagggaaaataatcagtaggcaagaggaacatttttcctgtagtagctagagtgccttgaaaaaatgtgttggctatgtgaaggaatatttcaactaaaatggaatggtatgcttttcacccttgaagtttgaggaggatcttgatatgttttaacattatcatggcagggaaatatataaagaagaaaaatatttttacattaaaccttttctaaaaattgtaaatagaaaaataatttggttttttatcaagaacaacacttatcgttatgtattgtgttagttatattgccagtctgttgcgactgactcaaaaagttaaatgttgccactgctgaagatgattatgagcatcgcaaactttgtttctgacccattttgacagtttttatatactcctttaaaatgatgaatgttacaggttaataaagttaatacctttaaaaacttggtgaaattccattacagaagccaaaaataaaaactccctgcctctgaaaagtcagattactgacttcttgtttggcaaccatcagtttgtttaataaaagaaaaaatttggtggtataacatgtttgatgacagatgcctctatctctagattcaagctgagtgttgaaatacactgctgaaagcaaagagataggtatgttttccagaaaaaaagtcagtgtcattgctccagatgacaaggttaatgtggtaaagcataagcttttttttttttttgagatggagtctcgctctgttgcccaggctggagtgcagtggcatgatctcagctcaccacaacatccacctcctggattaaagcgattctcctgcctcatcctcccgagtagctgggactacaggcacctaccaccaggcttggctaatttttttttgtatttttagtagagacagggtgttaccatgttggccgggctggtctcaaactcctgaccttgtgatccgcctgccttggcctcccaaagtgctgggattacaggggtaagccaccgtgcctggccagcataagctatttttatcctcatctatactgattgatttaaattttccgggcctgcagatgaatttggaaaagggcataatcaactgatgttgctgtagcaaatttggacttaagaaactacagacagggccgggcgtggtggctcacacctgtaattccagcacttcgcaaggccgaggcgggagaatcacttgagtccaggggttggagaccagtctgggcaacacagacctcatctctacaaataaaaaagttagccgggtgtggtggggtgtgcctgtagtcccagctactcaaaaggctgaggcagaagaattgcttgagcccaagaagtcaaggctacagtgagttgtgatcgcaccacagaactcagcttgagtatcagagtgtgaccctgtctcaaagaaaaaaaaaaacaggacaggcttgtttaatctttagaacccttacactaaaattttcagaaattatgtatgtcatttgtaaaatataagttttgtaatcctagataattgcttcacattgaaattttttagctattctgtgtaaagaatagctattcttttggcctaatttctgagaaattagaccgaaaaatctcctcaagtattgtaacagttgaaaatacttatattcaactaccaagttttgtttcattttgattttttgttataaaacatttttaagttatttgagaagtaattattagtaaaattgtatcttgataaatcatttcctcatcctgccattcccttttataaaacactgagtttttttattccttaagtcacatatcccagaaatgttttggttgtgaatcatttgccagcgagccaagggagaggcagggattcccttgaaatgtactcttacacttttttattttatttttaatgtacatttgtgtgcaccagaatggaatgtgctctttttaaagagctggacagtggttgcttcagacttctgaataccagaaagacttgccttttaatttttaaatattactttttacatcataaaatgtgttatcttatccatgtatttgaataacatcatatataaaggtagttttttgcttgtgcttagtgaagcctccttttttaacatacatttgatatgctttatgttctttttcttgatttttagtactgagaatttataagccaagaagtaactgacaatatgtttagcaggatgtaatcccagctacttgggaagctgaggtgggaggatcgcttgagtctaggagtttgaggctgcagtgagctatgatggtgccactgcactccatcctgggtgagagatcaagaccctatctcaaaaaatgagcaagttttttttttttttttaaatcagacttagggctagcaaggatgtgatcaccctggcccatttatacctcagcagtgaaggtgtaatttatacacacctctttgaaaacagtttaattcagtaagtgagtgcaactatgtgccatgcactccaaagtaggtccccacagttattctctcatagccttgttttttcagatctcaccatatttatttgtttctttgattttcttttcttatagattacaagctctgcaaggacaggggcatatttgttttgttcaccattaagtaataaacacctaatacagtgcctgtcatgtagttgcttagcagatattagttagatgcatgaatgtgtaggtatcaaagattttttttttcaggagatcacattctagtggaagacactatactgctttatgtgataagtgctttgataaagtaagcaagtcatctaaccagatcttggtagttaaggttttctgagatagaacttgagctgagtcttttaaaaatagtaggatttataagggaaaattaaaggtcttccacaaagaaactaagtgaaactaagcagcctatgaaaaggtgaaagttggagagattataggctatgaacatgggagatgagagagaaaactgcaggatagggacagaaacactgtgctaagacatttgaactttgtcctgtgcaatgtgggaaccagtagtgaaggttaattaactgacatgatcagatatgtatttgaaaagggctcttgttggcattagtctagagaatgcgatggagctgggaagcgaaagaagaaatgttgggagcctgtgttgtagtaactgaaaaatggcaatggcccagaattaaagcagcaagaataggagtgggctcaagtgatgtataaggaaaaaaaaaaaaatgacaactcagttttgttgttggtaaggagagtaaagtatggcttctgggtttctcatttgagatactgagtaaatgatggtgttaacccattgagaaaatagtgtggttagagtgggaagaaagttaatttaaaatgttcatttttttttttagtcatttctacttttggattctaggtttgtgtgctatattggttataaccaatttgctgaataataaattatcccaaaacttagctacttaaaacaacaaacattatctcacagtttctgtaagtcaaaagtccaggtctctcatgaagttgcagtcaggctcttggctagggctgcagtcatctgaaggattagtaagtcgctaagcccacacttaagctccacccttgaagggagaagtttggaaagaatttgtgaacatatttttaaatcacatatgctatgaacaggtttaggggagggagaggaaagaaaactttaacttttcattagcatactgcatctgtagttcctaatgggcatgttgtaaagatgttaagacgttttctatgcattataggtatatagtagtattttgttttgttctgtttttttgtttggtatgtagtagtttttaatcaaaccttaacgtatttgatattaagatttattgagtttcttgttgagatgtagaaataaaggggatccatttcatttatcca

SEQ ID NO: 143390 - DNA, 568 bp, Homo sapiens
  Payload ID: 8326
  Gene Symbol: ICE2
  Gene Name: interactor of little elongation complex ELL subunit 2
  ENST ID: ENST00000560520
  CDS Start-End: 287-568
cacatcctttaaatatggtcttttttgggcgcgcgcgacaatgtgaggagtggggtggagcgtgtgtggtgtgtggctgcggcctgggcaagagccgccgcggaccatgaggtcactttatcagtctgcctggggtcacaggagaagtactgaacatgagagatcaagcctgatttgtagtcctgatgatgtctctgagtaagttctggagggatcctgcctcttggagccttcgcagccaggcagctgtgaactgtgagctagagtgaagcagaaatctaggaagatgagctccaagatggtcataagtgaaccaggactgaattgggatatttcccccaaaaatggccttaagacatttttctctcgagaaaattataaagatcattccatggctccaagtttaaaagaactacgtgttttatccaacagacgtataggagaaaatttgaatgcctcagcaagttctgtagaaaatgagccggcagttagttcagcaactcaagcaaaggaaaaagttaaaaccacaattggaatggttcttcttccaaaaccaagagttccttat

SEQ ID NO: 143391 - DNA, 564 bp, Homo sapiens
  Payload ID: 8326
  Gene Symbol: ICE2
  Gene Name: interactor of little elongation complex ELL subunit 2
  ENST ID: ENST00000561446
  CDS Start-End: 104-289
atcctttaaatatggtcttttttgggcgcgcgcgacaatgtgaggagtggggtggagcgtgtgtggtgtgtggctgcggcctgggcaagagccgccgcggaccatgagggatatttcccccaaaaatggccttaagacatttttctctcgagaaaattataaagatcattccatggctccaagtttaaaagaactacgtgttttatccaacagagagagcagaggagttatgtggacttgttggttaaatacgcaaagattcctgcaaattccaaagctgttggaataaataaaaatgactacttgcagtacttggatatgaaaaaacatgtgaacgaagaagttactgagttcctaaagtttttgcagaattctgcaaagaaatgtgcgcaggattataatatgctttctgatgatgcccgtctcttcacagagaaaattttaagagcttgcattgaacaagtgaaaaagtattcagaattctatactctccacgaggtcaccagcttaatgggattcttcccattcagagtagagatgggattaaagttagaaaaaactctt

SEQ ID NO: 143392 - DNA, 1470 bp, Homo sapiens
  Payload ID: 8326
  Gene Symbol: ICE2
  Gene Name: interactor of little elongation complex ELL subunit 2
  ENST ID: ENST00000558512
  CDS Start-End: 455-1470
aggggcgggaggagggaacatggcggccgggccaggaccctttgctcctggctctgcgcggctcctacccctgctttgcttgcccttttacctgcttttctggaaccttgtttcccctctctttgcgtcccctttccctcagccgtttcttttgccttcctcgactattcccccccagctccacactgggtcgaagtgtgagaggtagattaagtgggagccggtcgggcccgttcggtgtcgagagaccgactcctaaatttgattaggttctcgcaggtcactttatcagtctgcctggggtcacaggagaagtactgaacatgagagatcaagcctgatttgtagtcctgatgatgtctctgagtaagttctggagggatcctgcctcttggagccttcgcagccaggcagctgtgaactgtgagctagagtgaagcagaaatctaggaagatgagctccaagatggtcataagtgaaccaggactgaattgggatatttcccccaaaaatggccttaagacatttttctctcgagaaaattataaagatcattccatggctccaagtttaaaagaactacgtgttttatccaacagacgtataggagaaaatttgaatgcctcagcaagttctgtagaaaatgagccggcagttagttcagcaactcaagcaaaggaaaaagttaaaaccacaattggaatggttcttcttccaaaaccaagagttccttatcctcgtttctctcgtttctcacagagagagcagaggagttatgtggacttgttggttaaatacgcaaagattcctgcaaattccaaagctgttggaataaataaaaatgactacttgcagtacttggatatgaaaaaacatgtgaacgaagaagttactgagttcctaaagtttttgcagaattctgcaaagaaatgtgcgcaggattataatatgctttctgatgatgcccgtctcttcacagagaaaattttaagagcttgcattgaacaagtgaaaaagtattcagaattctatactctccacgaggtcaccagcttaatgggattcttcccattcagagtagagatgggattaaagttagaaaaaactcttctcgcattgggcagtgtaaaatatgtgaaaacagtatttccctcaatgcctataaagttgcagctgtcaaaggacgatatagctaccattgaaacgtcagaacaaacagctgaagctatgcattatgatattagtaaagatccaaatgcagagaagcttgtttccagatatcaccctcagatagctctaactagtcagtcattatttaccttattaaataatcatggaccaacgtacaaggaacagtgggaaattccagtgtgtattcaagtaatacctgttgcaggttcaaaaccagttaaagtaatatatattaattcaccacttccccaaaagaaaatgactatgagagagagaaa

SEQ ID NO: 143393 - DNA, 559 bp, Homo sapiens
  Payload ID: 8326
  Gene Symbol: ICE2
  Gene Name: interactor of little elongation complex ELL subunit 2
  ENST ID: ENST00000560072
  CDS Start-End: 125-559
aaatatggtcttttttgggcgcgcgcgacaatctgagtaagttctggagggatcctgcctcttggagccttcgcagccaggcagctgtgaactgtgagctagagtgaagcagaaatctaggaagatgagctccaagatggtcataagtgaaccaggactgaattgggatatttcccccaaaaatggccttaagacatttttctctcgagaaaattataaagatcattccatggctccaagtttaaaagaactacgtgttttatccaacagacgtataggagaaaatttgaatgcctcagcaagttctgtagaaaatgagccggcagttagttcagcaactcaagcaaaggaaaaagttaaaaccacaattggaatggttcttcttccaaaaccaagagttccttatcctcgtttctctcgtttctcacagagagagcagaggagttatgtggacttgttggttaaatacgcaaagattcctgcaaattccaaagctgttggaataaataaaaatgactacttgcagtacttggatatgaaaaaacatgtgaacgaagaa

SEQ ID NO: 143394 - DNA, 555 bp, Homo sapiens
  Payload ID: 8326
  Gene Symbol: ICE2
  Gene Name: interactor of little elongation complex ELL subunit 2
  Uniprot ID: Q659A1
  ENST ID: ENST00000560668
  CDS Start-End: 154-375
agggccgagtcggcgcggccacatcctttaaatatggtcttttttgggcgcgcgcgacaatctgagtaagttctggagggatcctgcctcttggagccttcgcagccaggcagctgtgaactgtgagctagagtgaagcagaaatctaggaagatgagctccaagatggtcataagtgaaccaggactgaattgggatatttcccccaaaaatggccttaagacatttttctctcgagaaaattataaagatcattccatggctccaagtttaaaagaactacgtgttttatccaacagagagagcagaggagttatgtggacttgttggttaaatacgcaaagattcctgcaaattccaaagctgttggaataaataaaaatgactacttgcagtacttggatatgaaaaaacatgtgaacgaagaagttactgagttcctaaagtttttgcagaattctgcaaagaaatgtgcgcaggattataatatgctttctgatgatgcccgtctcttcacagagaaaattttaagagcttgcattgaacaagtgaaaa

SEQ ID NO: 143395 - DNA, 7060 bp, Homo sapiens
  Payload ID: 8326
  Gene Symbol: ICE2
  Gene Name: interactor of little elongation complex ELL subunit 2
  Uniprot ID: Q659A1
  ENST ID: ENST00000558181
  CDS Start-End: 251-472
ccactatgtcgctgagacgtcatcacgcagggccgagtcggcgcggccacatcctttaaatatggtcttttttgggcgcgcgcgacaatgtgaggagtggggtggagcgtgtgtggtgtgtggctgcggcctgggcaagagccgccgcggaccatgagctgagtaagttctggagggatcctgcctcttggagccttcgcagccaggcagctgtgaactgtgagctagagtgaagcagaaatctaggaagatgagctccaagatggtcataagtgaaccaggactgaattgggatatttcccccaaaaatggccttaagacatttttctctcgagaaaattataaagatcattccatggctccaagtttaaaagaactacgtgttttatccaacagagagagcagaggagttatgtggacttgttggttaaatacgcaaagattcctgcaaattccaaagctgttggaataaataaaaatgactacttgcagtacttggatatgaaaaaacatgtgaacgaagaagttactgagttcctaaagtttttgcagaattctgcaaagaaatgtgcgcaggattataatatgctttctgatgatgcccgtctcttcacagagaaaattttaagagcttgcattgaacaagtgaaaaagtattcagaattctatactctccacgaggtcaccagcttaatgggattcttcccattcagagtagagatgggattaaagttagaaaaaactcttctcgcattgggcagtgtaaaatatgtgaaaacagtatttccctcaatgcctataaagttgcagctgtcaaaggacgatatagctaccattgaaacgtcagaacaaacagctgaagctatgcattatgatattagtaaagatccaaatgcagagaagcttgtttccagatatcaccctcagatagctctaactagtcagtcattatttaccttattaaataatcatggaccaacgtacaaggaacagtgggaaattccagtgtgtattcaagtaatacctgttgcaggttcaaaaccagttaaagtaatatatattaattcaccacttccccaaaagaaaatgactatgagagagagaaatcaaatctttcatgaagttccattaaaatttatgatgtccaaaaacacatctgttccagtctctgcagtctttatggacaaacctgaagagtttatatctgaaatggacatgtcctgtgaagtcaacgagtgccgaaaaattgagagtcttgaaaacttgtatttggattttgatgatgatgtcacagaacttgaaacttttggagtaaccaccaccaaagtatcaaaatcaccaagtccagcaagtacttccacagtacctaacatgacagatgctcctacagcccccaaagcaggaactacaactgtggcaccaagtgcaccagacatttctgctaattctagaagtttatctcagattctgatggaacaattgcaaaaggagaaacagctggtcactggtatggatggtggccctgaggaatgcaaaaataaagatgatcagggatttgaatcatgtgaaaaggtatcaaattctgacaagcctttgatacaagatagtgacttgaaaacatctgatgccttacagttagaaaattctcaggaaattgaaacttctaataaaaatgatatgactatagatatattacatgctgatggtgaaagacctaatgttctagaaaacctagacaactcaaaggaaaagactgttggatcagaagcagcaaaaactgaagatacagttctctgcagcagtgatacagatgaggagtgtttaatcattgatacagaatgtaaaaataatagtgatggaaagacagctgttgtgggttctaacttaagttccagaccagctagtccaaattcttcctcaggacaggcttctgtaggaaaccagactaatactgcttgtagtcctgaagagtcatgtgttttaaaaaaacctatcaaacgagtatataaaaaatttgatccagttggagagattttaaaaatgcaggatgagctcttaaagccaatttccagaaaagtaccagaattgcccttaatgaatttagaaaattctaaacagccttctgtttctgagcaattgtctggtccttcagactcctctagttggccgaaatctggatggccttctgcatttcagaagccaaaaggacgattgccatatgaacttcaggactatgttgaagatacatcggaatacctagctcctcaggaaggaaattttgtttataagttatttagcctgcaagacctgttgttactcgtacgctgcagtgtccagaggatagagacaagaccacgttctaaaaaacggaagaaaatcagaagacaatttccagtttatgtactaccaaaagtagagtatcaagcttgttatggagttgaagctctgactgaaagtgaactttgtcgcttatggactgaaagtttattgcattccaacagctcattttatgttgggcatatcgatgcatttacttcaaaactttttctactggaagaaattacctcagaagaattaaaagaaaagctttcagcactcaagatttccaatttatttaacatcctccaacacattctaaagaaactaagtagcttgcaggagggttcctacttgttatctcatgcagcagaagattcttcactcctgatttataaggcctctgatggaaaagttactaggacagcatacaatttgtataaaacacattgcggccttcctggtgtaccttccagtctctcagttccctgggtcccattagatcccagcctgttattaccatatcatatccatcatggaagaataccttgtacttttccaccgaaatcactggataccacaacacaacaaaagattggtggaacgagaatgcctacacgcagccacaggaatccagtttccatggaaaccaaaagcagttgcttgcctgctcagcaagttgaaactgaaggagtggctccacataaaagaaaaataacttgaggactgtaccatggaaaactaaatttaaaaaaacagttataacagtgtttaatttagataagtttgagggaaaataatcagtaggcaagaggaacatttttcctgtagtagctagagtgccttgaaaaaatgtgttggctatgtgaaggaatatttcaactaaaatggaatggtatgcttttcacccttgaagtttgaggaggatcttgatatgttttaacattatcatggcagggaaatatataaagaagaaaaatatttttacattaaaccttttctaaaaattgtaaatagaaaaataatttggttttttatcaagaacaacacttatcgttatgtattgtgttagttatattgccagtctgttgcgactgactcaaaaagttaaatgttgccactgctgaagatgattatgagcatcgcaaactttgtttctgacccattttgacagtttttatatactcctttaaaatgatgaatgttacaggttaataaagttaatacctttaaaaacttggtgaaattccattacagaagccaaaaataaaaactccctgcctctgaaaagtcagattactgacttcttgtttggcaaccatcagtttgtttaataaaagaaaaaatttggtggtataacatgtttgatgacagatgcctctatctctagattcaagctgagtgttgaaatacactgctgaaagcaaagagataggtatgttttccagaaaaaaagtcagtgtcattgctccagatgacaaggttaatgtggtaaagcataagcttttttttttttttgagatggagtctcgctctgttgcccaggctggagtgcagtggcatgatctcagctcaccacaacatccacctcctggattaaagcgattctcctgcctcatcctcccgagtagctgggactacaggcacctaccaccaggcttggctaatttttttttgtatttttagtagagacagggtgttaccatgttggccgggctggtctcaaactcctgaccttgtgatccgcctgccttggcctcccaaagtgctgggattacaggggtaagccaccgtgcctggccagcataagctatttttatcctcatctatactgattgatttaaattttccgggcctgcagatgaatttggaaaagggcataatcaactgatgttgctgtagcaaatttggacttaagaaactacagacagggccgggcgtggtggctcacacctgtaattccagcacttcgcaaggccgaggcgggagaatcacttgagtccaggggttggagaccagtctgggcaacacagacctcatctctacaaataaaaaagttagccgggtgtggtggggtgtgcctgtagtcccagctactcaaaaggctgaggcagaagaattgcttgagcccaagaagtcaaggctacagtgagttgtgatcgcaccacagaactcagcttgagtatcagagtgtgaccctgtctcaaagaaaaaaaaaaacaggacaggcttgtttaatctttagaacccttacactaaaattttcagaaattatgtatgtcatttgtaaaatataagttttgtaatcctagataattgcttcacattgaaattttttagctattctgtgtaaagaatagctattcttttggcctaatttctgagaaattagaccgaaaaatctcctcaagtattgtaacagttgaaaatacttatattcaactaccaagttttgtttcattttgattttttgttataaaacatttttaagttatttgagaagtaattattagtaaaattgtatcttgataaatcatttcctcatcctgccattcccttttataaaacactgagtttttttattccttaagtcacatatcccagaaatgttttggttgtgaatcatttgccagcgagccaagggagaggcagggattcccttgaaatgtactcttacacttttttattttatttttaatgtacatttgtgtgcaccagaatggaatgtgctctttttaaagagctggacagtggttgcttcagacttctgaataccagaaagacttgccttttaatttttaaatattactttttacatcataaaatgtgttatcttatccatgtatttgaataacatcatatataaaggtagttttttgcttgtgcttagtgaagcctccttttttaacatacatttgatatgctttatgttctttttcttgatttttagtactgagaatttataagccaagaagtaactgacaatatgtttagcaggatgtaatcccagctacttgggaagctgaggtgggaggatcgcttgagtctaggagtttgaggctgcagtgagctatgatggtgccactgcactccatcctgggtgagagatcaagaccctatctcaaaaaatgagcaagttttttttttttttttaaatcagacttagggctagcaaggatgtgatcaccctggcccatttatacctcagcagtgaaggtgtaatttatacacacctctttgaaaacagtttaattcagtaagtgagtgcaactatgtgccatgcactccaaagtaggtccccacagttattctctcatagccttgttttttcagatctcaccatatttatttgtttctttgattttcttttcttatagattacaagctctgcaaggacaggggcatatttgttttgttcaccattaagtaataaacacctaatacagtgcctgtcatgtagttgcttagcagatattagttagatgcatgaatgtgtaggtatcaaagattttttttttcaggagatcacattctagtggaagacactatactgctttatgtgataagtgctttgataaagtaagcaagtcatctaaccagatcttggtagttaaggttttctgagatagaacttgagctgagtcttttaaaaatagtaggatttataagggaaaattaaaggtcttccacaaagaaactaagtgaaactaagcagcctatgaaaaggtgaaagttggagagattataggctatgaacatgggagatgagagagaaaactgcaggatagggacagaaacactgtgctaagacatttgaactttgtcctgtgcaatgtgggaaccagtagtgaaggttaattaactgacatgatcagatatgtatttgaaaagggctcttgttggcattagtctagagaatgcgatggagctgggaagcgaaagaagaaatgttgggagcctgtgttgtagtaactgaaaaatggcaatggcccagaattaaagcagcaagaataggagtgggctcaagtgatgtataaggaaaaaaaaaaaaatgacaactcagttttgttgttggtaaggagagtaaagtatggcttctgggtttctcatttgagatactgagtaaatgatggtgttaacccattgagaaaatagtgtggttagagtgggaagaaagttaatttaaaatgttcatttttttttttagtcatttctacttttggattctaggtttgtgtgctatattggttataaccaatttgctgaataataaattatcccaaaacttagctacttaaaacaacaaacattatctcacagtttctgtaagtcaaaagtccaggtctctcatgaagttgcagtcaggctcttggctagggctgcagtcatctgaaggattagtaagtcgctaagcccacacttaagctccacccttgaagggagaagtttggaaagaatttgtgaacatatttttaaatcacatatgctatgaacaggtttaggggagggagaggaaagaaaactttaacttttcattagcatactgcatctgtagttcctaatgggcatgttgtaaagatgttaagacgttttctatgcattataggtatatagtagtattttgttttgttctgtttttttgtttggtatgtagtagtttttaatcaaaccttaacgtatttgatattaagatttattgagtttcttgttgagatgtagaaataaaggggatccatttcattta

SEQ ID NO: 143396 - DNA, 584 bp, Homo sapiens
  Payload ID: 8326
  Gene Symbol: ICE2
  Gene Name: interactor of little elongation complex ELL subunit 2
  ENST ID: ENST00000560406
  CDS Start-End: 287-584
aaatatggtcttttttgggcgcgcgcgacaatgtgaggagtggggtggagcgtgtgtggtgtgtggctgcggcctgggcaagagccgccgcggaccatgaggttctcgcaggtcactttatcagtctgcctggggtcacaggagaagtactgaacatgagagatcaagcctgatttgtagtcctgatgatgtctctgagtaagttctggagggatcctgcctcttggagccttcgcagccaggcagctgtgaactgtgagctagagtgaagcagaaatctaggaagatgagctccaagatggtcataagtgaaccaggactgaattgggatatttcccccaaaaatggccttaagacatttttctctcgagaaaattataaagatcattccatggctccaagtttaaaagaactacgtgttttatccaacagacgtataggagaaaatttgaatgcctcagcaagttctgtagaaaatgagccggcagttagttcagcaactcaagcaaaggaaaaagttaaaaccacaattggaatggttcttcttccaaaaccaagagttccttatcctcgtttctctcgtt

SEQ ID NO: 143397 - DNA, 571 bp, Homo sapiens
  Payload ID: 8326
  Gene Symbol: ICE2
  Gene Name: interactor of little elongation complex ELL subunit 2
  ENST ID: ENST00000560895
  CDS Start-End: 201-356
atcctttaaatatggtcttttttgggcgcgcgcgacaatgtgaggagtggggtggagcgtgtgtggtgtgtggctgcggcctgggcaagagccgccgcggaccatgagctgagtaagttctggagggatcctgcctcttggagccttcgcagccaggcagctgtgaactgtgagctagagtgaagcagaaatctaggaagatgagctccaagatggtcataagtgaaccaggactgaattgggatatttcccccaaaaatggccttaagacatttttctctcgagaaaattataaagatcattccatggctccaagtttaaaagaactacgtgttttatccaacagaaaattttaagagcttgcattgaacaagtgaaaaagtattcagaattctatactctccacgaggtcaccagcttaatgggattcttcccattcagagtagagatgggattaaagttagaaaaaactcttctcgcattgggcagtgtaaaatatgtgaaaacagtatttccctcaatgcctataaagttgcagctgtcaaaggacgatatagctaccattgaaacg

SEQ ID NO: 143398 - DNA, 3796 bp, Homo sapiens
  Payload ID: 8326
  Gene Symbol: ICE2
  Gene Name: interactor of little elongation complex ELL subunit 2
  ENST ID: ENST00000561114
  CDS Start-End: 164-1315
atgtgaggagtggggtggagcgtgtgtggtgtgtggctgcggcctgggcaagagccgccgcggaccatgagctgagtaagttctggagggatcctgcctcttggagccttcgcagccaggcagctgtgaactgtgagctagagtgaagcagaaatctaggaagatgagctccaagatggtcataagtgaaccaggactgaattgggatatttcccccaaaaatggccttaagacatttttctctcgagaaaattataaagatcattccatggctccaagtttaaaagaactacgtgttttatccaacagacgtataggagaaaatttgaatgcctcagcaagttctgtagaaaatgagccggcagttagttcagcaactcaagcaaaggaaaaagttaaaaccacaattggaatggttcttcttccaaaaccaagagttccttatcctcgtttctctcgtttctcacagagagagcagaggagttatgtggacttgttggttaaatacgcaaagattcctgcaaattccaaagctgttggaataaataaaaatgactacttgcagtacttggatatgaaaaaacatgtgaacgaagaagttactgagttcctaaagtttttgcagaattctgcaaagaaatgtgcgcaggattataatatgctttctgatgatgcccgtctcttcacagagaaaattttaagagcttgcattgaacaagtgaaaaagtattcagaattctatactctccacgaggtcaccagcttaatgggattcttcccattcagagtagagatgggattaaagttagaaaaaactcttctcgcattgggcagtgtaaaatatgtgaaaacagtatttccctcaatgcctataaagttgcagctgtcaaaggacgatatagctaccattgaaacgtcagaacaaacagctgaagctatgcattatgatattagtaaagatccaaatgcagagaagcttgtttccagatatcaccctcagatagctctaactagtcagtcattatttaccttattaaataatcatggaccaacgtacaaggaacagtgggaaattccagtgtgtattcaagtaatacctgttgcaggttcaaaaccagttaaagtaatatatattaattcaccacttccccaaaagaaaatgactatgagagagagaaatcaaatctttcatgaagttccattaaaatttatgatgtccaaaaacacatctgttccagtctctgcagtctttatggacaaacctgaagagtttatatctgaaatggacgtatgtaatgctttttttttcccctaaggggaatgtacttgtttatccttttgaagcataaagttttattgcaaatccctaaacctagtagttaaaaatacaggctttagattcaaactgaaattgaatttcgagtctagctggactttaggcaactaacttaacctccctcagcctaagttttctcctttcatacatgaaaggaagtagtacctacttgacaaggttattatgagggttaagtttgatattttatgttaaaggctgagcacgtttttagttatgtatgtagtgaaaactccttgatggtggtggttaatatgaggttttgtttaattggtctcattcatattcaagagttttatttttttgagatggaacctcaccctgccacccaggctggagtgcagtggtgcgatctctgctcactgcaacctccgcctcccgggttcaagtgatgctcctgcctcagactcccgagtagctgagattacaggtgtgcaccaccatacccagctaattttttgtagttttagtagagatgagatttcgccatgttggcctggctggtctcaaacttctgacttcaggtgatccacccatctcagccacccaaagtgctgggattacaggcgtcagccactgcacctgacccatatctaagagtttttaagtgtgaaaaggaacaggtgagcttaatttgattgttacagaaagtattttgccagattgttaatcttcagtatacttagtagctatgtgacctcgggcagattacataatatctctgtgtctagtttgcttatctgtaaaatgggcatcatgatattacctaactcataggattgtttaggtttaaatgaatttgtacatataaagcatttagagtaacacttggcactctgtaaatattagcttttattattctgtattttaaaatattttttccattatttttaaatacattgtttatagagaacttgattcattcattccataagtttttattaagcagatactattctatgcagggaggaagcagcagtgaataaaaacaaaacctgttttccctcagaccttaaataagtggcagagggcccagataacagtaaaaaagcaggtagtggtaaatgctatggagaaaaatagagtacgttaaggggaaatagagagatgggtggggaaggggtcattttatattcacgattaagaaggtttttctgaggataggaaatgtggacagagacttgagtaaaatgagggagcaaacaaaattttaaaatataaaaatgtttttcttgtacttaagagctcatacaattttaaggatattggccttttggtttttatatttgtttatgtttttctctttgccatttgccttttaatatttttatgatacatatgtcataaagcatttttaacttatgttttcttcttacacattttacttttaaaaatctgcctaaaacttatattgaggtgaatgtcaggcagtaacaagaagaaacatgaggtaggttaaaagggatgaaaattgacagtggcttctttcagtaatggtagaccaggtaatttggaccctccttttattgatgacatctaaaaaagctggacaaatattaaaatgtctttcttagaagtatcaaaaagctaacaagatagtgaggaattgtagggctgagatactgaagaaaacaggattcccagaaggtaagcctattatacttagggtcattttttccttggattatatgtgccagttctgaagaggcaactaagaaaatgaactgtgcttttggcagcatcataggactagggggataaaaggaaaacttcagttttccaccaagggcctggaccccaaaggggctgcacctcaggagtcagggtgaaccagaagtaaatgagctttctctgaaatgacagcctgagttttcaggccctgaacttggagtaaaatgctttttctggattgtgcaggtaaaagtaagtaaaaatgagaggatgataatgctttttttgcctcaaattattatacttcttaatgtctattagtctaatttatgttgctaagtgttctggaattattttgatttctgtggtccaacaatttggaatgtttttaaattttgaagtgcttgagtttattgtttgtttacatttttcttaatgatatctaattttatttccttctgaacatagaataagactttatcagattctgctttggtctatattgagattttctttgtatattaatttatagttcattttttgaaatgccctttggattcttgggaagggaaaaagtgtatctttgtagtctgtttatatatgtattttcaatctttcatatatattctcatcgtttattattattcatactttctggattcctttttattttttacttagagacagtatctcattgacttagtataattgtgtctctgtcaaatttttcttttatttttcagtttgtacaataaaaatttatgaccacta

SEQ ID NO: 143399 - DNA, 2911 bp, Homo sapiens
  Payload ID: 8327
  Gene Symbol: ITIH1
  Gene Name: inter-alpha-trypsin inhibitor heavy chain 1
  Uniprot ID: P19827
  ENST ID: ENST00000273283
  CDS Start-End: 25-2760
acagggcagcaggagccttagagcatggacggtgccatggggcctcgggggctgctgttgtgcatgtacctggtatctctcctcatcctgcaggccatgcctgccctgggctcggctacaggcaggtccaagagcagcgagaagcgacaggctgtggacaccgctgtcgatggcgtgttcatccggagtttgaaagtcaactgcaaagtcacctctcgcttcgcccactatgttgtcaccagccaagtggtcaacactgccaatgaagccagggaagtggccttcgacctggaaatccccaagacagcattcatcagtgactttgccgttacagcagatggaaacgcatttatcggagacataaaggacaaggtgactgcatggaagcagtaccggaaagcagctatctcaggagagaatgccggccttgtcagggcctcggggagaactatggagcaattcaccatccacctcaccgtcaatccccagagcaaggtcacgtttcagctgacttatgaggaagtgctgaagagaaaccatatgcagtatgaaattgtcatcaaagtcaagcccaagcagctggtgcatcattttgagattgatgtggacatcttcgagccccaggggatcagcaagctggatgcccaggcctctttcctgccgaaggaactggcagcccaaactatcaagaagtccttctcaggaaaaaagggtcatgtgctgttccgtcccaccgtgagccagcagcagtcctgccccacatgctctacatccttactgaacgggcacttcaaggtgacctacgatgtcagtcgagacaagatctgcgacctcctggtggccaataaccactttgcccacttctttgccccccaaaacctgacaaacatgaacaagaacgtggtttttgtgattgacatcagtggctccatgagaggccagaaagtgaagcagaccaaggaggcactccttaaaattctgggggacatgcagccaggggactactttgacctggttctttttgggactcgagtacaatcgtggaagggctcgctggtgcaagcatctgaggccaacctacaagcagctcaagactttgtgcggggcttttccctggatgaggccacaaacctgaatggaggtttgctccggggaattgagatcttgaaccaagttcaggaaagcctcccagaactcagcaaccatgcctcaatactcatcatgttgacagatggcgatcccacagagggggtgacggaccgttcccaaatcctcaagaacgtccgcaacgccatccggggcaggttcccgctctacaacctgggtttcggccacaatgtggactttaactttctggaggtcatgtccatggagaacaacggacgggcccagagaatctacgaggaccatgatgccacccagcagctgcagggtttctacagccaggtagccaaacccctgctggtggatgtggatttgcagtacccccaggatgctgtcttggccctgacccagaaccaccataaacagtactacgaaggctcagagattgtggtggccgggcgcattgctgacaacaaacagagcagcttcaaggctgatgtgcaggcccatggggagggacaagaattcagtataacctgcctagtggatgaggaggagatgaagaaactgctccgagagcgtggccacatgctggagaaccacgtcgagcgcctctgggcctacctcaccatccaggagctgctggccaagcggatgaaggtggacagggaggagagggccaacctgtcatcccaggccctgcagatgtcgctggactatgggtttgtgaccccactgacctccatgagcatcaggggcatggcggaccaggacggcctgaagcccaccatcgacaagccctcagaggattctccgcctttggagatgctgggacccagaaggacgttcgtgctgtcagccttgcagccttctcctactcattccagctccaatacccagcggctgccagaccgagtgaccggcgtggacacagaccctcacttcatcatccacgtgccccagaaagaggacaccctgtgcttcaacatcaatgaggagcctggtgttatcctgagcctggtacaggaccccaacacaggcttctcagtgaatggacagctcattggcaacaaggccaggagccctgggcagcatgacggcacgtacttcgggcggctgggaatcgcaaaccctgccacggactttcagttggaagtgactcctcagaacattacgctgaaccccggctttggtgggcctgtgttttcctggagggaccaagctgtgctgcggcaggacggggtggtggtgaccatcaacaagaagaggaacctggtggtgtctgtggacgacggtggcacctttgaggttgttttgcaccgagtgtggaaggggagctcggtccaccaggacttcctgggcttctatgtgctggacagtcatcggatgtcagcccggacgcacgggctgctggggcaatttttccaccccatcggttttgaagtgtctgacatccacccaggctctgaccccacaaagccagatgccacgatggtggtgaggaaccgccggctcacggtcaccaggggtttgcaaaaagactacagcaaggacccgtggcatggggccgaggtgtcctgctggttcattcacaacaatggggctggactcatcgatggtgcctacactgattatatcgtccccgacatcttctgagccctctggccagcacgcctgtcctcccccggggccaaggcagaggaggaggacgacatcctgacctgctgctgaggctgtacctccttgactaagctggttccttgtgtcaaagcacctcatgccttccattaaagagaggccgtgtcca

SEQ ID NO: 143400 - DNA, 1122 bp, Homo sapiens
  Payload ID: 8327
  Gene Symbol: ITIH1
  Gene Name: inter-alpha-trypsin inhibitor heavy chain 1
  ENST ID: ENST00000405128
  CDS Start-End: 140-973
gtgtcccgggagccaatcaagggcatgtgatgttgagtggacatccctgcttggtggcctcaggccagccccaccagtgaggaaagagtcatcagagggatcagcagctccagggaaggcctggctgccccgcttctaaatgccactccccctcccatcagcgttcgtgctgtcagccttgcagccttctcctactcattccagctccaatacccagcggctgccagaccgagtgaccggcgtggacacagaccctcacttcatcatccacgtgccccagaaagaggacaccctgtgcttcaacatcaatgaggagcctggtgttatcctgagcctggtacaggaccccaacacaggcttctcagtgaatggacagctcattggcaacaaggccaggagccctgggcagcatgacggcacgtacttcgggcggctgggaatcgcaaaccctgccacggactttcagttggaagtgactcctcagaacattacgctgaaccccggctttggtgggcctgtgttttcctggagggaccaagctgtgctgcggcaggacggggtggtggtgaccatcaacaagaagaggaacctggtggtgtctgtggacgacggtggcacctttgaggttgttttgcaccgagtgtggaaggggagctcggtccaccaggacttcctgggcttctatgtgctggacagtcatcggatgtcagcccggacgcacgggctgctggggcaatttttccaccccatcggttttgaagtgtctgacatccacccaggctctgaccccacaaagccagatgccacgatggtggtgaggaaccgccggctcacggtcaccaggggtttgcaaaaagactacagcaaggacccgtggcatggggccgaggtgtcctgctggttcattcacaacaatggggctggactcatcgatggtgcctacactgattatatcgtccccgacatcttctgagccctctggccagcacgcctgtcctcccccggggccaaggcagaggaggaggacgacatcctgacctgctgctgaggctgtacctccttgactaagctggttccttgtgtcaaagcacctcatgccttccattaaagagaggccgtgtc

SEQ ID NO: 143401 - DNA, 1517 bp, Homo sapiens
  Payload ID: 8327
  Gene Symbol: ITIH1
  Gene Name: inter-alpha-trypsin inhibitor heavy chain 1
  ENST ID: ENST00000428133
  CDS Start-End: 1-1395
tccatggagaacaacggacgggcccagagaatctacgaggaccatgatgccacccagcagctgcagggtttctacagccaggtagccaaacccctgctggtggatgtggatttgcagtacccccaggatgctgtcttggccctgacccagaaccaccataaacagtactacgaaggctcagagattgtggtggccgggcgcattgctgacaacaaacagagcagcttcaaggctgatgtgcaggcccatggggagggacaagaattcagtataacctgcctagtggatgaggaggagatgaagaaactgctccgagagcgtggccacatgctggagaaccacgtcgagcgcctctgggcctacctcaccatccaggagctgctggccaagcggatgaaggtggacagggaggagagggccaacctgtcatcccaggccctgcagatgtcgctggactatgggtttgtgaccccactgacctccatgagcatcaggggcatggcggaccaggacggcctgaagcccaccatcgacaagccctcagagggtataggctgcagggagatgctgggacccagaaggacgttcgtgctgtcagccttgcagccttctcctactcattccagctccaatacccagcggctgccagaccgagtgaccggcgtggacacagaccctcacttcatcatccacgtgccccagaaagaggacaccctgtgcttcaacatcaatgaggagcctggtgttatcctgagcctggtacaggaccccaacacaggcttctcagtgaatggacagctcattggcaacaaggccaggagccctgggcagcatgacggcacgtacttcgggcggctgggaatcgcaaaccctgccacggactttcagttggaagtgactcctcagaacattacgctgaaccccggctttggtgggcctgtgttttcctggagggaccaagctgtgctgcggcaggacggggtggtggtgaccatcaacaagaagaggaacctggtggtgtctgtggacgacggtggcacctttgaggttgttttgcaccgagtgtggaaggggagctcggtccaccaggacttcctgggcttctatgtgctggacagtcatcggatgtcagcccggacgcacgggctgctggggcaatttttccaccccatcggttttgaagtgtctgacatccacccaggctctgaccccacaaagccagatgccacgatggtggtgaggaaccgccggctcacggtcaccaggggtttgcaaaaagactacagcaaggacccgtggcatggggccgaggtgtcctgctggttcattcacaacaatggggctggactcatcgatggtgcctacactgattatatcgtccccgacatcttctgagccctctggccagcacgcctgtcctcccccggggccaaggcagaggaggaggacgacatcctgacctgctgctgaggctgtacctccttgactaagctggttccttgtgtcaaagcacctca

SEQ ID NO: 143402 - DNA, 978 bp, Homo sapiens
  Payload ID: 8327
  Gene Symbol: ITIH1
  Gene Name: inter-alpha-trypsin inhibitor heavy chain 1
  ENST ID: ENST00000480409
  CDS Start-End: 22-663
gggcagcaggagccttagagcatggacggtgccatggggcctcgggggctgctgttgtgcatgtacctggtatctctcctcatcctgcaggccatgcctgccctgggctcggctacaggcaggtccaagagcagcgagaagcgacaggctgtggacaccgctgtcgatggcgtgttcatccggagtttgaaagtcaactgcaaagtcacctctcgcttcgcccactatgttgtcaccagccaagtggtcaacactgccaatgaagccagggaagtggccttcgacctggaaatccccaagacagcattcatcagtgactttgccgttacagcagatggaaacgcatttatcggagacataaaggacaaggtgactgcatggaagcagtaccggaaagcagctatctcaggagagaatgccggccttgtcagggcctcggggagaactatggagcaattcaccatccacctcaccgtcaatccccagagcaaggtcacgtttcagctgacttatgaggaagtgctgaagagaaaccatatgcagtatgaaattgtcatcaaagtcaagcccaagcagctggtgcatcattttgaggtagatcacaggtcccggggcaggggtcctgcccctctctccgtcaccatggctcccaacactggttgagcacccaccatgtgtcaccacccaggcctgagaacacagggatggggactaacccctcagggtgagctctgatgtgctcttcttgggcagggaactccctgaattctctaacttcctctttatctctgagcttcggtttgctcatctgctagacggggggtttctgtgagtcccaggaccgccacagggatcacgagaagtactgaatgtccagattgatgtggacatcttcgagccccaggggatcagcaagctggatgcccaggcctctttcctgccgaaggaactggcagcccaaactatcaagaagtcctt

SEQ ID NO: 143403 - DNA, 414 bp, Homo sapiens
  Payload ID: 8327
  Gene Symbol: ITIH1
  Gene Name: inter-alpha-trypsin inhibitor heavy chain 1
  ENST ID: ENST00000484844
  CDS Start-End: 1-223
gatgaaggtggacagggaggagagggccaacctgtcatcccaggccctgcagatgtcgctggactatgggtttgtgaccccactgacctccatgagcatcaggggcatggcggaccaggacggcctgaagcccaccatcgacaagccctcagaggattctccgcctttggagatgctgggacccagaaggactccaatacccagcggctgccagaccgagtgaccggcgtggacacagaccctcacttcatcatccacgtgccccagaaagaggacaccctgtgcttcaacatcaatgaggagcctggtgttatcctgagcctggtacaggaccccaacacaggcttctcagtgaatggacagctcattggcaacaaggccaggagccctgggcagcatgacggcacgtacttc

SEQ ID NO: 143404 - DNA, 2493 bp, Homo sapiens
  Payload ID: 8327
  Gene Symbol: ITIH1
  Gene Name: inter-alpha-trypsin inhibitor heavy chain 1
  Uniprot ID: P19827
  ENST ID: ENST00000537050
  CDS Start-End: 465-2336
gaattattgctggcacctaagtggtggctgagttgagggatgcaggcatgtacaccttcatttggtcagtatttttggagtgcctactgagtaccaggccctgtgatcagggctgggtgggtgctgcacacagtaggtggccaggacacatgctggctcttggctgagacttgattgatgtggacatcttcgagccccaggggatcagcaagctggatgcccaggcctctttcctgccgaaggaactggcagcccaaactatcaagaagtccttctcaggaaaaaagggtcatgtgctgttccgtcccaccgtgagccagcagcagtcctgccccacatgctctacatccttactgaacgggcacttcaaggtgacctacgatgtcagtcgagacaagatctgcgacctcctggtggccaataaccactttgcccacttctttgccccccaaaacctgacaaacatgaacaagaacgtggtttttgtgattgacatcagtggctccatgagaggccagaaagtgaagcagaccaaggaggcactccttaaaattctgggggacatgcagccaggggactactttgacctggttctttttgggactcgagtacaatcgtggaagggctcgctggtgcaagcatctgaggccaacctacaagcagctcaagactttgtgcggggcttttccctggatgaggccacaaacctgaatggaggtttgctccggggaattgagatcttgaaccaagttcaggaaagcctcccagaactcagcaaccatgcctcaatactcatcatgttgacagatggcgatcccacagagggggtgacggaccgttcccaaatcctcaagaacgtccgcaacgccatccggggcaggttcccgctctacaacctgggtttcggccacaatgtggactttaactttctggaggtcatgtccatggagaacaacggacgggcccagagaatctacgaggaccatgatgccacccagcagctgcagggtttctacagccaggtagccaaacccctgctggtggatgtggatttgcagtacccccaggatgctgtcttggccctgacccagaaccaccataaacagtactacgaaggctcagagattgtggtggccgggcgcattgctgacaacaaacagagcagcttcaaggctgatgtgcaggcccatggggagggacaagaattcagtataacctgcctagtggatgaggaggagatgaagaaactgctccgagagcgtggccacatgctggagaaccacgtcgagcgcctctgggcctacctcaccatccaggagctgctggccaagcggatgaaggtggacagggaggagagggccaacctgtcatcccaggccctgcagatgtcgctggactatgggtttgtgaccccactgacctccatgagcatcaggggcatggcggaccaggacggcctgaagcccaccatcgacaagccctcagaggattctccgcctttggagatgctgggacccagaaggacgttcgtgctgtcagccttgcagccttctcctactcattccagctccaatacccagcggctgccagaccgagtgaccggcgtggacacagaccctcacttcatcatccacgtgccccagaaagaggacaccctgtgcttcaacatcaatgaggagcctggtgttatcctgagcctggtacaggaccccaacacaggcttctcagtgaatggacagctcattggcaacaaggccaggagccctgggcagcatgacggcacgtacttcgggcggctgggaatcgcaaaccctgccacggactttcagttggaagtgactcctcagaacattacgctgaaccccggctttggtgggcctgtgttttcctggagggaccaagctgtgctgcggcaggacggggtggtggtgaccatcaacaagaagaggaacctggtggtgtctgtggacgacggtggcacctttgaggttgttttgcaccgagtgtggaaggggagctcggtccaccaggacttcctgggcttctatgtgctggacagtcatcggatgtcagcccggacgcacgggctgctggggcaatttttccaccccatcggttttgaagtgtctgacatccacccaggctctgaccccacaaagccagatgccacgatggtggtgaggaaccgccggctcacggtcaccaggggtttgcaaaaagactacagcaaggacccgtggcatggggccgaggtgtcctgctggttcattcacaacaatggggctggactcatcgatggtgcctacactgattatatcgtccccgacatcttctgagccctctggccagcacgcctgtcctcccccggggccaaggcagaggaggaggacgacatcctgacctgctgctgaggctgtacctccttgactaagctggttccttgtgtcaaagcacctcatgccttccattaaagagaggccgtgtccaccctga

SEQ ID NO: 143405 - DNA, 3193 bp, Homo sapiens
  Payload ID: 8328
  Gene Symbol: ITIH2
  Gene Name: inter-alpha-trypsin inhibitor heavy chain 2
  Uniprot ID: P19823
  ENST ID: ENST00000358415
  CDS Start-End: 167-3007
atttgtcccaattttgaacaaagttagagagttttttcttcttttttcttctttcttaaagcgaactgtactcctctgctgttcctttgaacttggttcagtaggaagaagtgatatcctccccagaccatctgctttggggagcttggcaaaactgtccagcaaaatgaaaagactcacgtgctttttcatctgcttctttctttctgaagtatcaggcttcgaaatccccataaatggactttctgaatttgtagactatgaagatcttgtggaactggccccaggcaaatttcaattggtggcagagaaccggagatatcagagaagccttccaggagaatcggaagaaatgatggaagaggttgatcaagtaactctttatagctataaagtccagtctactattacttctcggatggccaccaccatgatccagagcaaagtggtgaacaattccccgcagcctcagaatgtcgtgtttgatgttcagatccccaaaggagcattcatttccaacttctccatgactgtggacggcaagacatttaggagctctattaaggagaaaactgtgggccgagctctttatgcacaggccagagcaaaaggcaagacggctggcttggtgaggagcagcgctcttgatatggaaaacttcagaacggaagtaaatgtcctcccaggagcaaaggtgcagttcgaacttcactaccaggaggtgaagtggaggaagctgggctcctatgagcacaggatctatctgcaacctggacggctggccaaacacttagaggtagatgtgtgggttatcgaaccacagggactgagatttcttcatgttcccgacacatttgaaggccatttcgatggtgttccggtcatttctaaaggacaacagaaggcgcacgtctccttcaagcccacggtagcacagcagagaatatgccctaactgccgggagactgcggtagatggggaactggtggtgctgtatgacgtgaaaagagaagagaaggctggtgaactggaggtgtttaatggatattttgtccacttctttgctcctgacaacctggacccaattcccaaaaacatcctctttgtcatcgatgtgagtggctccatgtggggagttaaaatgaaacaaactgtggaagcaatgaagaccatattggatgacctcagagcagaagaccatttctctgtgattgatttcaaccagaacattcgaacttggagaaatgatttaatttcagctacaaaaacacaggttgcagatgccaagaggtatattgagaaaatccagcccagtggaggcacaaacatcaacgaagcactcctacgggcaatcttcattttgaatgaagccaataacttgggactgttagaccccaactccgtctcgctgatcattttggtttctgatggagatccaacagtgggcgaactaaaactgtcaaaaattcagaaaaacgttaaggagaacatccaagacaatatctccttgttcagtttgggcatgggatttgatgtggactatgattttttgaagagactgtccaatgaaaaccatggaattgcacaaaggatttatggaaaccaggacacgtcttcccagcttaagaaattctacaaccaggtctccactccattgctccggaatgttcagttcaactatccccatacatcagtcacggacgtcactcaaaacaatttccataactactttggaggctcagagattgtggtggcaggaaaatttgaccctgctaaattggatcaaatagagagcgttatcacggcgacttcggctaacacgcagttagtcttggagaccctggcccagatggacgacttgcaggattttctatcgaaagacaagcatgcagatcccgatttcaccaggaaactgtgggcctatctaaccatcaaccaactgctagctgaacgaagcctggctcctacagctgccgccaagagaagaattacaagatcgatcctgcagatgtctctagaccaccacattgtgactccgctgacctcgctggtgatcgagaacgaggctggggatgagcgcatgctggcggatgccccaccgcaggatccctcctgctgctcaggggccctgtattacggcagcaaagtggttccagattccaccccgtcttgggccaatccttcaccaacgcccgtgatctccatgctggcacaaggatctcaggtgctagagtccacgccacccccacatgtgatgagagttgaaaatgacccacatttcatcatttatctaccaaaaagccaaaagaacatttgtttcaatattgactcagaacctggaaaaatcctcaacctggtttctgacccagaatcaggaattgtagtcaacggtcagcttgttggtgccaagaagcccaacaatggaaaactaagcacctattttggaaaactgggattttatttccaaagtgaagacataaaaatagaaatcagcactgagaccatcaccctgagccatggttctagcacattctccttgtcctggtccgacacggctcaagtcacgaatcagagggtgcagatctcagtgaagaaagaaaaagtggtaactatcaccctggataaagagatgtccttttctgttttacttcatcgtgtttggaagaagcatcccgtcaatgttgactttctgggaatctacataccccctacaaacaagttctcacctaaagcccacggactaataggccagttcatgcaggaaccaaagatacacatcttcaatgagagaccaggaaaggaccctgagaagccagaggccagcatggaagtgaaggggcagaagctgatcatcaccaggggcttacagaaagactacagaacggatctagtgtttggaacggacgttacctgctggtttgtgcacaacagtggaaaaggattcattgacgggcattacaaggattacttcgtgcctcagctctacagctttctcaaacggccttaaaggtttatagtttgggaaattatatatattaatatacatctttcccctgtcacttttgcagatattcttcggtttgaataattaaaatgaaccagatatcagggtggttaattaaaatgaaccagatatcagggtggtttataaagcctgtaaacacacctaagaaaataaacattttacaaatga

SEQ ID NO: 143406 - DNA, 2848 bp, Homo sapiens
  Payload ID: 8328
  Gene Symbol: ITIH2
  Gene Name: inter-alpha-trypsin inhibitor heavy chain 2
  ENST ID: ENST00000379587
  CDS Start-End: 36-2843
ctgctttggggagcttggcaaaactgtccagcaaaatgaaaagactcacgtgctttttcatctgcttctttctttctgaagtatcaggcttcgaaatccccataaatggactttctgaatttgtagactatgaagatcttgtggaactggccccaggcaaatttcaattggtggcagagaaccggagatatcaggaagaggttgatcaagtaactctttatagctataaagtccagtctactattacttctcggatggccaccaccatgatccagagcaaagtggtgaacaattccccgcagcctcagaatgtcgtgtttgatgttcagatccccaaaggagcattcatttccaacttctccatgactgtggacggcaagacatttaggagctctattaaggagaaaactgtgggccgagctctttatgcacaggccagagcaaaaggcaagacggctggcttggtgaggagcagcgctcttgatatggaaaacttcagaacggaagtaaatgtcctcccaggagcaaaggtgcagttcgaacttcactaccaggaggtgaagtggaggaagctgggctcctatgagcacaggatctatctgcaacctggacggctggccaaacacttagaggtagatgtgtgggttatcgaaccacagggactgagatttcttcatgttcccgacacatttgaaggccatttcgatggtgttccggtcatttctaaaggacaacagaaggcgcacgtctccttcaagcccacggtagcacagcagagaatatgccctaactgccgggagactgcggtagatggggaactggtggtgctgtatgacgtgaaaagagaagagaaggctggtgaactggaggtgtttaatggatattttgtccacttctttgctcctgacaacctggacccaattcccaaaaacatcctctttgtcatcgatgtgagtggctccatgtggggagttaaaatgaaacaaactgtggaagcaatgaagaccatattggatgacctcagagcagaagaccatttctctgtgattgatttcaaccagaacattcgaacttggagaaatgatttaatttcagctacaaaaacacaggttgcagatgccaagaggtatattgagaaaatccagcccagtggaggcacaaacatcaacgaagcactcctacgggcaatcttcattttgaatgaagccaataacttgggactgttagaccccaactccgtctcgctgatcattttggtttctgatggagatccaacagtgggcgaactaaaactgtcaaaaattcagaaaaacgttaaggagaacatccaagacaatatctccttgttcagtttgggcatgggatttgatgtggactatgattttttgaagagactgtccaatgaaaaccatggaattgcacaaaggatttatggaaaccaggacacgtcttcccagcttaagaaattctacaaccaggtctccactccattgctccggaatgttcagttcaactatccccatacatcagtcacggacgtcactcaaaacaatttccataactactttggaggctcagagattgtggtggcaggaaaatttgaccctgctaaattggatcaaatagagagcgttatcacggcgacttcggctaacacgcagttagtcttggagaccctggcccagatggacgacttgcaggattttctatcgaaagacaagcatgcagatcccgatttcaccaggaaactgtgggcctatctaaccatcaaccaactgctagctgaacgaagcctggctcctacagctgccgccaagagaagaattacaagatcgatcctgcagatgtctctagaccaccacattgtgactccgctgacctcgctggtgatcgagaacgaggctggggatgagcgcatgctggcggatgccccaccgcaggatccctcctgctgctcaggggccctgtattacggcagcaaagtggttccagattccaccccgtcttgggccaatccttcaccaacgcccgtgatctccatgctggcacaaggatctcaggtgctagagtccacgccacccccacatgtgatgagagttgaaaatgacccacatttcatcatttatctaccaaaaagccaaaagaacatttgtttcaatattgactcagaacctggaaaaatcctcaacctggtttctgacccagaatcaggaattgtagtcaacggtcagcttgttggtgccaagaagcccaacaatggaaaactaagcacctattttggaaaactgggattttatttccaaagtgaagacataaaaatagaaatcagcactgagaccatcaccctgagccatggttctagcacattctccttgtcctggtccgacacggctcaagtcacgaatcagagggtgcagatctcagtgaagaaagaaaaagtggtaactatcaccctggataaagagatgtccttttctgttttacttcatcgtgtttggaagaagcatcccgtcaatgttgactttctgggaatctacataccccctacaaacaagttctcacctaaagcccacggactaataggccagttcatgcaggaaccaaagatacacatcttcaatgagagaccaggaaaggaccctgagaagccagaggccagcatggaagtgaaggggcagaagctgatcatcaccaggggcttacagaaagactacagaacggatctagtgtttggaacggacgttacctgctggtttgtgcacaacagtggaaaaggattcattgacgggcattacaaggattacttcgtgcctcagctctacagctttctcaaacggccttaaaggtt

SEQ ID NO: 143407 - DNA, 767 bp, Homo sapiens
  Payload ID: 8328
  Gene Symbol: ITIH2
  Gene Name: inter-alpha-trypsin inhibitor heavy chain 2
  ENST ID: ENST00000429820
  CDS Start-End: 56-767
tgatatcctccccagaccatctgctttggggagcttggcaaaactgtccagcaaaatgaaaagactcacgtgctttttcatctgcttctttctttctgaagtatcaggcttcgaaatccccataaatggactttctgaaagaagccttccaggagaatcggaagaaatgatggaagaggttgatcaagtaactctttatagctataaagtccagtctactattacttctcggatggccaccaccatgatccagagcaaagtggtgaacaattccccgcagcctcagaatgtcgtgtttgatgttcagatccccaaaggagcattcatttccaacttctccatgactgtggacggcaagacatttaggagctctattaaggagaaaactgtgggccgagctctttatgcacaggccagagcaaaaggcaagacggctggcttggtgaggagcagcgctcttgatatggaaaacttcagaacggaagtaaatgtcctcccaggagcaaaggtgcagttcgaacttcactaccaggaggtgaagtggaggaagctgggctcctatgagcacaggatctatctgcaacctggacggctggccaaacacttagaggtagatgtgtgggttatcgaaccacagggactgagatttcttcatgttcccgacacatttgaaggccatttcgatggtgttccggtcatttctaaaggacaacagaaggcgcacgtctccttcaagcccacggtagcacagcagagaatatgcccta

SEQ ID NO: 143408 - DNA, 3086 bp, Homo sapiens
  Payload ID: 8328
  Gene Symbol: ITIH2
  Gene Name: inter-alpha-trypsin inhibitor heavy chain 2
  ENST ID: ENST00000613369
  CDS Start-End: 64-2901
ggaagaagtgatatcctccccagaccatctgctttggggagcttggcaaaactgtccagcaaaatgaaaagactcacgtgctttttcatctgcttctttctttctgaagtatcaggcttcgaaatccccataaatggactttctgaatttgtagactatgaagatcttgtggaactggccccaggcaaatttcaattggtggcagagaaccggagatatcagagaagccttccaggagaatcggaagaaatgatggaagaggttgatcaagtaactctttatagctataaagtccagtctactattacttctcggatggccaccaccatgatccagagcaaagtggtgaacaattccccgcagcctcagaatgtcgtgtttgatgttcagatccccaaaggagcattcatttccaacttctccatgactgtggacggcaagacatttaggagctctattaaggagaaaactgtgggccgagctctttatgcacaggccagagcaaaaggcaagacggctggcttggtgaggagcagcgctcttgatatggaaaacttcagaacggaagtaaatgtcctcccaggagcaaaggtgcagttcgaacttcactaccaggaggtgaagtggaggaagctgggctcctatgagcacaggatctatctgcaacctggacggctggccaaacacttagaggtagatgtgtgggttatcgaaccacagggactgagatttcttcatgttcccgacacatttgaaggccatttcgatggtgttccggtcatttctaaaggacaacagaaggcgcacgtctccttcaagcccacggtagcacagcagagaatatgccctaactgccgggagactgcggtagatggggaactggtggtgctgtatgacgtgaaaagagaagagaaggctggtgaactggaggtgtttaatggatattttgtccacttctttgctcctgacaacctggacccaattcccaaaaacatcctctttgtcatcgatgtgagtggctccatgtggggagttaaaatgaaacaaactgtggaagcaatgaagaccatattggatgacctcagagcagaagaccatttctctgtgattgatttcaaccagaacattcgaacttggagaaatgatttatttcagctacaaaaacacaggttgcagatgccaagatatattgagaaaatccagcccagtggaggcacaaacatcaacgaagcactcctacgggcaatcttcattttgaatgaagccaataacttgggactgttagaccccaactccgtctcgctgatcattttggtttctgatggagatccaacagtgggcgaactaaaactgtcaaaaattcagaaaaacgttaaggagaacatccaagacaatatctccttgttcagtttgggcatgggatttgatgtggactatgattttttgaagagactgtccaatgaaaaccatggaattgcacaaaggatttatggaaaccaggacacgtcttcccagcttaagaaattctacaaccaggtctccactccattgctccggaatgttcagttcaactatccccatacatcagtcacggacgtcactcaaaacaatttccataactactttggaggctcagagattgtggtggcaggaaaatttgaccctgctaaattggatcaaatagagagcgttatcacggcgacttcggctaacacgcagttagtcttggagaccctggcccagatggacgacttgcaggattttctatcgaaagacaagcatgcagatcccgatttcaccaggaaactgtgggcctatctaaccatcaaccaactgctagctgaacgaagcctggctcctacagctgccgccaagagaagaattacaagatcgatcctgcagatgtctctagaccaccacattgtgactccgctgacctcgctggtgatcgagaacgaggctggggatgagcgcatgctggcggatgccccaccgcaggatccctcctgctgctcaggggccctgtattacggcagcaaagtggttccagattccaccccgtcttgggccaatccttcaccaacgcccgtgatctccatgctggcacaaggatctcaggtgctagagtccacgccacccccacatgtgatgagagttgaaaatgacccacatttcatcatttatctaccaaaaagccaaaagaacatttgtttcaatattgactcagaacctggaaaaatcctcaacctggtttctgacccagaatcaggaattgtagtcaacggtcagcttgttggtgccaagaagcccaacaatggaaaactaagcacctattttggaaaactgggattttatttccaaagtgaagacataaaaatagaaatcagcactgagaccatcaccctgagccatggttctagcacattctccttgtcctggtccgacacggctcaagtcacgaatcagagggtgcagatctcagtgaagaaagaaaaagtggtaactatcaccctggataaagagatgtccttttctgttttacttcatcgtgtttggaagaagcatcccgtcaatgttgactttctgggaatctacataccccctacaaacaagttctcacctaaagcccacggactaataggccagttcatgcaggaaccaaagatacacatcttcaatgagagaccaggaaaggaccctgagaagccagaggccagcatggaagtgaaggggcagaagctgatcatcaccaggggcttacagaaagactacagaacggatctagtgtttggaacggacgttacctgctggtttgtgcacaacagtggaaaaggattcattgacgggcattacaaggattacttcgtgcctcagctctacagctttctcaaacggccttaaaggtttatagtttgggaaattatatatattaatatacatctttcccctgtcacttttgcagatattcttcggtttgaataattaaaatgaaccagatatcagggtggttaattaaaatgaaccagatatcagggtggtttataaagcctgtaaacacacctaagaaaataaacattttacaaatg

SEQ ID NO: 143409 - DNA, 2220 bp, Homo sapiens
  Payload ID: 8329
  Gene Symbol: ITIH3
  Gene Name: inter-alpha-trypsin inhibitor heavy chain 3
  ENST ID: ENST00000416872
  CDS Start-End: 9-2105
attcagcgatggcatttgcatggtggccctgtctcatcttggctctgctctccagcttggcagcctctggcttcccgagaagcccctttcggctgcttgggaaacggagcctcccggaaggggtggccaatggcatcgaggtctacagtaccaaaatcaactccaaggtgacctcccgttttgctcacaatgttgtcaccatgagagccgtcaaccgtgcagacacggccaaggaggtttcctttgatgtggagctgcccaagacggccttcatcaccaacttcaccttgaccatcgacggtgttacctaccctgggaatgtcaaggagaaggaagttgccaagaagcagtatgaaaaggctgtgtcccagggcaagacggccggcttggtcaaggcctctgggaggaagttggagaagttcacagtctcggtcaacgtggctgcaggcagcaaagtcaccttcgagctaacctacgaggagctgctgaagaggcacaagggcaagtacgagatgtacctcaaggtccagcctaagcaactggtcaaacactttgagatcgaggtagacatcttcgagcctcagggaatcagcatgctggatgctgaggcctctttcatcaccaacgacctcctgggaagcgccctcaccaagtccttctcagggaaaaagggccatgtgtccttcaagcccagcttagaccaacagcgttcatgcccaacctgtacagactccctcctcaatggagatttcactatcacctatgacgtgaacagagaatctcctggcaacgtgcagatagtcaatggctacttcgtgcacttctttgcacctcaaggccttccagtggtgcctaagaacgtggcctttgtgattgacatcagcggctccatggctggtcggaaattagagcagacaaaggaggcccttctcagaatcctggaagatatgcaagaggaagactatctgaatttcatcctgttcagtggagatgtgtccacatggaaagagcacttagtccaggccacgcccgagaacctccaggaggccaggacgtttgtgaagagcatggaggataaaggaatgaccaacatcaatgacgggctgctgaggggcatcagtatgctgaacaaggcccgagaggagcacagaatcccagagaggagcacctccattgtcatcatgctgactgatggggatgccaatgttggtgagagcagacccgaaaaaatccaagagaatgtgcggaatgccatcgggggcaagttccccttgtataacctgggctttggcaacaatctgaattataacttcctggagaacatggccctggagaaccatgggtttgcccggcgcatttatgaggactctgatgccgatttgcagttgcagggcttctatgaggaggtggccaacccactgctgacgggtgtggagatggagtaccccgagaacgctatcctggacctcacccagaacacttaccagcacttctacgatggctctgagatcgtggtggccgggcgcctggtggacgaggacatgaacagctttaaggcagatgtgaagggccatggggccaccaacgacctgaccttcacagaggaggtgacaacggagaagatcaccctgtggaacagggccgtgccgagcactttcagctggctggacacagtcacagtcacgcaggatgggctgtccatgatgatcaacaggaagaacatggtggtctcctttggagatggggttaccttcgtggtcgtcctacaccaggtgtggaagaaacatcctgtccaccgtgactttctaggcttctacgtggtggacagtcaccggatgtcagcacagacgcatgggctgctggggcaattcttccaaccctttgactttaaagtgtctgacatccggccaggctctgaccccacaaagccagatgccacattggtggtgaagaaccatcagctgattgtcaccaggggctcccagaaagactacagaaaggatgccagcatcggcacgaaggttgtctgctggttcgtccacaacaacggagaagggctgattgatggtgtccacactgactacattgtccccaacctgttttgagtagacacaccagctcctgttgggatggatggcccggattttatggcatctggaacatgggcacagagaggggcctgtgggaggggctgggaaaataaagtccaaggtcgagacc

SEQ ID NO: 143410 - DNA, 3007 bp, Homo sapiens
  Payload ID: 8329
  Gene Symbol: ITIH3
  Gene Name: inter-alpha-trypsin inhibitor heavy chain 3
  Uniprot ID: Q06033
  ENST ID: ENST00000449956
  CDS Start-End: 7-2679
tcagcgatggcatttgcatggtggccctgtctcatcttggctctgctctccagcttggcagcctctggcttcccgagaagcccctttcggctgcttgggaaacggagcctcccggaaggggtggccaatggcatcgaggtctacagtaccaaaatcaactccaaggtgacctcccgttttgctcacaatgttgtcaccatgagagccgtcaaccgtgcagacacggccaaggaggtttcctttgatgtggagctgcccaagacggccttcatcaccaacttcaccttgaccatcgacggtgttacctaccctgggaatgtcaaggagaaggaagttgccaagaagcagtatgaaaaggctgtgtcccagggcaagacggccggcttggtcaaggcctctgggaggaagttggagaagttcacagtctcggtcaacgtggctgcaggcagcaaagtcaccttcgagctaacctacgaggagctgctgaagaggcacaagggcaagtacgagatgtacctcaaggtccagcctaagcaactggtcaaacactttgagatcgaggtagacatcttcgagcctcagggaatcagcatgctggatgctgaggcctctttcatcaccaacgacctcctgggaagcgccctcaccaagtccttctcagggaaaaagggccatgtgtccttcaagcccagcttagaccaacagcgttcatgcccaacctgtacagactccctcctcaatggagatttcactatcacctatgacgtgaacagagaatctcctggcaacgtgcagatagtcaatggctacttcgtgcacttctttgcacctcaaggccttccagtggtgcctaagaacgtggcctttgtgattgacatcagcggctccatggctggtcggaaattagagcagacaaaggaggcccttctcagaatcctggaagatatgcaagaggaagactatctgaatttcatcctgttcagtggagatgtgtccacatggaaagagcacttagtccaggccacgcccgagaacctccaggaggccaggacgtttgtgaagagcatggaggataaaggaatgaccaacatcaatgacgggctgctgaggggcatcagtatgctgaacaaggcccgagaggagcacagaatcccagagaggagcacctccattgtcatcatgctgactgatggggatgccaatgttggtgagagcagacccgaaaaaatccaagagaatgtgcggaatgccatcgggggcaagttccccttgtataacctgggctttggcaacaatctgaattataacttcctggagaacatggccctggagaaccatgggtttgcccggcgcatttatgaggactctgatgccgatttgcagttgcagggcttctatgaggaggtggccaacccactgctgacgggtgtggagatggagtaccccgagaacgctatcctggacctcacccagaacacttaccagcacttctacgatggctctgagatcgtggtggccgggcgcctggtggacgaggacatgaacagctttaaggcagatgtgaagggccatggggccaccaacgacctgaccttcacagaggaggtggacatgaaggagatggagaaggccctgcaggagcgggactacatcttcgggaattacattgagcggctctgggcctacctcaccattgagcagctgctggagaagcgcaagaacgcccatggcgaggagaaggagaacctcacggcccgggccctggacctgtccctcaagtatcactttgtgactccactgacctcaatggtggtgaccaagcctgaggacaacgaggatgagagggccattgccgacaagcctggggaagatgcagaagccacaccggtgagccccgccatgtcctacctgaccagctaccagcctcctcaaaacccctactactatgtggacggggatccccacttcatcatccaaattccggagaaagacgatgccctctgcttcaacatcgatgaagccccaggcacagtgctgcgccttattcaggatgcagtcacaggcctcacagttaatgggcagatcactggcgacaagagaggcagccctgactccaagaccagaaagacttactttggaaaactgggcatcgccaatgctcagatggacttccaggtggaggtgacaacggagaagatcaccctgtggaacagggccgtgccgagcactttcagctggctggacacagtcacagtcacgcaggatgggctgtccatgatgatcaacaggaagaacatggtggtctcctttggagatggggttaccttcgtggtcgtcctacaccaggtgtggaagaaacatcctgtccaccgtgactttctaggcttctacgtggtggacagtcaccggatgtcagcacagacgcatgggctgctggggcaattcttccaaccctttgactttaaagtgtctgacatccggccaggctctgaccccacaaagccagatgccacattggtggtgaagaaccatcagctgattgtcaccaggggctcccagaaagactacagaaaggatgccagcatcggcacgaaggttgtctgctggttcgtccacaacaacggagaagggctgattgatggtgtccacactgactacattgtccccaacctgttttgagtagacacaccagctcctgttgggatggatggcccggattttatggcatctggaacatgggcacagagaggggcctgtgggaggggctgggaaaataaagtccaaggtcgagaccagacagctgccagcctctacatgccttcatgagcctctgctccagggaacaggcaactgggacccacagcagctcaaaagaggggatggctagcaggaaggcaacttcttgggcctctccactgacacagctgagagacagagttggttggactagaactttagggattcaaatgtatgacagcttgggggaaaaaataaagaactgactctg

SEQ ID NO: 143411 - DNA, 3038 bp, Homo sapiens
  Payload ID: 8329
  Gene Symbol: ITIH3
  Gene Name: inter-alpha-trypsin inhibitor heavy chain 3
  ENST ID: ENST00000621946
  CDS Start-End: 37-2049
atataaggagcgtgggccaggcctgagtattcagcgatggcatttgcatggtggccctgtctcatcttggctctgctctccagcttggcagcctctggcttcccgagaagcccctttcggctgcttgggaaacggagcctcccggaaggggtggccaatggcatcgaggtctacagtaccaaaatcaactccaaggtgacctcccgttttgctcacaatgttgtcaccatgagagccgtcaaccgtgcagacacggccaaggaggtttcctttgatgtggagctgcccaagacggccttcatcaccaacttcaccttgaccatcgacggtgttacctaccctgggaatgtcaaggagaaggaagttgccaagaagcagtatgaaaaggctgtgtcccagggcaagacggccggcttggtcaaggcctctgggaggaagttggagaagttcacagtctcggtcaacgtggctgcaggcagcaaagtcaccttcgagctaacctacgaggagctgctgaagaggcacaagggcaagtacgagatgtacctcaaggtccagcctaagcaactggtcaaacactttgagatcgaggtagacatcttcgagcctcagggaatcagcatgctggatgctgaggcctctttcatcaccaacgacctcctgggaagcgccctcaccaagtccttctcagggaaaaagggccatgtgtccttcaagcccagcttagaccaacagcgttcatgcccaacctgtacagactccctcctcaatggagatttcactatcacctatgacgtgaacagagaatctcctggcaacgtgcagatagtcaatggctacttcgtgcacttctttgcacctcaaggccttccagtggtgcctaagaacgtggcctttgtgattgacatcagcggctccatggctggtcggaaattagagcagacaaaggaggcccttctcagaatcctggaagatatgcaagaggaagactatctgaatttcatcctgttcagtggagatgtgtccacatggaaagagcacttagtccaggccacgcccgagaacctccaggaggccaggacgtttgtgaagagcatggaggataaaggaatgaccaacatcaatgacgggctgctgaggggcatcagtatgctgaacaaggcccgagaggagcacagaatcccagagaggagcacctccattgtcatcatgctgactgatggggatgccaatgttggtgagagcagacccgaaaaaatccaagagaatgtgcggaatgccatcgggggcaagttccccttgtataacctgggctttggcaacaatctgaattataacttcctggagaacatggccctggagaaccatgggtttgcccggcgcatttatgaggactctgatgccgatttgcagttgcagggcttctatgaggaggtggccaacccactgctgacgggtgtggagatggagtaccccgagaacgctatcctggacctcacccagaacacttaccagcacttctacgatggctctgagatcgtggtggccgggcgcctggtggacgaggacatgaacagctttaaggcagatgtgaagggccatggggccaccaacgacctgaccttcacagaggaggtggacatgaaggagatggagaaggccctgcaggagcgggactacatcttcgggaattacattgagcggctctgggcctacctcaccattgagcagctgctggagaagcgcaagaacgcccatggcgaggagaaggagaacctcacggcccgggccctggacctgtccctcaagtatcactttgtgactccactgacctcaatggtggtgaccaagcctgaggacaacgaggatgagagggccattgccgacaagcctggggaaggtggggatagccacaccggtgagccccgccatgtcctacctgaccagctaccagcctcctcaaaacccctactactatgtggacggggatccccacttcatcatccaaattccggagaaagacgatgccctctgcttcaacatcgatgaagccccaggcacagtgctgcgccttattcaggatgcagtcacaggcctcacagttaatgggcagatcactggcgacaagagaggcagccctgactccaagaccagaaagacttactttggaaaactgggcatcgccaatgctcagatggacttccaggtggaggtgacaacggagaagatcaccctgtggaacagggccgtgccgagcactttcagctggctggacacagtcacagtcacgcaggatgggctgtccatgatgatcaacaggaagaacatggtggtctcctttggagatggggttaccttcgtggtcgtcctacaccaggtgtggaagaaacatcctgtccaccgtgactttctaggcttctacgtggtggacagtcaccggatgtcagcacagacgcatgggctgctggggcaattcttccaaccctttgactttaaagtgtctgacatccggccaggctctgaccccacaaagccagatgccacattggtggtgaagaaccatcagctgattgtcaccaggggctcccagaaagactacagaaaggatgccagcatcggcacgaaggttgtctgctggttcgtccacaacaacggagaagggctgattgatggtgtccacactgactacattgtccccaacctgttttgagtagacacaccagctcctgttgggatggatggcccggattttatggcatctggaacatgggcacagagaggggcctgtgggaggggctgggaaaataaagtccaaggtcgagaccagacagctgccagcctctacatgccttcatgagcctctgctccagggaacaggcaactgggacccacagcagctcaaaagaggggatggctagcaggaaggcaacttcttgggcctctccactgacacagctgagagacagagttggttggactagaactttagggattcaaatgtatgacagcttgggggaaaaaataaagaactgactctg

SEQ ID NO: 143412 - DNA, 3336 bp, Homo sapiens
  Payload ID: 8330
  Gene Symbol: ITIH4
  Gene Name: inter-alpha-trypsin inhibitor heavy chain family, member 4
  Uniprot ID: Q14624
  ENST ID: ENST00000266041
  CDS Start-End: 98-2890
aacctgcccccatgtgggtggggcagcaaacaagttactaatccattccccacttgctgtcgagttcagaagcctcctggcagacactggagccacgatgaagcccccaaggcctgtccgtacctgcagcaaagttctcgtcctgctttcactgctggccatccaccagactactactgccgaaaagaatggcatcgacatctacagcctcaccgtggactccagggtctcatcccgatttgcccacacggtcgtcaccagccgagtggtcaatagggccaatactgtgcaggaggccaccttccagatggagctgcccaagaaagccttcatcaccaacttctccatgatcatcgatggcatgacctacccagggatcatcaaggagaaggctgaagcccaggcacagtacagcgcagcagtggccaagggaaagagcgctggcctcgtcaaggccaccgggagaaacatggagcagttccaggtgtcggtcagtgtggctcccaatgccaagatcacctttgagctggtctatgaggagctgctcaagcggcgtttgggggtgtacgagctgctgctgaaagtgcggccccagcagctggtcaagcacctgcagatggacattcacatcttcgagccccagggcatcagctttctggagacagagagcaccttcatgaccaaccagctggtagacgccctcaccacctggcagaataagaccaaggctcacatccggttcaagccaacactttcccagcagcaaaagtccccagagcagcaagaaacagtcctggacggcaacctcattatccgctatgatgtggaccgggccatctccgggggctccattcagatcgagaacggctactttgtacactactttgcccccgagggcctaaccacaatgcccaagaatgtggtctttgtcattgacaagagcggctccatgagtggcaggaaaatccagcagacccgggaagccctaatcaagatcctggatgacctcagccccagagaccagttcaacctcatcgtcttcagtacagaagcaactcagtggaggccatcactggtgccagcctcagccgagaacgtgaacaaggccaggagctttgctgcgggcatccaggccctgggagggaccaacatcaatgatgcaatgctgatggctgtgcagttgctggacagcagcaaccaggaggagcggctgcccgaagggagtgtctcactcatcatcctgctcaccgatggcgaccccactgtgggggagactaaccccaggagcatccagaataacgtgcgggaagctgtaagtggccggtacagcctcttctgcctgggcttcggtttcgacgtcagctatgccttcctggagaagctggcactggacaatggcggcctggcccggcgcatccatgaggactcagactctgccctgcagctccaggacttctaccaggaagtggccaacccactgctgacagcagtgaccttcgagtacccaagcaatgccgtggaggaggtcactcagaacaacttccggctcctcttcaagggctcagagatggtggtggctgggaagctccaggaccgggggcctgatgtgctcacagccacagtcagtgggaagctgcctacacagaacatcactttccaaacggagtccagtgtggcagagcaggaggcggagttccagagccccaagtatatcttccacaacttcatggagaggctctgggcatacctgactatccagcagctgctggagcaaactgtctccgcatccgatgctgatcagcaggccctccggaaccaagcgctgaatttatcacttgcctacagctttgtcacgcctctcacatctatggtagtcaccaaacccgatgaccaagagcagtctcaagttgctgagaagcccatggaaggcgaaagtagaaacaggaatgtccactcaggttccactttcttcaaatattatctccagggagcaaaaataccaaaaccagaggcttccttttctccaagaagaggatggaatagacaagctggagctgctggctcccggatgaatttcagacctggggttctcagctccaggcaacttggactcccaggacctcctgatgttcctgaccatgctgcttaccaccccttccgccgtctggccatcttgcctgcttcagcaccaccagccacctcaaatcctgatccagctgtgtctcgtgtcatgaatatgaaaatcgaagaaacaaccatgacaacccaaaccccagcccccatacaggctccctctgccatcctgccactgcctgggcagagtgtggagcggctctgtgtggaccccagacaccgccaggggccagtgaacctgctctcagaccctgagcaaggggttgaggtgactggccagtatgagagggagaaggctgggttctcatggatcgaagtgaccttcaagaaccccctggtatgggttcacgcatcccctgaacacgtggtggtgactcggaaccgaagaagctctgcgtacaagtggaaggagacgctattctcagtgatgcccggcctgaagatgaccatggacaagacgggtctcctgctgctcagtgacccagacaaagtgaccatcggcctgttgttctgggatggccgtggggaggggctccggctccttctgcgtgacactgaccgcttctccagccacgttggagggacccttggccagttttaccaggaggtgctctggggatctccagcagcatcagatgacggcagacgcacgctgagggttcagggcaatgaccactctgccaccagagagcgcaggctggattaccaggaggggcccccgggagtggagatttcctgctggtctgtggagctgtagttctgatggaaggagctgtgcccaccctgtacacttggcttccccctgcaactgcagggccgcttctggggcctggaccaccatggggaggaagagtcccactcattacaaataaagaaaggtggtgtgagcctgggaagtgggtgtctccagttccatgtggccaaatcctagggcctcaacctcgcatcctgaaccttagcatcgtggaacacagaagcttccactgtcagctctcaagagcccatggccaggaaggcccatgctgagctttcagtccagccccttcattttacaaacaaggaaactgagctcgaaccacccatttgagatgtcactgtggcccccagctagaggcccagggctgggagcattctccaggagcagaggttcagtctgcttcatggtctcttggaccagttttgactacaaaaaaaaaaaaaaaa

SEQ ID NO: 143413 - DNA, 2872 bp, Homo sapiens
  Payload ID: 8330
  Gene Symbol: ITIH4
  Gene Name: inter-alpha-trypsin inhibitor heavy chain family, member 4
  Uniprot ID: Q14624
  ENST ID: ENST00000406595
  CDS Start-End: 31-2733
agaagcctcctggcagacactggagccacgatgaagcccccaaggcctgtccgtacctgcagcaaagttctcgtcctgctttcactgctggccatccaccagactactactgccgaaaagaatggcatcgacatctacagcctcaccgtggactccagggtctcatcccgatttgcccacacggtcgtcaccagccgagtggtcaatagggccaatactgtgcaggaggccaccttccagatggagctgcccaagaaagccttcatcaccaacttctccatgatcatcgatggcatgacctacccagggatcatcaaggagaaggctgaagcccaggcacagtacagcgcagcagtggccaagggaaagagcgctggcctcgtcaaggccaccgggagaaacatggagcagttccaggtgtcggtcagtgtggctcccaatgccaagatcacctttgagctggtctatgaggagctgctcaagcggcgtttgggggtgtacgagctgctgctgaaagtgcggccccagcagctggtcaagcacctgcagatggacattcacatcttcgagccccagggcatcagctttctggagacagagagcaccttcatgaccaaccagctggtagacgccctcaccacctggcagaataagaccaaggctcacatccggttcaagccaacactttcccagcagcaaaagtccccagagcagcaagaaacagtcctggacggcaacctcattatccgctatgatgtggaccgggccatctccgggggctccattcagatcgagaacggctactttgtacactactttgcccccgagggcctaaccacaatgcccaagaatgtggtctttgtcattgacaagagcggctccatgagtggcaggaaaatccagcagacccgggaagccctaatcaagatcctggatgacctcagccccagagaccagttcaacctcatcgtcttcagtacagaagcaactcagtggaggccatcactggtgccagcctcagccgagaacgtgaacaaggccaggagctttgctgcgggcatccaggccctgggagggaccaacatcaatgatgcaatgctgatggctgtgcagttgctggacagcagcaaccaggaggagcggctgcccgaagggagtgtctcactcatcatcctgctcaccgatggcgaccccactgtgggggagactaaccccaggagcatccagaataacgtgcgggaagctgtaagtggccggtacagcctcttctgcctgggcttcggtttcgacgtcagctatgccttcctggagaagctggcactggacaatggcggcctggcccggcgcatccatgaggactcagactctgccctgcagctccaggacttctaccaggaagtggccaacccactgctgacagcagtgaccttcgagtacccaagcaatgccgtggaggaggtcactcagaacaacttccggctcctcttcaagggctcagagatggtggtggctgggaagctccaggaccgggggcctgatgtgctcacagccacagtcagtgggaagctgcctacacagaacatcactttccaaacggagtccagtgtggcagagcaggaggcggagttccagagccccaagtatatcttccacaacttcatggagaggctctgggcatacctgactatccagcagctgctggagcaaactgtctccgcatccgatgctgatcagcaggccctccggaaccaagcgctgaatttatcacttgcctacagctttgtcacgcctctcacatctatggtagtcaccaaacccgatgaccaagagcagtctcaagttgctgagaagcccatggaaggcgaaagtagaaacaggaatgtccactcagctggagctgctggctcccggatgaatttcagacctggggttctcagctccaggcaacttggactcccaggacctcctgatgttcctgaccatgctgcttaccaccccttccgccgtctggccatcttgcctgcttcagcaccaccagccacctcaaatcctgatccagctgtgtctcgtgtcatgaatatgaaaatcgaagaaacaaccatgacaacccaaaccccagcccccatacaggctccctctgccatcctgccactgcctgggcagagtgtggagcggctctgtgtggaccccagacaccgccaggggccagtgaacctgctctcagaccctgagcaaggggttgaggtgactggccagtatgagagggagaaggctgggttctcatggatcgaagtgaccttcaagaaccccctggtatgggttcacgcatcccctgaacacgtggtggtgactcggaaccgaagaagctctgcgtacaagtggaaggagacgctattctcagtgatgcccggcctgaagatgaccatggacaagacgggtctcctgctgctcagtgacccagacaaagtgaccatcggcctgttgttctgggatggccgtggggaggggctccggctccttctgcgtgacactgaccgcttctccagccacgttggagggacccttggccagttttaccaggaggtgctctggggatctccagcagcatcagatgacggcagacgcacgctgagggttcagggcaatgaccactctgccaccagagagcgcaggctggattaccaggaggggcccccgggagtggagatttcctgctggtctgtggagctgtagttctgatggaaggagctgtgcccaccctgtacacttggcttccccctgcaactgcagggccgcttctggggcctggaccaccatggggaggaagagtcccactcattacaaataaagaaaggtggtgtgagcctgggaa

SEQ ID NO: 143414 - DNA, 2293 bp, Homo sapiens
  Payload ID: 8330
  Gene Symbol: ITIH4
  Gene Name: inter-alpha-trypsin inhibitor heavy chain family, member 4
  ENST ID: ENST00000441637
  CDS Start-End: 1-2158
ggtcagtgtggctcccaatgccaagatcacctttgagctggtctatgaggagctgctcaagcggcgtttgggggtgtacgagctgctgctgaaagtgcggccccagcagctggtcaagcacctgcagatggacattcacatcttcgagccccagggcatcagctttctggagacagagagcaccttcatgaccaaccagctggtagacgccctcaccacctggcagaataagaccaagcaaaagtccccagagcagcaagaaacagtcctggacggcaacctcattatccgctatgatgtggaccgggccatctccgggggctccattcagatcgagaacggctactttgtacactactttgcccccgagggcctaaccacaatgcccaagaatgtggtctttgtcattgacaagagcggctccatgagtggcaggaaaatccagcagacccgggaagccctaatcaagatcctggatgacctcagccccagagaccagttcaacctcatcgtcttcagtacagaagcaactcagtggaggccatcactggtgccagcctcagccgagaacgtgaacaaggccaggagctttgctgcgggcatccaggccctgggagggaccaacatcaatgatgcaatgctgatggctgtgcagttgctggacagcagcaaccaggaggagcggctgcccgaagggagtgtctcactcatcatcctgctcaccgatggcgaccccactgtgggggagactaaccccaggagcatccagaataacgtgcgggaagctgtaagtggccggtacagcctcttctgcctgggcttcggtttcgacgtcagctatgccttcctggagaagctggcactggacaatggcggcctggcccggcgcatccatgaggactcagactctgccctgcagctccaggacttctaccaggaagtggccaacccactgctgacagcagtgaccttcgagtacccaagcaatgccgtggaggaggtcactcagaacaacttccggctcctcttcaagggctcagagatggtggtggctgggaagctccaggaccgggggcctgatgtgctcacagccacagtcagtgggaagctgcctacacagaacatcactttccaaacggagtccagtgtggcagagcaggaggcggagttccagagccccaagtatatcttccacaacttcatggagaggctctgggcatacctgactatccagcagctgctggagcaaactgtctccgcatccgatgctgatcagcaggccctccggaaccaagcgctgaatttatcacttgcctacagctttgtcacgcctctcacatctatggtagtcaccaaacccgatgaccaagagcagtctcaagttgctgagaagcccatggaaggcgaaagtagaaacaggaatgtccactcagctggagctgctggctcccggatgaatttcagacctggggttctcagctccaggcaacttggactcccaggacctcctgatgttcctgaccatgctgcttaccaccccttccgccgtctggccatcttgcctgcttcagcaccaccagccacctcaaatcctgatccagctgtgtctcgtgtcatgaatatgaaaatcgaagaaacaaccatgacaacccaaaccccaggggttgaggtgactggccagtatgagagggagaaggctgggttctcatggatcgaagtgaccttcaagaaccccctggtatgggttcacgcatcccctgaacacgtggtggtgactcggaaccgaagaagctctgcgtacaagtggaaggagacgctattctcagtgatgcccggcctgaagatgaccatggacaagacgggtctcctgctgctcagtgacccagacaaagtgaccatcggcctgttgttctgggatggccgtggggaggggctccggctccttctgcgtgacactgaccgcttctccagccacgttggagggacccttggccagttttaccaggaggtgctctggggatctccagcagcatcagatgacggcagacgcacgctgagggttcagggcaatgaccactctgccaccagagagcgcaggctggattaccaggaggggcccccgggagtggagatttcctgctggtctgtggagctgtagttctgatggaaggagctgtgcccaccctgtacacttggcttccccctgcaactgcagggccgcttctggggcctggaccaccatggggaggaagagtcccactcattacaaataaagaaaggtggtgtgagcctg

SEQ ID NO: 143415 - DNA, 2990 bp, Homo sapiens
  Payload ID: 8330
  Gene Symbol: ITIH4
  Gene Name: inter-alpha-trypsin inhibitor heavy chain family, member 4
  ENST ID: ENST00000485816
  CDS Start-End: 32-2839
cagaagcctcctggcagacactggagccacgatgaagcccccaaggcctgtccgtacctgcagcaaagttctcgtcctgctttcactgctggccatccaccagactactactgccgaaaagaatggcatcgacatctacagcctcaccgtggactccagggtctcatcccgatttgcccacacggtcgtcaccagccgagtggtcaatagggccaatactgtgcaggaggccaccttccagatggagctgcccaagaaagccttcatcaccaacttctccatgatcatcgatggcatgacctacccagggatcatcaaggagaaggctgaagcccaggcacagtacagcgcagcagtggccaagggaaagagcgctggcctcgtcaaggccaccgggagaaacatggagcagttccaggtgtcggtcagtgtggctcccaatgccaagatcacctttgagctggtctatgaggagctgctcaagcggcgtttgggggtgtacgagctgctgctgaaagtgcggccccagcagctggtcaagcacctgcagatggacattcacatcttcgagccccagggcatcagctttctggagacagagagcaccttcatgaccaaccagctggtagacgccctcaccacctggcagaataagaccaaggctcacatccggttcaagccaacactttcccagcagcaaaagtccccagagcagcaagaaacagtcctggacggcaacctcattatccgctatgatgtggaccgggccatctccgggggctccattcagatcgagaacggctactttgtacactactttgcccccgagggcctaaccacaatgcccaagaatgtggtctttgtcattgacaagagcggctccatgagtggcaggaaaatccagcagacccgggaagccctaatcaagatcctggatgacctcagccccagagaccagttcaacctcatcgtcttcagtacagaagcaactcagtggaggccatcactggtgccagcctcagccgagaacgtgaacaaggccaggagctttgctgcgggcatccaggccctgggagggaccaacatcaatgatgcaatgctgatggctgtgcagttgctggacagcagcaaccaggaggagcggctgcccgaagggagtgtctcactcatcatcctgctcaccgatggcgaccccactgtgggggagactaaccccaggagcatccagaataacgtgcgggaagctgtaagtggccggtacagcctcttctgcctgggcttcggtttcgacgtcagctatgccttcctggagaagctggcactggacaatggcggcctggcccggcgcatccatgaggactcagactctgccctgcagctccaggacttctaccaggaagtggccaacccactgctgacagcagtgaccttcgagtacccaagcaatgccgtggaggaggtcactcagaacaacttccggctcctcttcaagggctcagagatggtggtggctgggaagctccaggaccgggggcctgatgtgctcacagccacagtcagtgggaagctgcctacacagaacatcactttccaaacggagtccagtgtggcagagcaggaggcggagttccagagccccaagtatatcttccacaacttcatggagaggctctgggcatacctgactatccagcagctgctggagcaaactgtctccgcatccgatgctgatcagcaggccctccggaaccaagcgctgaatttatcacttgcctacagctttgtcacgcctctcacatctatggtagtcaccaaacccgatgaccaagagcagtctcaagttgctgagaagcccatggaaggcgaaagtagaaacaggaatgtccactcaggttccactttcttcaaatattatctccagggagcaaaaataccaaaaccaggacttgaccacacagaggcttccttttctccaagaagaggatggaatagacaagctggagctgctggctcccggatgaatttcagacctggggttctcagctccaggcaacttggactcccaggacctcctgatgttcctgaccatgctgcttaccaccccttccgccgtctggccatcttgcctgcttcagcaccaccagccacctcaaatcctgatccagctgtgtctcgtgtcatgaatatgaaaatcgaagaaacaaccatgacaacccaaaccccagcccccatacaggctccctctgccatcctgccactgcctgggcagagtgtggagcggctctgtgtggaccccagacaccgccaggggccagtgaacctgctctcagaccctgagcaaggggttgaggtgactggccagtatgagagggagaaggctgggttctcatggatcgaagtgaccttcaagaaccccctggtatgggttcacgcatcccctgaacacgtggtggtgactcggaaccgaagaagctctgcgtacaagtggaaggagacgctattctcagtgatgcccggcctgaagatgaccatggacaagacgggtctcctgctgctcagtgacccagacaaagtgaccatcggcctgttgttctgggatggccgtggggaggggctccggctccttctgcgtgacactgaccgcttctccagccacgttggagggacccttggccagttttaccaggaggtgctctggggatctccagcagcatcagatgacggcagacgcacgctgagggttcagggcaatgaccactctgccaccagagagcgcaggctggattaccaggaggggcccccgggagtggagatttcctgctggtctgtggagctgtagttctgatggaaggagctgtgcccaccctgtacacttggcttccccctgcaactgcagggccgcttctggggcctggaccaccatggggaggaagagtcccactcattacaaataaagaaaggtggtgtgagcctgggaagtgggtgtctcc

SEQ ID NO: 143416 - DNA, 3132 bp, Homo sapiens
  Payload ID: 8331
  Gene Symbol: ITIH5
  Gene Name: inter-alpha-trypsin inhibitor heavy chain family, member 5
  ENST ID: ENST00000397145
  CDS Start-End: 107-2215
gaccgcggggtgggcggccccgagagcgtcccgcagtggctggagccctgggcgctgcaaagcgtgtcccgccgggtccccgagcgtcccgcgccctcgccccgccatgctcctgctgctggggctgtgcctggggctgtccctgtgtgtggggtcgcaggaagaggcgcagagctggggccactcttcggagcaggatggactcagggtcccgaggcaagtcagactgttgcagaggctgaaaaccaaacctttgatgacagaattctcagtgaagtctaccatcatttcccgttatgccttcactacggtttcctgcagaatgctgaacagagcttctgaagaccaggacattgagttccagatgcagattccagctgcagctttcatcaccaacttcactatgcttattggagacaaggtgtatcagggcgaaattacagagagagaaaagaagagtggtgatagggtaaaagagaaaaggaataaaaccacagaagaaaatggagagaaggggactgaaatattcagagcttctgcagtgattcccagcaaggacaaagccgcctttttcctgagttatgaggagcttctgcagaggcgcctgggcaagtacgagcacagcatcagcgtgcggccccagcagctgtccgggaggctgagcgtggacgtgaatatcctggagagcgcgggcatcgcatccctggaggtgctgccgcttcacaacagcaggcagaggggcagtgggcgcggggaagatgattctgggcctcccccatctactgtcattaaccaaaatgaaacatttgccaacataatttttaaacctactgtagtacaacaagccaggattgcccagaatggaattttgggagactttatcattagatatgacgtcaatagagaacagagcattggggacatccaggttctaaatggctattttgtgcactactttgctcctaaagaccttcctcctttacccaagaatgtggtattcgtgcttgacagcagtgcttctatggtgggaaccaaactccggcagaccaaggatgccctcttcacaattctccatgacctccgaccccaggaccgtttcagtatcattggattttccaaccggatcaaagtatggaaggaccacttgatatcagtcactccagacagcatcagggatgggaaagtgtacattcaccatatgtcacccactggaggcacagacatcaacggggccctgcagagggccatcaggctcctcaacaagtacgtggcccacagtggcattggagaccggagcgtgtccctcatcgtcttcctgacggatgggaagcccacggtcggggagacgcacaccctcaagatcctcaacaacacccgagaggccgcccgaggccaagtctgcatcttcaccattggcatcggcaacgacgtggacttcaggctgctggagaaactgtcgctggagaactgtggcctcacacggcgcgtgcacgaggaggaggacgcaggctcgcagctcatcgggttctacgatgaaatcaggaccccgctcctctctgacatccgcatcgattatccccccagctcagtggtgcaggccaccaagaccctgttccccaactacttcaacggctcggagatcatcattgcggggaagctggtggacaggaagctggatcacctgcacgtggaggtcaccgccagcaacagtaagaaattcatcatcctgaagacagatgtgcctgtgcggcctcagaaggcagggaaagatgtcacaggaagccccaggcctggaggcgatggagagggggacaccaaccacatcgagcgtctctggagctacctcaccacaaaggagctgctgagctcctggctgcaaagtgacgatgaaccggagaaggagcggctgcggcagcgggcccaggccctggctgtgagctaccgcttcctcactcccttcacctccatgaagctgagggggccggtcccacgcatggatggcctggaggaggcccacggcatgtcggctgccatgggacccgaaccggtggtgcagagcgtgcgaggagctggcacgcagccaggacctttgctcaagaagccataccagccaagaattaaaatctctaaaacatcagttcgtggcttcagaagggaagaacagattttttcaaatgtcatgaaatttccttttgccagcatcctggaactataataaaaattcagaggaaagaacaacctatgactgggttttgttctgctgtgtccagatcatcctctggaagtcttgattgttgcctttctgctgctgtgctgtacgtgcaagttcctaaagccagggacatcccggagatgagctgtggatatagagtccgcacagcctgcgggagacagaatgtaattccttccaacacacacacacaggctttatggaatgccagaaaagcttcctcttggatgctgcctggagtaatgactttttgaccctcccctcttttttggagcaagcactatctttccttgtaaagaaatttggacaatttgagtagaaatggtgtggtatgtgcacatagaaactctcagaaaactgtcagatgagctagacagttgtcctctatctccatgggtcccgcatcccaaggatcgaaccaacaacagatcaaaaatacgtgaaaaaggaattgcatctgtattgaatgtgtacggactttttttcttgtctttgttccttaaacaatgtagtgtaacaactatttacatcgcatctcctttgcattcattattataagtaaactagagatgatttaaagtgtatagaaaggctgcgtgcagtggctaatgtctgtaatcccagcactttgagaggccgaggcaggtggatcacctgaggtcaggagttcgagaccagcctggccaacgtggtgaaaccccatctctactaaaaatacaataattagctgggcatggtggtgcacgcctgtaatcccagctattcgggaggctgaggcaggagaatcgcttgaacccaggaggcagagattgcagtgaaccgagattgcaccattgcactccagcctgggtgacagagtgaacctccgtctcaaaaacaaaataaataaataagaataaatt

SEQ ID NO: 143417 - DNA, 6721 bp, Homo sapiens
  Payload ID: 8331
  Gene Symbol: ITIH5
  Gene Name: inter-alpha-trypsin inhibitor heavy chain family, member 5
  ENST ID: ENST00000397146
  CDS Start-End: 80-2908
gtcccgcagtggctggagccctgggcgctgcaaagcgtgtcccgccgggtccccgagcgtcccgcgccctcgccccgccatgctcctgctgctggggctgtgcctggggctgtccctgtgtgtggggtcgcaggaagaggcgcagagctggggccactcttcggagcaggatggactcagggtcccgaggcaagtcagactgttgcagaggctgaaaaccaaacctttgatgacagaattctcagtgaagtctaccatcatttcccgttatgccttcactacggtttcctgcagaatgctgaacagagcttctgaagaccaggacattgagttccagatgcagattccagctgcagctttcatcaccaacttcactatgcttattggagacaaggtgtatcagggcgaaattacagagagagaaaagaagagtggtgatagggtaaaagagaaaaggaataaaaccacagaagaaaatggagagaaggggactgaaatattcagagcttctgcagtgattcccagcaaggacaaagccgcctttttcctgagttatgaggagcttctgcagaggcgcctgggcaagtacgagcacagcatcagcgtgcggccccagcagctgtccgggaggctgagcgtggacgtgaatatcctggagagcgcgggcatcgcatccctggaggtgctgccgcttcacaacagcaggcagaggggcagtgggcgcggggaagatgattctgggcctcccccatctactgtcattaaccaaaatgaaacatttgccaacataatttttaaacctactgtagtacaacaagccaggattgcccagaatggaattttgggagactttatcattagatatgacgtcaatagagaacagagcattggggacatccaggttctaaatggctattttgtgcactactttgctcctaaagaccttcctcctttacccaagaatgtggtattcgtgcttgacagcagtgcttctatggtgggaaccaaactccggcagaccaaggatgccctcttcacaattctccatgacctccgaccccaggaccgtttcagtatcattggattttccaaccggatcaaagtatggaaggaccacttgatatcagtcactccagacagcatcagggatgggaaagtgtacattcaccatatgtcacccactggaggcacagacatcaacggggccctgcagagggccatcaggctcctcaacaagtacgtggcccacagtggcattggagaccggagcgtgtccctcatcgtcttcctgacggatgggaagcccacggtcggggagacgcacaccctcaagatcctcaacaacacccgagaggccgcccgaggccaagtctgcatcttcaccattggcatcggcaacgacgtggacttcaggctgctggagaaactgtcgctggagaactgtggcctcacacggcgcgtgcacgaggaggaggacgcaggctcgcagctcatcgggttctacgatgaaatcaggaccccgctcctctctgacatccgcatcgattatccccccagctcagtggtgcaggccaccaagaccctgttccccaactacttcaacggctcggagatcatcattgcggggaagctggtggacaggaagctggatcacctgcacgtggaggtcaccgccagcaacagtaagaaattcatcatcctgaagacagatgtgcctgtgcggcctcagaaggcagggaaagatgtcacaggaagccccaggcctggaggcgatggagagggggacaccaaccacatcgagcgtctctggagctacctcaccacaaaggagctgctgagctcctggctgcaaagtgacgatgaaccggagaaggagcggctgcggcagcgggcccaggccctggctgtgagctaccgcttcctcactcccttcacctccatgaagctgagggggccggtcccacgcatggatggcctggaggaggcccacggcatgtcggctgccatgggacccgaaccggtggtgcagagcgtgcgaggagctggcacgcagccaggacctttgctcaagaagccataccagccaagaattaaaatctctaaaacatcagtggatggtgatccccactttgttgtggatttccccctgagcagactcaccgtgtgcttcaacattgatgggcagcccggggacatcctcaggctggtctctgatcacagggactctggtgtcacagtgaacggagagttaattggggcacccgcccctccaaatggccacaagaaacagcgcacttacttgcgcactatcaccatcctcatcaacaagccagagagatcttatctcgagatcacaccgagcagagtcatcttggatggtggggacagactggtgctcccctgcaaccagagtgtggtggtggggagctgggggctggaggtgtccgtgtctgccaacgccaatgtcaccgtcaccatccagggctccatagcctttgtcatcctcatccacctctacaaaaagccggcgcccttccagcgacaccacctgggtttctacattgccaacagcgagggcctttccagcaactgccacggactgctgggtcagttcctgaatcaggatgccagactcacagaagaccctgcagggcccagccagaacctcactcaccctctgctccttcaggtgggagaggggcctgaggccgtcctaacagtgaaaggccaccaagtcccagtggtctggaagcaaaggaagatttacaacggggaagagcagatagactgctggtttgccaggaacaatgccgccaaactgattgacggggagtacaaggattacctggcatcccatccatttgacacagggatgacacttggccggggaatgtccagggagctctgaagctggcagccttaaagatgcaagtgcatgaaggacagtgatgtggggaggccgtggggcagctcttttcatggcttgtacacgcctcagctcctggcaattagctggactccatgacccacccctggtgcagcatagatccgacgtctgtctgggcgaagggtaggggtgggtaggggcgggaagcctgagtgcaaatgtcatttccctctactgcctcttcctgcctctccccaccctgcccacatccacagaggggagagaagggtcatagctaaatgcaacaaagtctgtatcttgtcccaacctgcttttctgttctgttagcatatcataaagtaagcctttctggtgaaggaaggttgctatgaaactttttttcttggtggaaatggacaagtttaggcactctgctttttgccttacactaatgcttagaaagctgtcttttcagtggtgttgcagcccccagatgtgtggccaacctctgctgcaaaggaatctcttgctgagtccaggccaccaatcaggcaaatagcccatacatttgatcgttgtaaaccatgaagtcttttcttgcaagacgtttttcttctgctgtggtatcttgcccttaaaaattagttttcattaaaaagaaatttgattgaaaatagaaacatctacagctcagatactgatctctttctaatgggctttgtaaaccacttgactttgctaatggctattctccaatttgttccaataagctaagggcttttcatacacaggacaactccatgtggttgattttactggcatgtcttggtgacgaagagttggccaagtgaatgatgcatcttttacttggagctctccagcctttgtcatagttcccagaccttttttccttgtggtcatccaggaggtgatcaattacatgtgcacagtgctaggacgggaggcagagccggctcagagcaggtccaccagcccacctatagcaggaagcgtgtcggtgcttaggaaatctaggacttccagcttccctcatgtcagatagaaaaaaagtcaggaaaccagctcgtggacaggggctttggttccaaaacttggacaaacctgatgccttaaggaaaaggttaagatgagaggggacttccagagtcaatgaacgtcacccttcagcggacggataccgggagcgcttgggcgaaacagcagagaaagaaagactgtggtcggggaagtggaatgcttcgatgcaggccagagttcaaggctctggggctggcctcacaagaggcttcttccacggggcttgacaccagagcagcccccgcgtgaaatgagaaggcatgcttagcactgggaggaaaagctgagttaagaaaattctttatcatgtttgccttccctggggaaacattcaggcagtaaaatgacatccacgtgttcctgtcggacgcagcggcttcgggaacaagttagcgctgggggactatctgggctcgtctctctctgcttcgtgaacccaccacaccagggcctgtctgctgtgctatttatttgccttccgtcttcccaacctcagctgcctgtattcatgccagaggtgcaaaggctgccagccagtgctgctgacagatgctttcagactgtagagctcagagaaagggagcggcagctagaggtagccagggagctggccaggctccccggggccttcctattatgtaaatcccagctggacagacagccctggagccaggtggccctgtcccctgtggagcacttggagcagtgatctgttgttccaggtgtaagtctcgacactgcagaaatgaggacgttattaggaaagaccagttcctactgcctgtgttgctactttaagagctgagaaaaacattccaatgagctatccatagctaacttgcttgctcagaaaaacataagtaacaaagttgagctttcatttttaaaaattatattttactttagaaaaatatcaccttttttcttcctcttctttacgtgtagatcttttttttttttttcaaatggggtcagtacctgaaagcccgaaaccccataccaagcttatagttaggacctttgcatttgataaaaaaaaaatatagtattttctgttgtccagaaaatcttcccagatagggaaactgaggcagagagtgccgtggagtggtttttgccaagtcatacaacatacttaatgcagggctacactgaacctccagaatcattttgtttgctttgaccctgtttcaccatctgggcaatcatttattttccttgagcatttataaaccagggcgagggttgttccaaaatgagtaattgaatgagatgaagaaatatgtcataattagaggagataaatctccttgttatcacaatagttaatgtgtcatgatcactgactaactgggaccttgaacaagtcagcatctctgcctttcaaaatgaaggaacattgttctctatcctcccctgacccccgacggccccatgctaggtgcaccatcttcctccatttgactttttaatgctttacaacttcaggctaaagggaggggatgttgggaggagaaaccatcacaagattccctcggtgccacagctgtgctgaggaggccggggactgggaatcggagtgggcacctctgtgtttctctagggagtaacattcaacatttaattgaatcgtgtgtcctgataggtggattaggaacaggattcattcctttaactttaacttttggctaaacgacatgccttggattgagtgtatatgtcttccccaaattcatatgttgaagcttaaatcctgaatgtgatggttcttggaattgggacctttggaaggttattgggtcttgagggcagagccctcacgaatgggattaaggcccttataagaagagacatggggccaggtgcagtggctcacacctgtaatcccaacattttgggaggccgagaagggtggatcatgaggtcaggagatggagaccatcctggccaacatggtgaaacctcgtctctactaaaaatacaaaaattagctgggcgtggtggtgcgtgcctgtagttccagctacttgggaggctgaggcaggagaatcgcttgaaccaggcagtcggaacttgtagtgagccaagatcacgccactgcactccagctggagtgacagagccaaactccgtcaaaaaaaaacaaaacaaaacaaaaaaaagacatgggagagatggtgtttttcctctccaccacctggggatacgatgagaagatggccacctgcaagccaggaagacggccctcaccagacaccatgtctgctggcaccttgatcttggacctcccagcctccagaactgtgagaaataaatgtgttttgtttaagctactcaagtctgtggtattcttgttaaggcagcccaagctgactaagacaccaaatcattcaaaacgttaattctttttctgttctttaagcttcccagaatgtacacaaacaatgctgttattaaaatttaaaggactcttggaactgtaggacatgatccagctaaaataaataacaaataacacagctaagcaaatacttataaatgtagctttaaatatttattttagttttaaataattagtggggtacgagacagttcacattcaagagacattttacttagacaaaaaatttataagagaacgatgcataaaaacaaacaacatattggtctgtttatttttctaagggaaaatggaattggagctgttgagaataaaacttgaagaatctaactgca

SEQ ID NO: 143418 - DNA, 983 bp, Homo sapiens
  Payload ID: 8331
  Gene Symbol: ITIH5
  Gene Name: inter-alpha-trypsin inhibitor heavy chain family, member 5
  ENST ID: ENST00000461751
  CDS Start-End: 1-358
cccatctactgtcattaaccaaaatgaaacatttgccaacataatttttaaacctactgtagtacaacaagccaggattgcccagaatggaattttgggagactttatcattagatatgacgtcaatagagaacagagcattggggacatccaggttctaaatggctattttgtgcactactttgctcctaaagaccttcctcctttacccaagaatgtggtattcgtgcttgacagcagtgcttctatggtgggaaccaaactccggcaggacattggtttctccctcgctgtccaaaattgggttcccaagggctatttggatatttcatgtgtaaccttacaggtgcacgtgtaactggaaagggaaggcaaaggccaagaccaaggatgccctcttcacaattctccatgacctccgaccccaggaccgtttcagtatcattggattttccaaccggatcaaagtatggaaggaccacttgatatcagtcactccagacagcatcagggatgggaaagtgtacattcaccatatgtcacccactggaggcacagacatcaacggggccctgcagagggccatcaggctcctcaacaagtacgtggcccacagtggcattggagaccggagcgtgtccctcatcgtcttcctgacggatgggaagcccacggtcggggagacgcacaccctcaagatcctcaacaacacccgagaggccgcccgaggccaagtctgcatcttcaccattggcatcggcaacgacgtggacttcaggctgctggagaaactgtcgctggagaactgtggcctcacacggcgcgtgcacgaggaggaggacgcaggctcgcagctcatcgggttctacgatgaaatcaggaccccgctcctctctgacatccgcatcgattatccccccagctcagtggtgcaggccaccaagaccctgttccccaactacttcaacggctcggagatcatc

SEQ ID NO: 143419 - DNA, 2916 bp, Homo sapiens
  Payload ID: 8331
  Gene Symbol: ITIH5
  Gene Name: inter-alpha-trypsin inhibitor heavy chain family, member 5
  ENST ID: ENST00000613909
  CDS Start-End: 71-2257
cgccttgtagacgtgttcgctttgcgtttgccttctgcgtgattgtaagtttcccgaggcttccccagccatgcggaactatgattctgggcctcccccatctactgtcattaaccaaaatgaaacatttgccaacataatttttaaacctactgtagtacaacaagccaggattgcccagaatggaattttgggagactttatcattagatatgacgtcaatagagaacagagcattggggacatccaggttctaaatggctattttgtgcactactttgctcctaaagaccttcctcctttacccaagaatgtggtattcgtgcttgacagcagtgcttctatggtgggaaccaaactccggcagaccaaggatgccctcttcacaattctccatgacctccgaccccaggaccgtttcagtatcattggattttccaaccggatcaaagtatggaaggaccacttgatatcagtcactccagacagcatcagggatgggaaagtgtacattcaccatatgtcacccactggaggcacagacatcaacggggccctgcagagggccatcaggctcctcaacaagtacgtggcccacagtggcattggagaccggagcgtgtccctcatcgtcttcctgacggatgggaagcccacggtcggggagacgcacaccctcaagatcctcaacaacacccgagaggccgcccgaggccaagtctgcatcttcaccattggcatcggcaacgacgtggacttcaggctgctggagaaactgtcgctggagaactgtggcctcacacggcgcgtgcacgaggaggaggacgcaggctcgcagctcatcgggttctacgatgaaatcaggaccccgctcctctctgacatccgcatcgattatccccccagctcagtggtgcaggccaccaagaccctgttccccaactacttcaacggctcggagatcatcattgcggggaagctggtggacaggaagctggatcacctgcacgtggaggtcaccgccagcaacagtaagaaattcatcatcctgaagacagatgtgcctgtgcggcctcagaaggcagggaaagatgtcacaggaagccccaggcctggaggcgatggagagggggacaccaaccacatcgagcgtctctggagctacctcaccacaaaggagctgctgagctcctggctgcaaagtgacgatgaaccggagaaggagcggctgcggcagcgggcccaggccctggctgtgagctaccgcttcctcactcccttcacctccatgaagctgagggggccggtcccacgcatggatggcctggaggaggcccacggcatgtcggctgccatgggacccgaaccggtggtgcagagcgtgcgaggagctggcacgcagccaggacctttgctcaagaagccataccagccaagaattaaaatctctaaaacatcagtggatggtgatccccactttgttgtggatttccccctgagcagactcaccgtgtgcttcaacattgatgggcagcccggggacatcctcaggctggtctctgatcacagggactctggtgtcacagtgaacggagagttaattggggcacccgcccctccaaatggccacaagaaacagcgcacttacttgcgcactatcaccatcctcatcaacaagccagagagatcttatctcgagatcacaccgagcagagtcatcttggatggtggggacagactggtgctcccctgcaaccagagtgtggtggtggggagctgggggctggaggtgtccgtgtctgccaacgccaatgtcaccgtcaccatccagggctccatagcctttgtcatcctcatccacctctacaaaaagccggcgcccttccagcgacaccacctgggtttctacattgccaacagcgagggcctttccagcaactgccacggactgctgggtcagttcctgaatcaggatgccagactcacagaagaccctgcagggcccagccagaacctcactcaccctctgctccttcaggtgggagaggggcctgaggccgtcctaacagtgaaaggccaccaagtcccagtggtctggaagcaaaggaagatttacaacggggaagagcagatagactgctggtttgccaggaacaatgccgccaaactgattgacggggagtacaaggattacctggcatcccatccatttgacacagggatgacacttggccggggaatgtccagggagctctgaagctggcagccttaaagatgcaagtgcatgaaggacagtgatgtggggaggccgtggggcagctcttttcatggcttgtacacgcctcagctcctggcaattagctggactccatgacccacccctggtgcagcatagatccgacgtctgtctgggcgaagggtaggggtgggtaggggcgggaagcctgagtgcaaatgtcatttccctctactgcctcttcctgcctctccccaccctgcccacatccacagaggggagagaagggtcatagctaaatgcaacaaagtctgtatcttgtcccaacctgcttttctgttctgttagcatatcataaagtaagcctttctggtgaaggaaggttgctatgaaactttttttcttggtggaaatggacaagtttaggcactctgctttttgccttacactaatgcttagaaagctgtcttttcagtggtgttgcagcccccagatgtgtggccaacctctgctgcaaaggaatctcttgctgagtccaggccaccaatcaggcaaatagcccatacatttgatcgttgtaaaccatgaagtcttttcttgcaagacgtttttcttctgctgtggtatcttgcccttaaaaattagttttcattaaaaagaaatttgattgaaaatagaaa

SEQ ID NO: 143420 - DNA, 4968 bp, Homo sapiens
  Payload ID: 8332
  Gene Symbol: ITIH6
  Gene Name: inter-alpha-trypsin inhibitor heavy chain family, member 6
  Uniprot ID: Q6UXX5
  ENST ID: ENST00000218436
  CDS Start-End: 31-3972
gaacaacagatccaggccagaggtggcatcatgtctgggtggaggtacctcatctgtgtcagctttttgctgaccattcttcttgaactgacataccagggaccccctgtccccgcttcatcaagcacaaagttgttaatgacaagctattctatgcgctccacggtggtgtctcgctatgcccacaccttggtcacctctgtcctgtttaatccacatgctgaagcccatgaagccatctttgacctggatctgcctcatcttgcctttatctccaatttcactatgaccatcaacaataaagtctacattgcagaagtcaaagagaagcaccaggcaaagaaaatctatgaagaagcccatcagcagggaaagacagctgctcatgtaggcatcagggaccgggaatcagagaagttccgcatctccaccagcctggcagcaggcacagaggtgactttttccctggcctatgaggaactgcttcagcggcaccagggccagtaccagctggtggtgagcctgaggcctggccaattggtgaagaggctgagcatagaggttacagtgtcagaaaggacaggcatctcctatgtgcacataccacccctgaggaccggccgtctgcgcaccaatgcccatgcaagtgaggtggattcacccccatccaccaggatcgagaggggagagacctgtgtccgaatcacctactgcccgacattgcaagaccagtcgtccatctctgggtcaggcatcatggctgacttcctggttcagtacgatgtggtcatggaggacatcattggagacgtgcagatttacgatgactatttcattcactactttgcccccagaggccttccacctatggagaagaatgtggtttttgttattgacgtaagcagctccatgtttggtaccaagatggaacagactaaaacggccatgaatgtgatcctcagtgaccttcaagccaatgactacttcaacatcatctccttttctgacacagttaatgtttggaaagctggaggctcaatccaggccaccatccagaatgtccacagtgccaaggactacctgcattgcatggaagccgatggctggacagacgtcaactcagctctgctggcagctgcttcagtgctgaaccatagcaaccaggagcctgggaggggccccagtgtggggaggatccctcttatcatcttcctgacggatggggagcccacggccggcgtgacgacccccagtgtgatcctctccaatgtccgtcaggcgctaggccacagggtatcccttttcagcttggcctttggggatgatgctgactttacactgctgcgccgcctgtccctggaaaaccggggaatagcccggcgcatatatgaggacactgatgcggccctacagctgaagggcctctatgaggagatctccatgcctctgctggcagatgtgcgtctgaactacctgggtggcttggttggggcctccccttgggccgttttccccaactactttggtggctctgagctggtggtggcaggacaggtgcagccaggcaaacaggaactgggcatccacctggcagcccgtggccccaaggatcagcttcttgtggcccaccacagtgaaggggccaccaacaacagccagaaggcctttggttgcccaggggagccagcccccaatgtggcccacttcatccgccgcctctgggcctatgtcaccattggagaactgctggatgcacacttccaagctcgtgacaccaccactcgccacctgctggctgccaaagtcctcaacctgtcccttgaatacaactttgtcacacctctgacttcactggtcatggtgcaacccaaacaggccagtgaggagaccaggagacagacttccacctctgctgggccagacaccatcatgccctcatccagcagcaggcatggcctaggggtaagcacagctcagccagccttggtgcccaaggtcatctcccccaaatcaaggcctgtgaaaccaaagttctacttatcctcaactactactgcctctaccaagaagatgctaagttccaaagagctggagccattgggagagagccctcataccctgtcaatgcccacatacccaaaggccaaaattccagcacaacaggattctggcaccttggcccagccaactctcaggacaaaacctaccattcttgtgccctcaaattctggtactctgttgcctctgaagcccggctctctatcacaccagaatcctgatatattacccacgaactccaggacacaagtcccacctgtgaaacctggcatcccagcctcgcccaaagctgacactgtgaaatgtgttactccactgcattccaaacctggtgctccatcgcacccccaacttggggcactcacatcacaggcacctaaaggcctgccacagtcaagacctggagtctctacacttcaggttcccaagtacccactacacaccagacctagggttcctgctcccaagacccgaaacaacatgccacacctggggcctggaatcctcttgtccaagacccctaaaatcttattatctcttaaaccgagtgccccaccacaccaaatttccacaagcatatcactttccaagcctgagaccccaaacccccatatgcctcaaaccccactacctcctagacctgacagaccaaggcccccacttcctgagagcctaagcacattcccaaatacaatctcaagttccacaggtcccagcagtaccacaaccacctctgtccttggagaacccctccccatgccctttactcccactctgccccctggaaggttctggcatcagtatgacctcctcccgggtccccagaggaccaggcaagttctgggaccatctaggccaggagttccaacaatgagcctactcaacagctccaggcctacaccagaaggcagccctccaaacctgccaatcttgctgccttctagcatcctccctgaggccatcagtctgctccttctccctgaggagctagagctgctgtctgaatcaatggtggaatccaagttcgtggagtccttgaacccaccagctttctataccttcctcactcctgatgaagatggaagtccaaactgggatggcaattctgaggagatcctgggaggagctggaggcagcatggaatctcaaggaagttctgtggggttagcaaaaggcacattgcctagcatcttcaccttctcctcctcagtggacggggacccccactttgtgatccaaatcccacactcagaagagaagatctgcttcacactgaatgggcaccctggggacttgctgcagctcatagaggacccaaaggcagggctgcatgtgagtgggaagctgcttggcgcaccaccaaggccgggccacaaggaccagactcgcacctacttccagatcatcacagtcactacagacaaaccccgggcctatactatcaccatcagccgcagttctatatctttgcgaggcgagggtaccttgcgcctgtcctgggaccaacctgccctgctgaagaggccccagctggagctctatgtggctgctgcagcccgccttaccctccgccttgggccctaccttgagttcctagtcctccgacaccgctacaggcatcccagtaccctgcaactaccccacctggggttctacgtggccaatggctcaggcctcagcccctcagcccgtggcctgatagggcagttccagcacgcagacatccgactggtgacaggacctatggggccatgcttacgaaggcaccatggcccagatgtgcctgtgattctaggcaagaggctgctgaaggactcaccaaggctgctgccccgctgggcttcctgctggctggtgaagcgctctcatgtagagctgcttctgggccacccctacctctcctatgtcctgtgatggcttctgaattccagagccaggagacctgaatttgggagatccagaaaccagggcatggggtgagccagggacagagacccaaggacatggaagcacacacagggacacacagactcacgcatgttctaaggaacacatatacaagggtatacaaacacatagacatgcagagacatagagtcagggactcctgcatcttcatggtccttcacatctccagtctcaccctctccaaatccatgctcctcaccagccctacaagccacttttgtaaaacgaaaaaatgatcagtagttctgctcacagctttccctaactcctatggcatattcaaggctctcagagtttccctaacaaaccatgctcactcctaccactggaccattgcatgtgcttttccttctgcatgaaacactcttcctttgttcctgtaggtgagtataattcatccttcaaatcctagttgttacctcttctaggaggcctttcctgatgcctgccctagattgagtttggtcctgtcctctgggttcctatagcccacccccaaccctccacgctcacagtatttatactgtgtagtaatcatctgtttacttgtctggatccctgacttagactgtgagatctttgagggcaaggaccttttctgaatcatctatgtatccccagtgcctctcacataataggtgcttagtaaatatttgttaaaagaatgaattaattaattaacaaaaaaggatcccataacatagcaatagacacacatatatacatactcacaaccaaagacacaggatcacacccggaaaaacagtgacaagggcacagatatggatggatagagggacagacatttatggaaacacaggaatcacaaaacaaacatggacataggggtatagagacataaaaagatggggacagggagccagagtggcagaatcagggacataaactcagagaaaaaggaacagatgctctctggctgca

SEQ ID NO: 143421 - DNA, 3252 bp, Homo sapiens
  Payload ID: 8333
  Gene Symbol: ICAM1
  Gene Name: intercellular adhesion molecule 1
  Uniprot ID: P05362
  ENST ID: ENST00000264832
  CDS Start-End: 326-1924
gtgattcaagcttagcctggccgggaaacgggaggcgtggaggccgggagcagcccccggggtcatcgccctgccaccgccgcccgattgctttagcttggaaattccggagctgaagcggccagcgagggaggatgaccctctcggcccgggcaccctgtcagtccggaaataactgcagcatttgttccggaggggaaggcgcgaggtttccgggaaagcagcaccgccccttggcccccaggtggctagcgctataaaggatcacgcgccccagtcgacgctgagctcctctgctactcagagttgcaacctcagcctcgctatggctcccagcagcccccggcccgcgctgcccgcactcctggtcctgctcggggctctgttcccaggacctggcaatgcccagacatctgtgtccccctcaaaagtcatcctgccccggggaggctccgtgctggtgacatgcagcacctcctgtgaccagcccaagttgttgggcatagagaccccgttgcctaaaaaggagttgctcctgcctgggaacaaccggaaggtgtatgaactgagcaatgtgcaagaagatagccaaccaatgtgctattcaaactgccctgatgggcagtcaacagctaaaaccttcctcaccgtgtactggactccagaacgggtggaactggcacccctcccctcttggcagccagtgggcaagaaccttaccctacgctgccaggtggagggtggggcaccccgggccaacctcaccgtggtgctgctccgtggggagaaggagctgaaacgggagccagctgtgggggagcccgctgaggtcacgaccacggtgctggtgaggagagatcaccatggagccaatttctcgtgccgcactgaactggacctgcggccccaagggctggagctgtttgagaacacctcggccccctaccagctccagacctttgtcctgccagcgactcccccacaacttgtcagcccccgggtcctagaggtggacacgcaggggaccgtggtctgttccctggacgggctgttcccagtctcggaggcccaggtccacctggcactgggggaccagaggttgaaccccacagtcacctatggcaacgactccttctcggccaaggcctcagtcagtgtgaccgcagaggacgagggcacccagcggctgacgtgtgcagtaatactggggaaccagagccaggagacactgcagacagtgaccatctacagctttccggcgcccaacgtgattctgacgaagccagaggtctcagaagggaccgaggtgacagtgaagtgtgaggcccaccctagagccaaggtgacgctgaatggggttccagcccagccactgggcccgagggcccagctcctgctgaaggccaccccagaggacaacgggcgcagcttctcctgctctgcaaccctggaggtggccggccagcttatacacaagaaccagacccgggagcttcgtgtcctgtatggcccccgactggacgagagggattgtccgggaaactggacgtggccagaaaattcccagcagactccaatgtgccaggcttgggggaacccattgcccgagctcaagtgtctaaaggatggcactttcccactgcccatcggggaatcagtgactgtcactcgagatcttgagggcacctacctctgtcgggccaggagcactcaaggggaggtcacccgcaaggtgaccgtgaatgtgctctccccccggtatgagattgtcatcatcactgtggtagcagccgcagtcataatgggcactgcaggcctcagcacgtacctctataaccgccagcggaagatcaagaaatacagactacaacaggcccaaaaagggacccccatgaaaccgaacacacaagccacgcctccctgaacctatcccgggacagggcctcttcctcggccttcccatattggtggcagtggtgccacactgaacagagtggaagacatatgccatgcagctacacctaccggccctgggacgccggaggacagggcattgtcctcagtcagatacaacagcatttggggccatggtacctgcacacctaaaacactaggccacgcatctgatctgtagtcacatgactaagccaagaggaaggagcaagactcaagacatgattgatggatgttaaagtctagcctgatgagaggggaagtggtgggggagacatagccccaccatgaggacatacaactgggaaatactgaaacttgctgcctattgggtatgctgaggccccacagacttacagaagaagtggccctccatagacatgtgtagcatcaaaacacaaaggcccacacttcctgacggatgccagcttgggcactgctgtctactgaccccaacccttgatgatatgtatttattcatttgttattttaccagctatttattgagtgtcttttatgtaggctaaatgaacataggtctctggcctcacggagctcccagtcctaatcacattcaaggtcaccaggtacagttgtacaggttgtacactgcaggagagtgcctggcaaaaagatcaaatggggctgggacttctcattggccaacctgcctttccccagaaggagtgatttttctatcggcacaaaagcactatatggactggtaatggttacaggttcagagattacccagtgaggccttattcctcccttccccccaaaactgacacctttgttagccacctccccacccacatacatttctgccagtgttcacaatgacactcagcggtcatgtctggacatgagtgcccagggaatatgcccaagctatgccttgtcctcttgtcctgtttgcatttcactgggagcttgcactatgcagctccagtttcctgcagtgatcagggtcctgcaagcagtggggaagggggccaaggtattggaggactccctcccagctttggaagcctcatccgcgtgtgtgtgtgtgtgtatgtgtagacaagctctcgctctgtcacccaggctggagtgcagtggtgcaatcatggttcactgcagtcttgaccttttgggctcaagtgatcctcccacctcagcctcctgagtagctgggaccataggctcacaacaccacacctggcaaatttgattttttttttttttccagagacggggtctcgcaacattgcccagacttcctttgtgttagttaataaagctttctcaactgcc

SEQ ID NO: 143422 - DNA, 1296 bp, Homo sapiens
  Payload ID: 8333
  Gene Symbol: ICAM1
  Gene Name: intercellular adhesion molecule 1
  ENST ID: ENST00000423829
  CDS Start-End: 68-1000
aaaggatcacgcgccccagtcgacgctgagctcctctgctactcagagttgcaacctcagcctcgctatggctcccagcagcccccggcccgcgctgcccgcactcctggtcctgctcggggctctgttcccagtctcggaggcccaggtccacctggcactgggggaccagaggttgaaccccacagtcacctatggcaacgactccttctcggccaaggcctcagtcagtgtgaccgcagaggacgagggcacccagcggctgacgtgtgcagtaatactggggaaccagagccaggagacactgcagacagtgaccatctacagctttccggcgcccaacgtgattctgacgaagccagaggtctcagaagggaccgaggtgacagtgaagtgtgaggcccaccctagagccaaggtgacgctgaatggggttccagcccagccactgggcccgagggcccagctcctgctgaaggccaccccagaggacaacgggcgcagcttctcctgctctgcaaccctggaggtggccggccagcttatacacaagaaccagacccgggagcttcgtgtcctgtatggcccccgactggacgagagggattgtccgggaaactggacgtggccagaaaattcccagcagactccaatgtgccaggcttgggggaacccattgcccgagctcaagtgtctaaaggatggcactttcccactgcccatcggggaatcagtgactgtcactcgagatcttgagggcacctacctctgtcgggccaggagcactcaaggggaggtcacccgcaaggtgaccgtgaatgtgctctccccccggtatgagattgtcatcatcactgtggtagcagccgcagtcataatgggcactgcaggcctcagcacgtacctctataaccgccagcggaagatcaagaaatacagactacaacaggcccaaaaagggacccccatgaaaccgaacacacaagccacgcctccctgaacctatcccgggacagggcctcttcctcggccttcccatattggtggcagtggtgccacactgaacagagtggaagacatatgccatgcagctacacctaccggccctgggacgccggaggacagggcattgtcctcagtcagatacaacagcatttggggccatggtacctgcacacctaaaacactaggccacgcatctgatctgtagtcacatgactaagccaagaggaaggagcaagactcaagacatgattgatggatgttaaagtctagcctgatgagaggggaagtggt

SEQ ID NO: 143423 - DNA, 581 bp, Homo sapiens
  Payload ID: 8333
  Gene Symbol: ICAM1
  Gene Name: intercellular adhesion molecule 1
  ENST ID: ENST00000588645
  CDS Start-End: 41-581
gagctcctctgctactcagagttgcaacctcagcctcgctatggctcccagcagcccccggcccgcgctgcccgcactcctggtcctgctcggggctctgttcccaggacctggcaatgcccagacatctgtgtccccctcaaaagtcatcctgccccggggaggctccgtgctggtgacatgcagcacctcctgtgaccagcccaagttgttgggcatagagaccccgttgcctaaaaaggagttgctcctgcctgggaacaaccggaaggtgtatgaactgagcaatgtgcaagaagatagccaaccaatgtgctattcaaactgccctgatgggcagtcaacagctaaaaccttcctcaccgtgtactggactccagaacgggtggagggtggggcaccccgggccaacctcaccgtggtgctgctccgtggggagaaggagctgaaacgggagccagctgtgggggagcccgctgaggtcacgaccacggtgctggtgaggagagatcaccatggagccaatttctcgtgccgcactgaactggacctgcggccccaagggctggagctgtttgaga

SEQ ID NO: 143424 - DNA, 1252 bp, Homo sapiens
  Payload ID: 8334
  Gene Symbol: ICAM2
  Gene Name: intercellular adhesion molecule 2
  Uniprot ID: P13598
  ENST ID: ENST00000418105
  CDS Start-End: 274-1101
ggagaagactgaataagccgtgaactgggcagctgtgacacgcgcaccttgtcaccttgtcaccaatttcctgcccgggatcccagagctacccttcttggagcccacaggggtaaggttgagcttctcactttccctccaatgaagcgtggcagcatgggaaggattttggcagtgtcgaggtctgagttttagtccgttcccctctctgggtctcagtttctcgctggcagcccttggctggtccctgcgagcccgtggagactgccagagatgtcctctttcggttacaggaccctgactgtggccctcttcaccctgatctgctgtccaggatcggatgagaaggtattcgaggtacacgtgaggccaaagaagctggcggttgagcccaaagggtccctcgaggtcaactgcagcaccacctgtaaccagcctgaagtgggtggtctggagacctctctagataagattctgctggacgaacaggctcagtggaaacattacttggtctcaaacatctcccatgacacggtcctccaatgccacttcacctgctccgggaagcaggagtcaatgaattccaacgtcagcgtgtaccagcctccaaggcaggtcatcctgacactgcaacccactttggtggctgtgggcaagtccttcaccattgagtgcagggtgcccaccgtggagcccctggacagcctcaccctcttcctgttccgtggcaatgagactctgcactatgagaccttcgggaaggcagcccctgctccgcaggaggccacagccacattcaacagcacggctgacagagaggatggccaccgcaacttctcctgcctggctgtgctggacttgatgtctcgcggtggcaacatctttcacaaacactcagccccgaagatgttggagatctatgagcctgtgtcggacagccagatggtcatcatagtcacggtggtgtcggtgttgctgtccctgttcgtgacatctgtcctgctctgcttcatcttcggccagcacttgcgccagcagcggatgggcacctacggggtgcgagcggcttggaggaggctgccccaggccttccggccatagcaaccatgagtggcatggccaccaccacggtggtcactggaactcagtgtgactcctcagggttgaggtccagccctggctgaaggactgtgacaggcagcagagacttgggacattgccttttctagcccgaatacaaacacctggactt

SEQ ID NO: 143425 - DNA, 1221 bp, Homo sapiens
  Payload ID: 8334
  Gene Symbol: ICAM2
  Gene Name: intercellular adhesion molecule 2
  Uniprot ID: P13598
  ENST ID: ENST00000449662
  CDS Start-End: 242-1069
ctgggttatgccctgcttatcagcagcttcccagcttcctctgcctggattcttagaggcctggggtcctagaacgagctggtgcacgtggcttcccaaagatctctcagataatgagaggaaatgcagtcatcagtttgcagaaggctagggattctgggccatagctcagacctgcgcccaccatctccctccaggcagcccttggctggtccctgcgagcccgtggagactgccagagatgtcctctttcggttacaggaccctgactgtggccctcttcaccctgatctgctgtccaggatcggatgagaaggtattcgaggtacacgtgaggccaaagaagctggcggttgagcccaaagggtccctcgaggtcaactgcagcaccacctgtaaccagcctgaagtgggtggtctggagacctctctagataagattctgctggacgaacaggctcagtggaaacattacttggtctcaaacatctcccatgacacggtcctccaatgccacttcacctgctccgggaagcaggagtcaatgaattccaacgtcagcgtgtaccagcctccaaggcaggtcatcctgacactgcaacccactttggtggctgtgggcaagtccttcaccattgagtgcagggtgcccaccgtggagcccctggacagcctcaccctcttcctgttccgtggcaatgagactctgcactatgagaccttcgggaaggcagcccctgctccgcaggaggccacagccacattcaacagcacggctgacagagaggatggccaccgcaacttctcctgcctggctgtgctggacttgatgtctcgcggtggcaacatctttcacaaacactcagccccgaagatgttggagatctatgagcctgtgtcggacagccagatggtcatcatagtcacggtggtgtcggtgttgctgtccctgttcgtgacatctgtcctgctctgcttcatcttcggccagcacttgcgccagcagcggatgggcacctacggggtgcgagcggcttggaggaggctgccccaggccttccggccatagcaaccatgagtggcatggccaccaccacggtggtcactggaactcagtgtgactcctcagggttgaggtccagccctggctgaaggactgtgacaggcagcagagacttgggacattgccttttctagcccgaatacaaacacctggactta

SEQ ID NO: 143426 - DNA, 1334 bp, Homo sapiens
  Payload ID: 8334
  Gene Symbol: ICAM2
  Gene Name: intercellular adhesion molecule 2
  Uniprot ID: P13598
  ENST ID: ENST00000412356
  CDS Start-End: 356-1183
ggagaagactgaataagccgtgaactgggcagctgtgacacgcgcaccttgtcaccttgtcaccaatttcctgcccgggatcccagagctacccttcttggagcccacaggggtaaggttgagcttctcactttccctccaatgaagcgtggcagcatgggaaggattttggcagtgtcgaggtctgagttttagtccgttcccctctctgggtctcagtttctcgctggaataaagtgaaacacctcaggctccaaccctcccaacccaaggctccctcctggagggagagagaggatggaggacatcaggcagcccttggctggtccctgcgagcccgtggagactgccagagatgtcctctttcggttacaggaccctgactgtggccctcttcaccctgatctgctgtccaggatcggatgagaaggtattcgaggtacacgtgaggccaaagaagctggcggttgagcccaaagggtccctcgaggtcaactgcagcaccacctgtaaccagcctgaagtgggtggtctggagacctctctagataagattctgctggacgaacaggctcagtggaaacattacttggtctcaaacatctcccatgacacggtcctccaatgccacttcacctgctccgggaagcaggagtcaatgaattccaacgtcagcgtgtaccagcctccaaggcaggtcatcctgacactgcaacccactttggtggctgtgggcaagtccttcaccattgagtgcagggtgcccaccgtggagcccctggacagcctcaccctcttcctgttccgtggcaatgagactctgcactatgagaccttcgggaaggcagcccctgctccgcaggaggccacagccacattcaacagcacggctgacagagaggatggccaccgcaacttctcctgcctggctgtgctggacttgatgtctcgcggtggcaacatctttcacaaacactcagccccgaagatgttggagatctatgagcctgtgtcggacagccagatggtcatcatagtcacggtggtgtcggtgttgctgtccctgttcgtgacatctgtcctgctctgcttcatcttcggccagcacttgcgccagcagcggatgggcacctacggggtgcgagcggcttggaggaggctgccccaggccttccggccatagcaaccatgagtggcatggccaccaccacggtggtcactggaactcagtgtgactcctcagggttgaggtccagccctggctgaaggactgtgacaggcagcagagacttgggacattgccttttctagcccgaatacaaacacctggactt

SEQ ID NO: 143427 - DNA, 1154 bp, Homo sapiens
  Payload ID: 8334
  Gene Symbol: ICAM2
  Gene Name: intercellular adhesion molecule 2
  Uniprot ID: P13598
  ENST ID: ENST00000579687
  CDS Start-End: 212-1039
ggcagctgtgacacgcgcaccttgtcaccttgtcaccaatttcctgcccgggatcccagagctacccttcttggagcccacaggggaataaagtgaaacacctcaggctccaaccctcccaacccaaggctccctcctggagggagagagaggatggaggacatcaggcagcccttggctggtccctgcgagcccgtggagactgccagagatgtcctctttcggttacaggaccctgactgtggccctcttcaccctgatctgctgtccaggatcggatgagaaggtattcgaggtacacgtgaggccaaagaagctggcggttgagcccaaagggtccctcgaggtcaactgcagcaccacctgtaaccagcctgaagtgggtggtctggagacctctctagataagattctgctggacgaacaggctcagtggaaacattacttggtctcaaacatctcccatgacacggtcctccaatgccacttcacctgctccgggaagcaggagtcaatgaattccaacgtcagcgtgtaccagcctccaaggcaggtcatcctgacactgcaacccactttggtggctgtgggcaagtccttcaccattgagtgcagggtgcccaccgtggagcccctggacagcctcaccctcttcctgttccgtggcaatgagactctgcactatgagaccttcgggaaggcagcccctgctccgcaggaggccacagccacattcaacagcacggctgacagagaggatggccaccgcaacttctcctgcctggctgtgctggacttgatgtctcgcggtggcaacatctttcacaaacactcagccccgaagatgttggagatctatgagcctgtgtcggacagccagatggtcatcatagtcacggtggtgtcggtgttgctgtccctgttcgtgacatctgtcctgctctgcttcatcttcggccagcacttgcgccagcagcggatgggcacctacggggtgcgagcggcttggaggaggctgccccaggccttccggccatagcaaccatgagtggcatggccaccaccacggtggtcactggaactcagtgtgactcctcagggttgaggtccagccctggctgaaggactgtgacaggcagcagagacttgggaca

SEQ ID NO: 143428 - DNA, 892 bp, Homo sapiens
  Payload ID: 8334
  Gene Symbol: ICAM2
  Gene Name: intercellular adhesion molecule 2
  ENST ID: ENST00000583684
  CDS Start-End: 148-309
tgaataagccgtgaactgggcagctgtgacacgcgcaccttgtcaccttgtcaccaatttcctgcccgggatcccagagctacccttcttggagcccacaggggcagcccttggctggtccctgcgagcccgtggagactgccagagatgtcctctttcggttacaggaccctgactgtggccctcttcaccctgatctgctgtccaggagtcaatgaattccaacgtcagcgtgtaccagcctccaaggcaggtcatcctgacactgcaacccactttggtggctgtgggcaagtccttcaccattgagtgcagggtgcccaccgtggagcccctggacagcctcaccctcttcctgttccgtggcaatgagactctgcactatgagaccttcgggaaggcagcccctgctccgcaggaggccacagccacattcaacagcacggctgacagagaggatggccaccgcaacttctcctgcctggctgtgctggacttgatgtctcgcggtggcaacatctttcacaaacactcagccccgaagatgttggagatctatgagcctgtgtcggacagccagatggtcatcatagtcacggtggtgtcggtgttgctgtccctgttcgtgacatctgtcctgctctgcttcatcttcggccagcacttgcgccagcagcggatgggcacctacggggtgcgagcggcttggaggaggctgccccaggccttccggccatagcaaccatgagtggcatggccaccaccacggtggtcactggaactcagtgtgactcctcagggttgaggtccagccctggctgaaggactgtgacaggcagcagagacttgggacattgccttttctagcccgaatacaaacacctggacttag

SEQ ID NO: 143429 - DNA, 1064 bp, Homo sapiens
  Payload ID: 8334
  Gene Symbol: ICAM2
  Gene Name: intercellular adhesion molecule 2
  ENST ID: ENST00000578379
  CDS Start-End: 387-911
tgaataagccgtgaactgggcagctgtgacacgcgcaccttgtcaccttgtcaccaatttcctgcccgggatcccagagctacccttcttggagcccacaggggaccctgactgtggccctcttcaccctgatctgctgtccaggatcggatgagaaggtattcgaggtacacgtgaggccaaagaagctggcggttgagcccaaagggtccctcgaggtcaactgcagcaccacctgtaaccagcctgaagtgggtggtctggagacctctctagataagattctgctggacgaacaggctcagtggaaacattacttggtctcaaacatctcccatgacacggtcctccaatgccacttcacctgctccgggaagcaggagtcaatgaattccaacgtcagcgtgtaccagcctccaaggcaggtcatcctgacactgcaacccactttggtggctgtgggcaagtccttcaccattgagtgcagggtgcccaccgtggagcccctggacagcctcaccctcttcctgttccgtggcaatgagactctgcactatgagaccttcgggaaggcagcccctgctccgcaggaggccacagccacattcaacagcacggctgacagagaggatggccaccgcaacttctcctgcctggctgtgctggacttgatgtctcgcggtggcaacatctttcacaaacactcagccccgaagatgttggagatctatgagcctgtgtcggacagccagatggtcatcatagtcacggtggtgtcggtgttgctgtccctgttcgtgacatctgtcctgctctgcttcatcttcggccagcacttgcgccagcagcggatgggcacctacggggtgcgagcggcttggaggaggctgccccaggccttccggccatagcaaccatgagtggcatggccaccaccacggtggtcactggaactcagtgtgactcctcagggttgaggtccagccctggctgaaggactgtgacaggcagcagagacttgggacattgccttttctagcccgaatacaaacacctggacttag

SEQ ID NO: 143430 - DNA, 718 bp, Homo sapiens
  Payload ID: 8334
  Gene Symbol: ICAM2
  Gene Name: intercellular adhesion molecule 2
  ENST ID: ENST00000584084
  CDS Start-End: 219-718
cttgtcaccaatttcctgcccgggatcccagagctacccttcttggagcccacaggggtaaggttgagcttctcactttccctccaatgaagcgtggcagcatgggaaggattttggcagtgtcgaggtctgagttttagtccgttcccctctctgggtctcagtttctcgctggcagcccttggctggtccctgcgagcccgtggagactgccagagatgtcctctttcggttacaggaccctgactgtggccctcttcaccctgatctgctgtccaggatcggatgagaaggtattcgaggtacacgtgaggccaaagaagctggcggttgagcccaaagggtccctcgaggtcaactgcagcaccacctgtaaccagcctgaagtgggtggtctggagacctctctagataagattctgctggacgaacaggctcagtggaaacattacttggtctcaaacatctcccatgacacggtcctccaatgccacttcacctgctccgggaagcaggagtcaatgaattccaacgtcagcgtgtaccagcctccaaggcaggtcatcctgacactgcaacccactttggtggctgtgggcaagtccttcaccattgagtgcagggtgcccaccgtggagcccctggacagcctcaccctcttcctgttccgtggcaatgagactctgcactatgagaccttcgggaaggcagcccctgc

SEQ ID NO: 143431 - DNA, 713 bp, Homo sapiens
  Payload ID: 8334
  Gene Symbol: ICAM2
  Gene Name: intercellular adhesion molecule 2
  ENST ID: ENST00000583366
  CDS Start-End: 70-713
cagagctacccttcttggagcccacagggcccttggctggtccctgcgagcccgtggagactgccagagatgtcctctttcggttacaggaccctgactgtggccctcttcaccctgatctgctgtccaggatcggatgagaaggtattcgaggtacacgtgaggccaaagaagctggcggttgagcccaaagggtccctcgaggtcaactgcagcaccacctgtaaccagcctgaagtgggtggtctggagacctctctagataagattctgctggacgaacaggctcagtggaaacattacttggtctcaaacatctcccatgacacggtcctccaatgccacttcacctgctccgggaagcaggagtcaatgaattccaacgtcagcgtgtaccagcctccaaggcaggtcatcctgacactgcaacccactttggtggctgtgggcaagtccttcaccattgagtgcagggtgcccaccgtggagcccctggacagcctcaccctcttcctgttccgtggcaatgagactctgcactatgagaccttcgggaaggcagcccctgctccgcaggaggccacagccacattcaacagcacggctgacagagaggatggccaccgcaacttctcctgcctggctgtgctggacttgatgtctcgcggtggcaacatctttcacaaacactcagccccgaagatgttggagat

SEQ ID NO: 143432 - DNA, 949 bp, Homo sapiens
  Payload ID: 8334
  Gene Symbol: ICAM2
  Gene Name: intercellular adhesion molecule 2
  ENST ID: ENST00000578313
  CDS Start-End: 301-949
cttgtcaccaatttcctgcccgggatcccagagctacccttcttggagcccacaggggtaaggttgagcttctcactttccctccaatgaagcgtggcagcatgggaaggattttggcagtgtcgaggtctgagttttagtccgttcccctctctgggtctcagtttctcgctggaataaagtgaaacacctcaggctccaaccctcccaacccaaggctccctcctggagggagagagaggatggaggacatcaggcagcccttggctggtccctgcgagcccgtggagactgccagagatgtcctctttcggttacaggaccctgactgtggccctcttcaccctgatctgctgtccaggatcggatgagaaggtattcgaggtacacgtgaggccaaagaagctggcggttgagcccaaagggtccctcgaggtcaactgcagcaccacctgtaaccagcctgaagtgggtggtctggagacctctctagataagattctgctggacgaacaggctcagtggaaacattacttggtctcaaacatctcccatgacacggtcctccaatgccacttcacctgctccgggaagcaggagtcaatgaattccaacgtcagcgtgtaccagcctccaaggcaggtcatcctgacactgcaacccactttggtggctgtgggcaagtccttcaccattgagtgcagggtgcccaccgtggagcccctggacagcctcaccctcttcctgttccgtggcaatgagactctgcactatgagaccttcgggaaggcagcccctgctccgcaggaggccacagccacattcaacagcacggctgacagagaggatggccaccgcaacttctcctgcctggctgtgctggacttgatgtctcgcggtggcaacatctttcacaaacactcagccccgaagatgttggagatctatg

SEQ ID NO: 143433 - DNA, 1056 bp, Homo sapiens
  Payload ID: 8334
  Gene Symbol: ICAM2
  Gene Name: intercellular adhesion molecule 2
  ENST ID: ENST00000578892
  CDS Start-End: 148-903
tgaataagccgtgaactgggcagctgtgacacgcgcaccttgtcaccttgtcaccaatttcctgcccgggatcccagagctacccttcttggagcccacaggggcagcccttggctggtccctgcgagcccgtggagactgccagagatgtcctctttcggttacaggaccctgactgtggccctcttcaccctgatctgctgtccaggatcggatgagaaggtattcgaggtacacgtgaggccaaagaagctggcgacctctctagataagattctgctggacgaacaggctcagtggaaacattacttggtctcaaacatctcccatgacacggtcctccaatgccacttcacctgctccgggaagcaggagtcaatgaattccaacgtcagcgtgtaccagcctccaaggcaggtcatcctgacactgcaacccactttggtggctgtgggcaagtccttcaccattgagtgcagggtgcccaccgtggagcccctggacagcctcaccctcttcctgttccgtggcaatgagactctgcactatgagaccttcgggaaggcagcccctgctccgcaggaggccacagccacattcaacagcacggctgacagagaggatggccaccgcaacttctcctgcctggctgtgctggacttgatgtctcgcggtggcaacatctttcacaaacactcagccccgaagatgttggagatctatgagcctgtgtcggacagccagatggtcatcatagtcacggtggtgtcggtgttgctgtccctgttcgtgacatctgtcctgctctgcttcatcttcggccagcacttgcgccagcagcggatgggcacctacggggtgcgagcggcttggaggaggctgccccaggccttccggccatagcaaccatgagtggcatggccaccaccacggtggtcactggaactcagtgtgactcctcagggttgaggtccagccctggctgaaggactgtgacaggcagcagagacttgggacattgccttttctagcccgaatacaaacacctggacttag

SEQ ID NO: 143434 - DNA, 1103 bp, Homo sapiens
  Payload ID: 8334
  Gene Symbol: ICAM2
  Gene Name: intercellular adhesion molecule 2
  Uniprot ID: P13598
  ENST ID: ENST00000579788
  CDS Start-End: 125-952
ctgtgacacgcgcaccttgtcaccttgtcaccaatttcctgcccgggatcccagagctacccttcttggagcccacaggggcagcccttggctggtccctgcgagcccgtggagactgccagagatgtcctctttcggttacaggaccctgactgtggccctcttcaccctgatctgctgtccaggatcggatgagaaggtattcgaggtacacgtgaggccaaagaagctggcggttgagcccaaagggtccctcgaggtcaactgcagcaccacctgtaaccagcctgaagtgggtggtctggagacctctctagataagattctgctggacgaacaggctcagtggaaacattacttggtctcaaacatctcccatgacacggtcctccaatgccacttcacctgctccgggaagcaggagtcaatgaattccaacgtcagcgtgtaccagcctccaaggcaggtcatcctgacactgcaacccactttggtggctgtgggcaagtccttcaccattgagtgcagggtgcccaccgtggagcccctggacagcctcaccctcttcctgttccgtggcaatgagactctgcactatgagaccttcgggaaggcagcccctgctccgcaggaggccacagccacattcaacagcacggctgacagagaggatggccaccgcaacttctcctgcctggctgtgctggacttgatgtctcgcggtggcaacatctttcacaaacactcagccccgaagatgttggagatctatgagcctgtgtcggacagccagatggtcatcatagtcacggtggtgtcggtgttgctgtccctgttcgtgacatctgtcctgctctgcttcatcttcggccagcacttgcgccagcagcggatgggcacctacggggtgcgagcggcttggaggaggctgccccaggccttccggccatagcaaccatgagtggcatggccaccaccacggtggtcactggaactcagtgtgactcctcagggttgaggtccagccctggctgaaggactgtgacaggcagcagagacttgggacattgccttttctagcccgaatacaaacacctggactt

SEQ ID NO: 143435 - DNA, 1934 bp, Homo sapiens
  Payload ID: 8335
  Gene Symbol: ICAM3
  Gene Name: intercellular adhesion molecule 3
  Uniprot ID: P32942
  ENST ID: ENST00000160262
  CDS Start-End: 210-1853
gcagtgctggccactttgcagagccccgtctgggtcccccaccctggcccccaagggccacagcatccccttccacccacaggcctgggcaaggtgcagtccccagacttctgcaatcttaaccgctgtgcttccgtcgcagtgggaggccccgccttttcccctgcctgcccttcgggcacctcaggaaggcaccttcctctgtcagaatggccaccatggtaccatccgtgttgtggcccagggcctgctggactctgctggtctgctgtctgctgaccccaggtgtccaggggcaggagttccttttgcgggtggagccccagaaccctgtgctctctgctggagggtccctgtttgtgaactgcagtactgattgtcccagctctgagaaaatcgccttggagacgtccctatcaaaggagctggtggccagtggcatgggctgggcagccttcaatctcagcaacgtgactggcaacagtcggatcctctgctcagtgtactgcaatggctctcagataacaggctcctctaacatcaccgtgtacaggctcccggagcgtgtggagctggcacccctgcctccttggcagccggtgggccagaacttcaccctgcgctgccaagtggaggatgggtcgccccggaccagcctcacggtggtgctgcttcgctgggaggaggagctgagccggcagcccgcagtggaggagccagcggaggtcactgccactgtgctggccagcagagacgaccacggagcccctttctcatgccgcacagaactggacatgcagccccaggggctgggactgttcgtgaacacctcagccccccgccagctccgaacctttgtcctgcccgtgacccccccgcgcctcgtggccccccggttcttggaggtggaaacgtcgtggccggtggactgcaccctagacgggctttttccagcctcagaggcccaggtctacctggcgctgggggaccagatgctgaatgcgacagtcatgaaccacggggacacgctaacggccacagccacagccacggcgcgcgcggatcaggagggtgcccgggagatcgtctgcaacgtgaccctagggggcgagagacgggaggcccgggagaacttgacggtctttagcttcctaggacccattgtgaacctcagcgagcccaccgcccatgaggggtccacagtgaccgtgagttgcatggctggggctcgagtccaggtcacgctggacggagttccggccgcggccccggggcagccagctcaacttcagctaaatgctaccgagagtgacgacggacgcagcttcttctgcagtgccactctcgaggtggacggcgagttcttgcacaggaacagtagcgtccagctgcgagtcctgtatggtcccaaaattgaccgagccacatgcccccagcacttgaaatggaaagataaaacgagacacgtcctgcagtgccaagccaggggcaacccgtaccccgagctgcggtgtttgaaggaaggctccagccgggaggtgccggtggggatcccgttcttcgtcaacgtaacacataatggtacttatcagtgccaagcgtccagctcacgaggcaaatacaccctggtcgtggtgatggacattgaggctgggagctcccactttgtccccgtcttcgtggcggtgttactgaccctgggcgtggtgactatcgtactggccttaatgtacgtcttcagggagcaccaacggagcggcagttaccatgttagggaggagagcacctatctgcccctcacgtctatgcagccgacagaagcaatgggggaagaaccgtccagagctgagtgacgctgggatccgggatcaaagttggcgggggcttggctgtgccctcagattccgcaccaataaagccttcaaactccctaa

SEQ ID NO: 143436 - DNA, 564 bp, Homo sapiens
  Payload ID: 8335
  Gene Symbol: ICAM3
  Gene Name: intercellular adhesion molecule 3
  ENST ID: ENST00000589249
  CDS Start-End: 443-564
ctcaggaaggcaccttcctctgtcagaatggccaccatggtaccatccgtgttgtggcccagggcctgctggactctgctggtctgctgtctgctgaccccaggatcacctgtccctttcacttgctaactcctacttagccttcagtttcgggctgcaatggtccccgcttccaggaagccttccctgactcacctcctcctatgctggatcagagcctcttctggcctccttctgagttctccccggtctctgatggattctacctttcccactggaccatgaaggtgtccaggggcaggagttccttttgcgggtggagccccagaaccctgtgctctctgctggagggtccctgtttgtgaactgcagtactgattgtcccagctctgagaaaatcgccttggagacgtccctatcaaaggagctggtggccagtggcatgggctgggcagccttcaatctcagcaacgtgactggcaacagtcggatcctctgctcagtgtactgcaatggctctcagataacaggctcctctaacatcaccgtgtacaggctcccgga

SEQ ID NO: 143437 - DNA, 1099 bp, Homo sapiens
  Payload ID: 8335
  Gene Symbol: ICAM3
  Gene Name: intercellular adhesion molecule 3
  ENST ID: ENST00000585439
  CDS Start-End: 11-190
ctctgtcagaatggccaccatggtaccatccgtgttgtggcccagggcctgctggactctgctggtctgctgtctgctgaccccagtactgattgtcccagctctgagaaaatcgccttggagacgtccctatcaaaggagctggtggccagtggcatgggctgggcagccttcaatctcagcaacgtgactggcaacagtcggatcctctgctcagtgtactgcaatggctctcagataacaggctcctctaacatcaccgtgtacaggctcccggagcgtgtggagctggcacccctgcctccttggcagccggtgggccagaacttcaccctgcgctgccaagtggaggatgggtcgccccggaccagcctcacggtggtgctgcttcgctgggaggaggagctgagccggcagcccgcagtggaggagccagcggaggtcactgccactgtgctggccagcagagacgaccacggagcccctttctcatgccgcacagaactggacatgcagccccaggggctgggactgttcgtgaacacctcagccccccgccagctccgaacctttggtgagagaaggggcttcagacggtgggtgacgagctgagccagggtagacggtgccctgaccttggggttcctgagagtggggtaccccggacctcacaggcttctgggaaggaaagcccccggccactgggcaaggtggccccggaagggaggcccgagccgtgggatctttgaagaaggccgttttcatggccctgtgtgtgtgtcctgtgaagaagggtgacccagtcagcaagatatcctgactgggggggatgagggtgtcctggggaaggcacagtcctgggggttgtactatgcccacctttctccccagtcctgcccgtgacccccccgcgcctcgtggccccccggttcttggaggtggaaacgtcgtggccggtggactgcaccctagacgggctttttccagcctcagaggcccaggtctacctggcgctgggggaccagatgctgaatgcgacagtcatgaaccacggggacacgctaacggccacagccacagccacggcgcgcgcggatca

SEQ ID NO: 143438 - DNA, 905 bp, Homo sapiens
  Payload ID: 8335
  Gene Symbol: ICAM3
  Gene Name: intercellular adhesion molecule 3
  ENST ID: ENST00000592439
  CDS Start-End: 1-905
gaccacggagcccctttctcatgccgcacagaactggacatgcagccccaggggctgggactgttcgtgaacacctcagccccccgccagctccgaacctttgtcctgcccgtgacccccccgcgcctcgtggccccccggttcttggaggtggaaacgtcgtggccggtggactgcaccctagacgggctttttccagcctcagaggcccaggtctacctggcgctgggggaccagatgctgaatgcgacagtcatgaaccacggggacacgctaacggccacagccacagccacggcgcgcgcggatcaggagggcttcctaggacccattgtgaacctcagcgagcccaccgcccatgaggggtccacagtgaccgtgagttgcatggctggggctcgagtccaggtcacgctggacggagttccggccgcggccccggggcagccagctcaacttcagctaaatgctaccgagagtgacgacggacgcagcttcttctgcagtgccactctcgaggtggacggcgagttcttgcacaggaacagtagcgtccagctgcgagtcctgtatggtcccaaaattgaccgagccacatgcccccagcacttgaaatggaaagataaaacgagacacgtcctgcagtgccaagccaggggcaacccgtaccccgagctgcggtgtttgaaggaaggctccagccgggaggtgccggtggggatcccgttcttcgtcaacgtaacacataatggtacttatcagtgccaagcgtccagctcacgaggcaaatacaccctggtcgtggtgatggacattgaggctgggagctcccactttgtccccgtcttcgtggcggtgttactgaccctgggcgtggtgactatcgtactggccttaatgtacgt

SEQ ID NO: 143439 - DNA, 584 bp, Homo sapiens
  Payload ID: 8335
  Gene Symbol: ICAM3
  Gene Name: intercellular adhesion molecule 3
  ENST ID: ENST00000590569
  CDS Start-End: 187-584
ctctgtcagaatggccaccatggtaccatccgtgttgtggcccagggcctgctggactctgctggtctgctgtctgctgaccccaggatcacctgtccctttcacttgctaactcctacttagccttcagtttcgggctgcaatggtccccgcttccaggaagccttccctgactcacctcctcctatgctggatcagagcctcttctggcctccttctgagttctccccggtctctgatggattctacctttcccactggaccatgaaggcaggaacccttctgtctcggcacaaggagagaggtgttaaatgtactgattgtcccagctctgagaaaatcgccttggagacgtccctatcaaaggagctggtggccagtggcatgggctgggcagccttcaatctcagcaacgtgactggcaacagtcggatcctctgctcagtgtactgcaatggctctcagataacaggctcctctaacatcaccgtgtacaggctcccggagcgtgtggagctggcacccctgcctccttggcagccggtgggccagaacttcaccctgcgctgccaagtggaggatgg

SEQ ID NO: 143440 - DNA, 658 bp, Homo sapiens
  Payload ID: 8335
  Gene Symbol: ICAM3
  Gene Name: intercellular adhesion molecule 3
  ENST ID: ENST00000592945
  CDS Start-End: 1-579
accgtgagttgcatggctggggctcgagtccaggtcacgctggacggagttccggccgcggccccggggcagccagctcaacttcagctaaatgctaccgagagtgacgacggacgcagcttcttctgcagtgccactctcgaggtggacggcgagttcttgcacaggaacagtagcgtccagctgcgagtcctgtatggtcccaaaattgaccgagccacatgcccccagcacttgaaatggaaagataaaacgagacacgtcctgcagtgccaagccaggggcaacccgtaccccgagctgcggtgtttgaaggaaggctccagccgggaggtgccggtggggatcccgttcttcgtcaacgtaacacataatgctgggagctcccactttgtccccgtcttcgtggcggtgttactgaccctgggcgtggtgactatcgtactggccttaatgtacgtcttcagggagcaccaacggagcggcagttaccatgttagggaggagagcacctatctgcccctcacgtctatgcagccgacagaagcaatgggggaagaaccgtccagagctgagtgacgctgggatccgggatcaaagttggcgggggcttggctgtgccctcagattccgcaccaataaagccttcaaactccct

SEQ ID NO: 143441 - DNA, 582 bp, Homo sapiens
  Payload ID: 8335
  Gene Symbol: ICAM3
  Gene Name: intercellular adhesion molecule 3
  ENST ID: ENST00000589580
  CDS Start-End: 513-582
aaggcaccttcctctgtcagaatggccaccatggtaccatccgtgttgtggcccagggcctgctggactctgctggtctgctgtctgctgaccccagccttcagtttcgggctgcaatggtccccgcttccaggaagccttccctgactcacctcctcctatgctggatcagagcctcttctggcctccttctgagttctccccggtctctgatggattctacctttcccactggaccatgaaggcaggaacccttctgtctcggcacaaggagagaggtgttaaatggtggggcctgttgatgcgtgggttgggggacaaggaaacaaacaccaggacttcttcatgttcctgaaggtgtccaggggcaggagttccttttgcgggtggagccccagaaccctgtgctctctgctggagggtccctgtttgtgaactgcagtactgattgtcccagctctgagaaaatcgccttggagacgtccctatcaaaggagctggtggccagtggcatgggctgggcagccttcaatctcagcaacgtgactggcaacagtcggatcctctgctcagtgtactgca

SEQ ID NO: 143442 - DNA, 2024 bp, Homo sapiens
  Payload ID: 8335
  Gene Symbol: ICAM3
  Gene Name: intercellular adhesion molecule 3
  ENST ID: ENST00000589261
  CDS Start-End: 534-1946
tcagaatggccaccatggtaccatccgtgttgtggcccagggcctgctggactctgctggtctgctgtctgctgaccccaggatcacctgtccctttcacttgctaactcctacttagccttcagtttcgggctgcaatggtccccgcttccaggaagccttccctgactcacctcctcctatgctggatcagagcctcttctggcctccttctgagttctccccggtctctgatggattctacctttcccactggaccatgaaggcaggaacccttctgtctcggcacaaggagagaggtgttaaatggtggggcctgttgatgcgtgggttgggggacaaggaaacaaacaccaggacttcttcatgttcctgaaggtgtccaggggcaggagttccttttgcgggtggagccccagaaccctgtgctctctgctggagggtccctgtttgtgaactgcagtactgattgtcccagctctgagaaaatcgccttggagacgtccctatcaaaggagctggtggccagtggcatgggctgggcagccttcaatctcagcaacgtgactggcaacagtcggatcctctgctcagtgtactgcaatggctctcagataacaggctcctctaacatcaccgtgtacaggctcccggagcgtgtggagctggcacccctgcctccttggcagccggtgggccagaacttcaccctgcgctgccaagtggaggatgggtcgccccggaccagcctcacggtggtgctgcttcgctgggaggaggagctgagccggcagcccgcagtggaggagccagcggaggtcactgccactgtgctggccagcagagacgaccacggagcccctttctcatgccgcacagaactggacatgcagccccaggggctgggactgttcgtgaacacctcagccccccgccagctccgaacctttgtcctgcccgtgacccccccgcgcctcgtggccccccggttcttggaggtggaaacgtcgtggccggtggactgcaccctagacgggctttttccagcctcagaggcccaggtctacctggcgctgggggaccagatgctgaatgcgacagtcatgaaccacggggacacgctaacggccacagccacagccacggcgcgcgcggatcaggagggtgcccgggagatcgtctgcaacgtgaccctagggggcgagagacgggaggcccgggagaacttgacggtctttagcttcctaggacccattgtgaacctcagcgagcccaccgcccatgaggggtccacagtgaccgtgagttgcatggctggggctcgagtccaggtcacgctggacggagttccggccgcggccccggggcagccagctcaacttcagctaaatgctaccgagagtgacgacggacgcagcttcttctgcagtgccactctcgaggtggacggcgagttcttgcacaggaacagtagcgtccagctgcgagtcctgtatggtcccaaaattgaccgagccacatgcccccagcacttgaaatggaaagataaaacgagacacgtcctgcagtgccaagccaggggcaacccgtaccccgagctgcggtgtttgaaggaaggctccagccgggaggtgccggtggggatcccgttcttcgtcaacgtaacacataatggtacttatcagtgccaagcgtccagctcacgaggcaaatacaccctggtcgtggtgatggacattgaggctgggagctcccactttgtccccgtcttcgtggcggtgttactgaccctgggcgtggtgactatcgtactggccttaatgtacgtcttcagggagcaccaacggagcggcagttaccatgttagggaggagagcacctatctgcccctcacgtctatgcagccgacagaagcaatgggggaagaaccgtccagagctgagtgacgctgggatccgggatcaaagttggcgggggcttggctgtgccctcagattccgcaccaataaagccttcaaactccc

SEQ ID NO: 143443 - DNA, 1176 bp, Homo sapiens
  Payload ID: 8336
  Gene Symbol: ICAM4
  Gene Name: intercellular adhesion molecule 4 (Landsteiner-Wiener blood group)
  Uniprot ID: Q14773
  ENST ID: ENST00000340992
  CDS Start-End: 40-858
gctctctggcgcggggccccttagtccgggctttttgccatggggtctctgttccctctgtcgctgctgttttttttggcggccgcctacccgggagttgggagcgcgctgggacgccggactaagcgggcgcaaagccccaagggtagccctctcgcgccctccgggacctcagtgcccttctgggtgcgcatgagcccggagttcgtggctgtgcagccggggaagtcagtgcagctcaattgcagcaacagctgtccccagccgcagaattccagcctccgcaccccgctgcggcaaggcaagacgctcagagggccgggttgggtgtcttaccagctgctcgacgtgagggcctggagctccctcgcgcactgcctcgtgacctgcgcaggaaaaacacgctgggccacctccaggatcaccgcctacagtgttcccggtgggctacttggtggtgaccctgaggcatggaagccgggtcatctattccgaaagcctggagcgcttcaccggcctggatctggccaacgtgaccttgacctacgagtttgctgctggaccccgcgacttctggcagcccgtgatctgccacgcgcgcctcaatctcgacggcctggtggtccgcaacagctcggcacccattacactgatgctcgcttggagccccgcgcccacagctttggcctccggttccatcgctgcccttgtagggatcctcctcactgtgggcgctgcgtacctatgcaagtgcctagctatgaagtcccaggcgtaaagggggatgttctatgccggctgagcgagaaaaagaggaatatgaaacaatctggggaaatggccatacatggtggctgacgcctgtaatcccagcactttgggaggccgaggcaggagaatcgcttgagcccaggagttcgagaccagcctggacaacatagtgagaccccgtctatgcaaaaaatacacaaattagcctggtgtggtggcccgcacctgtggtcccagctacccgggaggctgagttgggaggatcctttgagccctgaaagtcgaggttgcagtgagccttgatcgtgccactgcactccagcctgggggacagagcacgaccctgtctccaaaaataaaataaaaataaaaataaatattggcgggggaaccctctggaatcaa

SEQ ID NO: 143444 - DNA, 1211 bp, Homo sapiens
  Payload ID: 8336
  Gene Symbol: ICAM4
  Gene Name: intercellular adhesion molecule 4 (Landsteiner-Wiener blood group)
  Uniprot ID: Q14773
  ENST ID: ENST00000380770
  CDS Start-End: 47-862
ggccctggctctctggcgcggggccccttagtccgggctttttgccatggggtctctgttccctctgtcgctgctgttttttttggcggccgcctacccgggagttgggagcgcgctgggacgccggactaagcgggcgcaaagccccaagggtagccctctcgcgccctccgggacctcagtgcccttctgggtgcgcatgagcccggagttcgtggctgtgcagccggggaagtcagtgcagctcaattgcagcaacagctgtccccagccgcagaattccagcctccgcaccccgctgcggcaaggcaagacgctcagagggccgggttgggtgtcttaccagctgctcgacgtgagggcctggagctccctcgcgcactgcctcgtgacctgcgcaggaaaaacacgctgggccacctccaggatcaccgcctacaaaccgccccacagcgtgattttggagcctccggtcttaaagggcaggaaatacactttgcgctgccacgtgacgcaggtgttcccggtgggctacttggtggtgaccctgaggcatggaagccgggtcatctattccgaaagcctggagcgcttcaccggcctggatctggccaacgtgaccttgacctacgagtttgctgctggaccccgcgacttctggcagcccgtgatctgccacgcgcgcctcaatctcgacggcctggtggtccgcaacagctcggcacccattacactgatgctcgcttggagccccgcgcccacagctttggcctccggttccatcgctgcccttgtagggatcctcctcactgtgggcgctgcgtacctatgcaagtgcctagctatgaagtcccaggcgtaaagggggatgttctatgccggctgagcgagaaaaagaggaatatgaaacaatctggggaaatggccatacatggtggctgacgcctgtaatcccagcactttgggaggccgaggcaggagaatcgcttgagcccaggagttcgagaccagcctggacaacatagtgagaccccgtctatgcaaaaaatacacaaattagcctggtgtggtggcccgcacctgtggtcccagctacccgggaggctgagttgggaggatcctttgagccctgaaagtcgaggttgcagtgagccttgatcgtgccactgcactccagcctgggggacagagcacgaccctgtctccaaaaa

SEQ ID NO: 143445 - DNA, 1390 bp, Homo sapiens
  Payload ID: 8336
  Gene Symbol: ICAM4
  Gene Name: intercellular adhesion molecule 4 (Landsteiner-Wiener blood group)
  Uniprot ID: Q14773
  ENST ID: ENST00000393717
  CDS Start-End: 10-723
ctttttgccatggggtctctgttccctctgtcgctgctgttttttttggcggccgcctacccgggagttgggagcgcgctgggacgccggactaagcgggcgcaaagccccaagggtagccctctcgcgccctccgggacctcagtgcccttctgggtgcgcatgagcccggagttcgtggctgtgcagccggggaagtcagtgcagctcaattgcagcaacagctgtccccagccgcagaattccagcctccgcaccccgctgcggcaaggcaagacgctcagagggccgggttgggtgtcttaccagctgctcgacgtgagggcctggagctccctcgcgcactgcctcgtgacctgcgcaggaaaaacacgctgggccacctccaggatcaccgcctacaaaccgccccacagcgtgattttggagcctccggtcttaaagggcaggaaatacactttgcgctgccacgtgacgcaggtgttcccggtgggctacttggtggtgaccctgaggcatggaagccgggtcatctattccgaaagcctggagcgcttcaccggcctggatctggccaacgtgaccttgacctacgagtttgctgctggaccccgcgacttctggcagcccgtgatctgccacgcgcgcctcaatctcgacggcctggtggtccgcaacagctcggcacccattacactgatgctcggtgaggcacccctgtaaccctggggactaggaggaagggggcagagagagttatgaccccgagagggcgcacagaccaagcgtgagctccacgcgggtcgacagacctccctgtgttccgttcctaattctcgccttctgctcccagcttggagccccgcgcccacagctttggcctccggttccatcgctgcccttgtagggatcctcctcactgtgggcgctgcgtacctatgcaagtgcctagctatgaagtcccaggcgtaaagggggatgttctatgccggctgagcgagaaaaagaggaatatgaaacaatctggggaaatggccatacatggtggctgacgcctgtaatcccagcactttgggaggccgaggcaggagaatcgcttgagcccaggagttcgagaccagcctggacaacatagtgagaccccgtctatgcaaaaaatacacaaattagcctggtgtggtggcccgcacctgtggtcccagctacccgggaggctgagttgggaggatcctttgagccctgaaagtcgaggttgcagtgagccttgatcgtgccactgcactccagcctgggggacagagcacgaccctgtctccaaaaataaaataaaaataaaaataaatattggcgggggaaccctctggaatcaataaaggcttccttaaccagc

SEQ ID NO: 143446 - DNA, 3000 bp, Homo sapiens
  Payload ID: 8337
  Gene Symbol: ICAM5
  Gene Name: intercellular adhesion molecule 5, telencephalin
  Uniprot ID: Q9UMF0
  ENST ID: ENST00000221980
  CDS Start-End: 64-2838
gtcctctagcccagctcctcggctcgcgctctcctcgcctcctgtgctttccccgccgcggcgatgccagggccttcgccagggctgcgccgggcgctactcggcctctgggctgctctgggcctggggctcttcggcctctcagcggtctcgcaggagcccttctgggcggacctgcagcctcgcgtggcgttcgtggagcgcgggggctcgctgtggctgaattgcagcaccaactgccctcggccggagcgcggtggcctggagacctcgctgcgccgaaacgggacccagaggggtttgcgttggttggcgcggcagctggtggacattcgcgagccggagactcagcccgtctgcttcttccgctgcgcgcggcgcacactacaggcgcgtgggctcattcgcactttccagcgaccagatcgcgtagagctgatgccgctgcctccctggcagccggtgggcgagaacttcaccctgagctgtagggtccccggcgccgggccccgtgcgagcctcacgctgaccctgctgcggggcgcccaggagctgatccgccgcagcttcgccggtgaaccaccccgagcgcggggcgcggtgctcacagccacggtactggctcggagggaggaccatggagccaatttctcgtgtcgcgccgagctggacctgcggccgcacggactgggactgtttgaaaacagctcggcccccagagagctccgaaccttctccctgtctccggatgccccgcgcctcgctgctccccggctcttggaagttggctcggaaaggcccgtgagctgcactctggacggactgtttccagcctcagaggccagggtctacctcgcactgggggaccagaatctgagtcctgatgtcaccctcgaaggggacgcattcgtggccactgccacagccacagctagcgcagagcaggagggtgccaggcagctggtctgcaacgtcaccctggggggcgaaaaccgggagacccgggagaacgtgaccatctacagcttcccggcaccactcctgaccctgagcgaacccagcgtctccgaggggcagatggtgacagtaacctgcgcagctggggcccaagctctggtcacactggagggagttccagccgcggtcccggggcagcccgcccagcttcagctaaatgccaccgagaacgacgacagacgcagcttcttctgcgacgccaccctcgatgtggacggggagaccctgatcaagaacaggagcgcagagcttcgtgtcctatacgctccccggctagacgattcggactgccccaggagttggacgtggcccgagggcccagagcagacgctgcgctgcgaggcccgcgggaacccagaaccctcagtgcactgtgcgcgctccgacggcggggccgtgctggctctgggcctgctgggtccagtcactcgggcgctctcaggcacttaccgctgcaaggcggccaatgatcaaggcgaggcggtcaaggacgtaacgctaacggtggagtacgcaccagcgctggacagcgtgggctgcccagaacgcattacttggctggagggaacagaagcctcgctgagctgtgtggcgcacggggtaccgccgcctgatgtgatctgcgtgcgctctggagaactcggggccgtcatcgaggggctgttgcgtgtggcccgggagcatgcgggcacttaccgctgcgaagccaccaaccctcggggctctgcggccaaaaatgtggccgtcacggtggaatatggccccaggtttgaggagccgagctgccccagcaattggacatgggtggaaggatctgggcgcctgttttcctgtgaggtcgatgggaagccacagccaagcgtgaagtgcgtgggctccgggggcgccactgagggggtgctgctgccgctggcacccccagaccctagtcccagagctcccagaatccctagagtcctggcacccggtatctacgtctgcaacgccaccaaccgccacggctccgtggccaaaacagtcgtcgtgagcgcggagtcgccaccggagatggatgaatctacctgcccaagtcaccagacgtggctggaaggggctgaggcttccgcgctggcctgcgccgcccggggtcgcccttccccaggagtgcgctgctctcgggaaggcatcccatggcctgagcagcagcgcgtgtcccgagaggacgcgggcacttaccactgtgtggccaccaatgcgcatggcacggactcccggaccgtcactgtgggcgtggaataccggccagtggtggccgaacttgctgcctcgccccctggaggcgtgcgcccaggaggaaacttcacgttgacctgccgcgcggaggcctggcctccagcccagatcagctggcgcgcgcccccgggggccctcaacatcggcctgtcgagcaacaacagcacactgagcgtggcaggcgccatgggaagccacggcggcgagtacgagtgcgcagccaccaacgcgcacgggcgccacgcgcggcgcatcacggtgcgcgtggccggtccgtggctatgggtcgccgtgggcggcgcggcggggggcgcggcgctgctggccgcgggggccggcctggccttctacgtgcagtccaccgcctgcaagaagggcgagtacaacgtgcaggaggccgagagctcaggcgaggccgtgtgtctgaacggagcgggcggcggcgctggcggggcggcaggcgcggagggcggacccgaggcggcggggggcgcggccgagtcgccggcggagggcgaggtcttcgccatacagctgacatcggcgtgagcccgctcccctctccccgcgggccgggggacgccccccagactcacacgggggcttatttattgctttatttatttacttattcatttatttatgtattcaactccaagggcgtcacccccattttctacccatcccctcaataaagtttttataaaggaa

SEQ ID NO: 143447 - DNA, 624 bp, Homo sapiens
  Payload ID: 8337
  Gene Symbol: ICAM5
  Gene Name: intercellular adhesion molecule 5, telencephalin
  ENST ID: ENST00000587398
  CDS Start-End: 389-624
tcctccccgccctctgagaacccttgactcgacataggggcgctaagatgtcagggagttggctccccaggctcagcccgcgtttccctgggcagcggtctcgcaggagcccttctgggcggacctgcagcctcgcgtggcgttcgtggagcgcgggggctcgctgtggctgaattgcagcaccaactgccctcggccggagcgcggtggcctggagacctcgctgcgccgaaacgggacccagaggggtttgcgttggttggcgcggcagctggtggacattcgcgagccggagactcagcccgtctgcttcttccgctgcgcgcggcgcacactacaggcgcgtgggctcattcgcactttccagcgaccagatcgcgtagagctgatgccgctgcctccctggcagccggtgggcgagaacttcaccctgagctgtagggtccccggcgccgggccccgtgcgagcctcacgctgaccctgctgcggggcgcccaggagctgatccgccgcagcttcgccggtgaaccaccccgagcgcggggcgcggtgctcacagccacggtactggctcggagggaggaccatggagccaatttctcgtgtcgcgccgagctggacct

SEQ ID NO: 143448 - DNA, 6139 bp, Homo sapiens
  Payload ID: 8338
  Gene Symbol: IFNAR1
  Gene Name: interferon (alpha, beta and omega) receptor 1
  Uniprot ID: P17181
  ENST ID: ENST00000270139
  CDS Start-End: 153-1826
agaagaggcggcgcgtgcgtagaggggcggtgagagctaagaggggcagcgcgtgtgcagaggggcggtgtgacttaggacggggcgatggcggctgagaggagctgcgcgtgcgcgaacatgtaactggtgggatctgcggcggctcccagatgatggtcgtcctcctgggcgcgacgaccctagtgctcgtcgccgtggcgccatgggtgttgtccgcagccgcaggtggaaaaaatctaaaatctcctcaaaaagtagaggtcgacatcatagatgacaactttatcctgaggtggaacaggagcgatgagtctgtcgggaatgtgactttttcattcgattatcaaaaaactgggatggataattggataaaattgtctgggtgtcagaatattactagtaccaaatgcaacttttcttcactcaagctgaatgtttatgaagaaattaaattgcgtataagagcagaaaaagaaaacacttcttcatggtatgaggttgactcatttacaccatttcgcaaagctcagattggtcctccagaagtacatttagaagctgaagataaggcaatagtgatacacatctctcctggaacaaaagatagtgttatgtgggctttggatggtttaagctttacatatagcttagttatctggaaaaactcttcaggtgtagaagaaaggattgaaaatatttattccagacataaaatttataaactctcaccagagactacttattgtctaaaagttaaagcagcactacttacgtcatggaaaattggtgtctatagtccagtacattgtataaagaccacagttgaaaatgaactacctccaccagaaaatatagaagtcagtgtccaaaatcagaactatgttcttaaatgggattatacatatgcaaacatgacctttcaagttcagtggctccacgcctttttaaaaaggaatcctggaaaccatttgtataaatggaaacaaatacctgactgtgaaaatgtcaaaactacccagtgtgtctttcctcaaaacgttttccaaaaaggaatttaccttctccgcgtacaagcatctgatggaaataacacatctttttggtctgaagagataaagtttgatactgaaatacaagctttcctacttcctccagtctttaacattagatcccttagtgattcattccatatctatatcggtgctccaaaacagtctggaaacacgcctgtgatccaggattatccactgatttatgaaattattttttgggaaaacacttcaaatgctgagagaaaaattatcgagaaaaaaactgatgttacagttcctaatttgaaaccactgactgtatattgtgtgaaagccagagcacacaccatggatgaaaagctgaataaaagcagtgtttttagtgacgctgtatgtgagaaaacaaaaccaggaaatacctctaaaatttggcttatagttggaatttgtattgcattatttgctctcccgtttgtcatttatgctgcgaaagtcttcttgagatgcatcaattatgtcttctttccatcacttaaaccttcttccagtatagatgagtatttctctgaacagccattgaagaatcttctgctttcaacttctgaggaacaaatcgaaaaatgtttcataattgaaaatataagcacaattgctacagtagaagaaactaatcaaactgatgaagatcataaaaaatacagttcccaaactagccaagattcaggaaattattctaatgaagatgaaagcgaaagtaaaacaagtgaagaactacagcaggactttgtatgaccagaaatgaactgtgtcaagtataaggtttttcagcaggagttacactgggagcctgaggtcctcaccttcctctcagtaactacagagaggacgtttccctgtttagggaaagaaaaaacatcttcagatcataggtcctaaaaatacgggcaagctcttaactatttaaaaatgaaattacaggcccgggcacggtggctcacacctgtaatcccagcactttgggaggctgaggcaggcagatcatgaggtcaagagatcgagaccagcctggccaacgtggtgaaaccccatctctactaaaaatacaaaaattagccgggtgtggtggcgcgcgcctgttgtcttagctactcaggaggctgaggcaggagaatcgcttgaaaacaggaggtggaggttgcagtgagccgagatcacgccactgcactccagcctggtgacagcgtgagactctttaaaaaaagaaattaaaagagttgagacaaacgtttcctacattcttttccatgtgtaaaatcatgaaaaagcctgtcaccggacttgcattggatgagatgagtcagaccaaaacagtggccacccgtcttcctcctgtgagcctaagtgcagccgtgctagctgcgcaccgtggctaaggatgacgtctgtgttcctgtccatcactgatgctgctggctactgcatgtgccacacctgtctgttcgccattcctaacattctgtttcattcttcctcgggagatatttcaaacatttggtcttttcttttaacactgagggtaggcccttaggaaatttatttaggaaagtctgaacacgttatcacttggttttctggaaagtagcttaccctagaaaacagctgcaaatgccagaaagatgatccctaaaaatgttgagggacttctgttcattcatcccgagaacattggcttccacatcacagtatctacccttacatggtttaggattaaagccaggcaatcttttactatgcattaagacctctgattcaaaacttattagaacagtagcttctgctggaatttgcaatcactgaagtcatagaaaataggtaactatctaattagagaaataattgttgtattttaagatctgagagtgtgtacaagttttagtatacatgccatgccagaagatagtgtatgcaagaagtcttgggaccagaaaatggcaatgataggagactgacatagaagaagaatgcttccctaggaaaaaggtcgctggctttggtgcaagaggaagaagaatgttccactggaagcctgagcacctaatcagctctcagtgatcaacccactcttgttatgggtggtctctgtcactttgaatgccaggctggcttctcgtctagcagtattcagataccccttctgctcagcctgcttggcgttaaaatacaaatcattgaactgagggggaaaaatgtaactaggaagaaaaacccaatttaagaaattacataatgctttccaaaggcacctacaacttagttttaaattacttgctactggggattacccatggatatccttaataggcaggaagtctgggaattctggtggcctctagggcagtgttctcacagcaccgttccgacagggaccagtgaaagaaaagagacaaagttagaacgtgctggggagcggccatttctaaggccagtctggtttaagtagtcatttctgctgaaaaaacagatgatcctggtggaagaaaaggttgaaggcagctgccctcgggagggctgtgatgctcggcacatcctgcctggcacatacacgtgtctgcaggccacaccgtgcatgtccccagacctgccgcctggcttctggagtgcttcaagcagagcatggtgggtcattgaggagacccaggaatctcatctgagaacccactctctgccggagaaccccatggtgacacattttcatctttctgaccagaggctgtttttttttttttttgagacagtctcattctgttgcccaggctggagtgcagtggcttgatctcggctcactgcaacctcgcctcccgggttcaagcaattctctgccgcagcctccagagtagctgggataacaggtgcccaccaccacaccccactaatttttgtatttgtatttttagtagagatggggtttcaccatgttggtcaggctggtcttggactcctgacctcatgctccacccgcttcggcctcccaaagttctgggattacaggtgtgagccaccgtgcacggccggcctgacctttggaaaagccttgtcactttggacgtttgcgtctttgaagaggcgatgggagcatatcatgactgcctgccaccattgcttttcagactaccacaactcaatcatgctgtccaggacttctggccctgtgttcaccactgggaaaacgtacttcagactggatagcctaaaaaggagcaatgcccttgtaggatgtggagaagggaaaatacggacattaacattaaaagacaccagtgaaattgttaggtctctaggaagttggagcacaaggcttcacgctttaagaccatctgtggttttcagtgaacaagcgctgagcaccagcagcagaaaacaacaacaaaaaaacacctcgtttttaccttgtcttctagacatgaaaaggcagttgcattccactctgcattatgttctacatgttgctttatcagtatatgcttagctgtaagtgacaagtattttttctgaacagaagtttacttagaaataccatgcacttgggggtaccaattaaccgcctgaaaattagcatattgatagttcttagagagaccagatataatctaagaatttatatgaaagatttgtatcattagagccagaaataattttatattaatatataatacagattaacattatatataatatgtacctgtgtcacttctgacatgagcctgtaaacatatattcatatatgtacctgcacatgtacccacctgatgtaggtcttattcctttagtatggacttaaagtacttattcatataccttgtaactaaaaattagaacagctccctagaattgtgaacttttaagagtctgactagaaatttgcaacttataaaaaagttacttttaaaaatataagttagggctaggcacagtggctcatgcctataatctcagcacttttgggaggccaagacaggaggatcacttcaggccaggagttcaagatcaaccaacctgggtaacatggccagaccccatctctatttatatatatatatataaaacttagagtttttatcttcccctaaaagaggccgtgatatttgcagcagcctcaaattgctcttaaggggtttaggtgtgcagaagctttcctttccctacccagtaaccatgtgactactaacgtggtatattgatttattttgtttgctgtctgtctcccctgccccactgctggaacagaggctccaagaaaacagggaccttattattcattactgcatccccagtaatgaaagtacttagaaaataattattgaatgaatgaaatctaaactgtgaacctgagggtgtttgtggcagtgtttgttttactgaattgtagaaggacataaccgtgttttcagtgtttctatggaacaaacttgtacattttatttcacttgtgttttgtcttaaaccctactgctggaaacaattttatgtaataagcaatgggcccaaaagtctaggagtttttttgtacttagtgaatttgtatgcaacagagatgctgcagctgatgcctttaaaaggtattcatcatggaagagctgaggcctgtgcttggtgttccagagcccagggttgagcatcctgaaggagccactgcagccgtcactgtccccagagcctgtggagatagagcctgtttgctgctttttcttcccgctcttaagacatggctggagctcagtcttcattgaatgaagtttgctgtggtattgcatagccttgctttcttgaactaaactgtttgcccttcacaagtagttcttctttcaggattagttcgttccaaggaggctcttcagtctcacagataagtagatctctcctgctgtctggacacatttcactcggaaattgaatacaatttgtattcaggctgggaacctgaacacacacttgtgtttttaagcttcccttttttacagtggacaaggacacaaataataaataaatcatccctaatgcccaagaaatgccctggtacttagtaataacaaaataccagtaacttc

SEQ ID NO: 143449 - DNA, 491 bp, Homo sapiens
  Payload ID: 8338
  Gene Symbol: IFNAR1
  Gene Name: interferon (alpha, beta and omega) receptor 1
  ENST ID: ENST00000442071
  CDS Start-End: 84-491
gtgacttaggacggggcgatggcggctgagaggagctgcgcgtgcgcgaacatgtaactggtgggatctgcggcggctcccagatgatggtcgtcctcctgggcgcgacgaccctagtgctcgtcgccgtggcgccatgggtgttgtccgcagccgcaggtggaaaaaatctaaaatctcctcaaaaagtagaggtcgacatcatagatgacaactttatcctgaggtggaacaggagcgatgagtctgtcgggaatgtgactttttcattcgattatcaaaaaactgggatggataattggataaaattgtctgggtgtcagaatattactagtaccaaatgcaacttttcttcactcaagctgaatgtttatgaagaaattaaattgcgtataagagcagaaaaagaaaacacttcttcatggtatgaggttgactcatttacaccatttcgcaaagttgaaaatgaactacctccaccagaaaatata

SEQ ID NO: 143450 - DNA, 2606 bp, Homo sapiens
  Payload ID: 8339
  Gene Symbol: IFNAR2
  Gene Name: interferon (alpha, beta and omega) receptor 2
  Uniprot ID: P48551
  ENST ID: ENST00000342101
  CDS Start-End: 165-884
cgagcgtcgggtcccagagccgggcgcggctggggcccgaggctagcatctctcgggagccgcaaggcgagagctgcaaagtttaattagacacttcagaattttgatcacctaatgttgatttcagatgtaaaagtcaagagaagactctaaaaatagcaaagatgcttttgagccagaatgccttcatcttcagatcacttaatttggttctcatggtgtatatcagcctcgtgtttggtatttcatatgattcgcctgattacacagatgaatcttgcactttcaagatatcattgcgaaatttccggtccatcttatcatgggaattaaaaaaccactccattgtaccaactcactatacattgctgtatacaatcatgagtaaaccagaagatttgaaggtggttaagaactgtgcaaataccacaagatcattttgtgacctcacagatgagtggagaagcacacacgaggcctatgtcaccgtcctagaaggattcagcgggaacacaacgttgttcagttgctcacacaatttctggctggccatagacatgtcttttgaaccaccagagtttgagattgttggttttaccaaccacattaatgtgatggtgaaatttccatctattgttgaggaagaattacagtttgatttatctctcgtcattgaagaacagtcagagggaattgttaagaagcataaacccgaaataaaaggaaacatgagtggaaatttcacctatatcattgacaagttaattccaaacacgaactactgtgtatctgtttatttagagcacagtgatgagcaagcagtaataaagtctcccttaaaatgcaccctccttccacctggccaggaatcagaattttcataactttttagcctggccatttcctaacctgccaccgttggaagccatggatatggtggaggtcatttacatcaacagaaagaagaaagtgtgggattataattatgatgatgaaagtgatagcgatactgaggcagcgcccaggacaagtggcggtggctataccatgcatggactgactgtcaggcctctgggtcaggcctctgccacctctacagaatcccagttgatagacccggagtccgaggaggagcctgacctgcctgaggttgatgtggagctccccacgatgccaaaggacagccctcagcagttggaactcttgagtgggccctgtgagaggagaaagagtccactccaggacccttttcccgaagaggactacagctccacggaggggtctgggggcagaattaccttcaatgtggacttaaactctgtgtttttgagagttcttgatgacgaggacagtgacgacttagaagcccctctgatgctatcgtctcatctggaagagatggttgacccagaggatcctgataatgtgcaatcaaaccatttgctggccagcggggaagggacacagccaacctttcccagcccctcttcagagggcctgtggtccgaagatgctccatctgatcaaagtgacacttctgagtcagatgttgaccttggggatggttatataatgagatgactccaaaactattgaatgaacttggacagacaagcacctacagggttctttgtctctgcatcctaacttgctgccttatcgtctgcaagtgttctccaagggaaggaggaggaaactgtggtgttcctttcttccaggtgacatcacctatgcacattcccagtatggggaccatagtatcattcagtgcattgtttacatattcaaagtggtgcactttgaaggaagcacatgtgcacctttcctttacactaatgcacttaggatgtttctgcatcatgtctaccagggagcagggttccccacagtttcagaggtggtccaggaccctatgatatttctcttctttcgttcttttttttttttttttttgagacagagtctcgttctgtcgcccaagctggagcgcaatggtgtgatcttggctcactgcaacatccgcctcccaggttcaagtgattctcctgcctcagcctccctcgcaagtagctgggattacaggcgcctgccaccatgcctagcaaatttttgtatttttagtagagacaggattttaccatgttggccaggctggtctcaaactcctgacctcaagtgatctgccctcctcagcctcgtaaagtgctgggattacaggggtgagccgctgtgcctggctggccctgtgatatttctgtgaaataaattgggccagggtgggagcagggaaagaaaaggaaaatagtagcaagagctgcaaagcaggcaggaagggaggaggagagccaggtgagcagtggagagaaggggggccctgcacaaggaaacagggaagagccatcgaagtttcagtcggtgagccttgggcacctcacccatgtcacatcctgtctcctgcaattggaattccaccttgtccagccctccccagttaaagtggggaagacagactttaggatcacgtgtgtgactaatacagaaaggaaacatggcgtcggggagagggataaaacctgaatgccatattttaagttaaaaaaaaaaaa

SEQ ID NO: 143451 - DNA, 2899 bp, Homo sapiens
  Payload ID: 8339
  Gene Symbol: IFNAR2
  Gene Name: interferon (alpha, beta and omega) receptor 2
  Uniprot ID: P48551
  ENST ID: ENST00000342136
  CDS Start-End: 327-1874
cccgcactaaagacgcttcttcccggcgggtaggaatcccgccggcgagccgaacagttccccgagcgcagcccgcggaccaccacccggccgcacgggccgcttttgtcccccgcccgccgcttctgtccgagaggccgcccgcgaggcgcatcctgaccgcgagcgtcgggtcccagagccgggcgcggctggggcccgaggctagcatctctcgggagccgcaaggcgagagctgcaaagtttaattagacacttcagaattttgatcacctaatgttgatttcagatgtaaaagtcaagagaagactctaaaaatagcaaagatgcttttgagccagaatgccttcatcttcagatcacttaatttggttctcatggtgtatatcagcctcgtgtttggtatttcatatgattcgcctgattacacagatgaatcttgcactttcaagatatcattgcgaaatttccggtccatcttatcatgggaattaaaaaaccactccattgtaccaactcactatacattgctgtatacaatcatgagtaaaccagaagatttgaaggtggttaagaactgtgcaaataccacaagatcattttgtgacctcacagatgagtggagaagcacacacgaggcctatgtcaccgtcctagaaggattcagcgggaacacaacgttgttcagttgctcacacaatttctggctggccatagacatgtcttttgaaccaccagagtttgagattgttggttttaccaaccacattaatgtgatggtgaaatttccatctattgttgaggaagaattacagtttgatttatctctcgtcattgaagaacagtcagagggaattgttaagaagcataaacccgaaataaaaggaaacatgagtggaaatttcacctatatcattgacaagttaattccaaacacgaactactgtgtatctgtttatttagagcacagtgatgagcaagcagtaataaagtctcccttaaaatgcaccctccttccacctggccaggaatcagaatcagcagaatctgccaaaataggaggaataattactgtgtttttgatagcattggtcttgacaagcaccatagtgacactgaaatggattggttatatatgcttaagaaatagcctccccaaagtcttgaattttcataactttttagcctggccatttcctaacctgccaccgttggaagccatggatatggtggaggtcatttacatcaacagaaagaagaaagtgtgggattataattatgatgatgaaagtgatagcgatactgaggcagcgcccaggacaagtggcggtggctataccatgcatggactgactgtcaggcctctgggtcaggcctctgccacctctacagaatcccagttgatagacccggagtccgaggaggagcctgacctgcctgaggttgatgtggagctccccacgatgccaaaggacagccctcagcagttggaactcttgagtgggccctgtgagaggagaaagagtccactccaggacccttttcccgaagaggactacagctccacggaggggtctgggggcagaattaccttcaatgtggacttaaactctgtgtttttgagagttcttgatgacgaggacagtgacgacttagaagcccctctgatgctatcgtctcatctggaagagatggttgacccagaggatcctgataatgtgcaatcaaaccatttgctggccagcggggaagggacacagccaacctttcccagcccctcttcagagggcctgtggtccgaagatgctccatctgatcaaagtgacacttctgagtcagatgttgaccttggggatggttatataatgagatgactccaaaactattgaatgaacttggacagacaagcacctacagggttctttgtctctgcatcctaacttgctgccttatcgtctgcaagtgttctccaagggaaggaggaggaaactgtggtgttcctttcttccaggtgacatcacctatgcacattcccagtatggggaccatagtatcattcagtgcattgtttacatattcaaagtggtgcactttgaaggaagcacatgtgcacctttcctttacactaatgcacttaggatgtttctgcatcatgtctaccagggagcagggttccccacagtttcagaggtggtccaggaccctatgatatttctcttctttcgttcttttttttttttttttttgagacagagtctcgttctgtcgcccaagctggagcgcaatggtgtgatcttggctcactgcaacatccgcctcccaggttcaagtgattctcctgcctcagcctccctcgcaagtagctgggattacaggcgcctgccaccatgcctagcaaatttttgtatttttagtagagacaggattttaccatgttggccaggctggtctcaaactcctgacctcaagtgatctgccctcctcagcctcgtaaagtgctgggattacaggggtgagccgctgtgcctggctggccctgtgatatttctgtgaaataaattgggccagggtgggagcagggaaagaaaaggaaaatagtagcaagagctgcaaagcaggcaggaagggaggaggagagccaggtgagcagtggagagaaggggggccctgcacaaggaaacagggaagagccatcgaagtttcagtcggtgagccttgggcacctcacccatgtcacatcctgtctcctgcaattggaattccaccttgtccagccctccccagttaaagtggggaagacagactttaggatcacgtgtgtgactaatacagaaaggaaacatggcgtcggggagagggataaaacctgaatgccatattttaagttaaaaaaaaaaaa

SEQ ID NO: 143452 - DNA, 1127 bp, Homo sapiens
  Payload ID: 8339
  Gene Symbol: IFNAR2
  Gene Name: interferon (alpha, beta and omega) receptor 2
  ENST ID: ENST00000382238
  CDS Start-End: 114-707
gtcgggtcccagagccgggcgcggctggggcccgaggctagcatctctcgggagccgcaaggcgagagctgcaaagatgtaaaagtcaagagaagactctaaaaatagcaaagatgcttttgagccagaatgccttcatcttcagatcacttaatttggttctcatggtgtatatcagcctcgtgtttggtatttcatatgattcgcctgattacacagatgaatcttgcactttcaagatatcattgcgaaatttccggtccatcttatcatgggaattaaaaaaccactccattgtaccaactcactatacattgctgtatacaatcatgagtaaaccagaagatttgaaggtggttaagaactgtgcaaataccacaagatcattttgtgacctcacagatgagtggagaagcacacacgaggcctatgtcaccgtcctagaaggattcagcgggaacacaacgttgttcagttgctcacacaatttctggctggccatagacatgtcttttgaaccaccagagtttgagattgttggttttaccaaccacattaatgtgatggtgaaatttccatctattgttgaggaagaattacagtttgatttatctctcgtcattgaagaacagtcagagggaattgttaagaagggagaagatgagaaactagacatcagtcagttttgtcacagacaagctctgtgaccttggagaagttacttagccacactgagctacagttttctcatccgttgaatggagcataaacccgaaataaaaggaaacatgagtggaaatttcacctatatcattgacaagttaattccaaacacgaactactgtgtatctgtttatttagagcacagtgatgagcaagcagtaataaagtctcccttaaaatgcaccctccttccacctggccaggaatcagaatcagcagaatctgccaaaataggaggaataattactgtgtttttgatagcattggtcttgacaagcaccatagtgacactgaaatggattggttatatatgcttaagaaatagcctccccaaagtcttgaattttcataactttttagcctggccatttcctaacctgccaccgttggaagccatggatatg

SEQ ID NO: 143453 - DNA, 1389 bp, Homo sapiens
  Payload ID: 8339
  Gene Symbol: IFNAR2
  Gene Name: interferon (alpha, beta and omega) receptor 2
  Uniprot ID: P48551
  ENST ID: ENST00000382264
  CDS Start-End: 354-1349
gcccccgcgccggcggcggcgcggcgcccgcgcttccgtatcgctcctcgtaggccggggctcggcgcgcgcacccgcactaaagacgcttcttcccggcgggtaggaatcccgccggcgagccgaacagttccccgagcgcagcccgcggaccaccacccggccgcacgggccgcttttgtcccccgcccgccgcttctgtccgagaggccgcccgcgaggcgcatcctgaccgcgagcgtcgggtcccagagccgggcgcggctggggcccgaggctagcatctctcgggagccgcaaggcgagagctgcaaagatgtaaaagtcaagagaagactctaaaaatagcaaagatgcttttgagccagaatgccttcatcttcagatcacttaatttggttctcatggtgtatatcagcctcgtgtttggtatttcatatgattcgcctgattacacagatgaatcttgcactttcaagatatcattgcgaaatttccggtccatcttatcatgggaattaaaaaaccactccattgtaccaactcactatacattgctgtatacaatcatgagtaaaccagaagatttgaaggtggttaagaactgtgcaaataccacaagatcattttgtgacctcacagatgagtggagaagcacacacgaggcctatgtcaccgtcctagaaggattcagcgggaacacaacgttgttcagttgctcacacaatttctggctggccatagacatgtcttttgaaccaccagagtttgagattgttggttttaccaaccacattaatgtgatggtgaaatttccatctattgttgaggaagaattacagtttgatttatctctcgtcattgaagaacagtcagagggaattgttaagaagcataaacccgaaataaaaggaaacatgagtggaaatttcacctatatcattgacaagttaattccaaacacgaactactgtgtatctgtttatttagagcacagtgatgagcaagcagtaataaagtctcccttaaaatgcaccctccttccacctggccaggaatcagaatcagcagaatctgccaaaataggaggaataattactgtgtttttgatagcattggtcttgacaagcaccatagtgacactgaaatggattggttatatatgcttaagaaatagcctccccaaagtcttgaggcaaggtctcgctaagggctggaatgcagtggctattcacaggtgcagtcataatgcactacagtctgaaactcctgagctcaaacagtcgtcctgcctaagcttccccagtagctgggattacaagcgtgcatccctgtgccccagtgattaagttttattatgtagaaaataaagagcaaacagtacagctg

SEQ ID NO: 143454 - DNA, 4284 bp, Homo sapiens
  Payload ID: 8339
  Gene Symbol: IFNAR2
  Gene Name: interferon (alpha, beta and omega) receptor 2
  Uniprot ID: P48551
  ENST ID: ENST00000404220
  CDS Start-End: 330-1325
gcacccgcactaaagacgcttcttcccggcgggtaggaatcccgccggcgagccgaacagttccccgagcgcagcccgcggaccaccacccggccgcacgggccgcttttgtcccccgcccgccgcttctgtccgagaggccgcccgcgaggcgcatcctgaccgcgagcgtcgggtcccagagccgggcgcggctggggcccgaggctagcatctctcgggagccgcaaggcgagagctgcaaagtttaattagacacttcagaattttgatcacctaatgttgatttcagatgtaaaagtcaagagaagactctaaaaatagcaaagatgcttttgagccagaatgccttcatcttcagatcacttaatttggttctcatggtgtatatcagcctcgtgtttggtatttcatatgattcgcctgattacacagatgaatcttgcactttcaagatatcattgcgaaatttccggtccatcttatcatgggaattaaaaaaccactccattgtaccaactcactatacattgctgtatacaatcatgagtaaaccagaagatttgaaggtggttaagaactgtgcaaataccacaagatcattttgtgacctcacagatgagtggagaagcacacacgaggcctatgtcaccgtcctagaaggattcagcgggaacacaacgttgttcagttgctcacacaatttctggctggccatagacatgtcttttgaaccaccagagtttgagattgttggttttaccaaccacattaatgtgatggtgaaatttccatctattgttgaggaagaattacagtttgatttatctctcgtcattgaagaacagtcagagggaattgttaagaagcataaacccgaaataaaaggaaacatgagtggaaatttcacctatatcattgacaagttaattccaaacacgaactactgtgtatctgtttatttagagcacagtgatgagcaagcagtaataaagtctcccttaaaatgcaccctccttccacctggccaggaatcagaatcagcagaatctgccaaaataggaggaataattactgtgtttttgatagcattggtcttgacaagcaccatagtgacactgaaatggattggttatatatgcttaagaaatagcctccccaaagtcttgaggcaaggtctcgctaagggctggaatgcagtggctattcacaggtgcagtcataatgcactacagtctgaaactcctgagctcaaacagtcgtcctgcctaagcttccccagtagctgggattacaagcgtgcatccctgtgccccagtgattaagttttattatgtagaaaataaagagcaaacagtacagctgatacggactctctctctctttttttttttttttaagaattttcataactttttagcctggccatttcctaacctgccaccgttggaagccatggatatggtggaggtcatttacatcaacagaaagaagaaagtgtgggattataattatgatgatgaaagtgatagcgatactgaggcagcgcccaggacaagtggcggtggctataccatgcatggactgactgtcaggcctctgggtcaggcctctgccacctctacagaatcccagttgatagacccggagtccgaggaggagcctgacctgcctgaggttgatgtggagctccccacgatgccaaaggacagccctcagcagttggaactcttgagtgggccctgtgagaggagaaagagtccactccaggacccttttcccgaagaggactacagctccacggaggggtctgggggcagaattaccttcaatgtggacttaaactctgtgtttttgagagttcttgatgacgaggacagtgacgacttagaagcccctctgatgctatcgtctcatctggaagagatggttgacccagaggatcctgataatgtgcaatcaaaccatttgctggccagcggggaagggacacagccaacctttcccagcccctcttcagagggcctgtggtccgaagatgctccatctgatcaaagtgacacttctgagtcagatgttgaccttggggatggttatataatgagatgactccaaaactattgaatgaacttggacagacaagcacctacagggttctttgtctctgcatcctaacttgctgccttatcgtctgcaagtgttctccaagggaaggaggaggaaactgtggtgttcctttcttccaggtgacatcacctatgcacattcccagtatggggaccatagtatcattcagtgcattgtttacatattcaaagtggtgcactttgaaggaagcacatgtgcacctttcctttacactaatgcacttaggatgtttctgcatcatgtctaccagggagcagggttccccacagtttcagaggtggtccaggaccctatgatatttctcttctttcgttcttttttttttttttttttgagacagagtctcgttctgtcgcccaagctggagcgcaatggtgtgatcttggctcactgcaacatccgcctcccaggttcaagtgattctcctgcctcagcctccctcgcaagtagctgggattacaggcgcctgccaccatgcctagcaaatttttgtatttttagtagagacaggattttaccatgttggccaggctggtctcaaactcctgacctcaagtgatctgccctcctcagcctcgtaaagtgctgggattacaggggtgagccgctgtgcctggctggccctgtgatatttctgtgaaataaattgggccagggtgggagcagggaaagaaaaggaaaatagtagcaagagctgcaaagcaggcaggaagggaggaggagagccaggtgagcagtggagagaaggggggccctgcacaaggaaacagggaagagccatcgaagtttcagtcggtgagccttgggcacctcacccatgtcacatcctgtctcctgcaattggaattccaccttgtccagccctccccagttaaagtggggaagacagactttaggatcacgtgtgtgactaatacagaaaggaaacatggcgtcggggagagggataaaacctgaatgccatattttaagttaaaaaaaaaaaaagcaaacacaaagatgcttcaagatcttcaggagaagtatggtatacaagtttcagggaccctatttgacaattttcagagtgctctctatgctgattccgagtcgagtgtgtcagctgtgattacagtgcctgtggatctaggccgggttgggggggtgtgggcgggggaagggaagtctggcccggagcaattgctcctgccggtaaccccagcactttgggatgcctaaacaggcgtatcgcttgaggccagtaattcgagaccagcctgggcaacatggcaaatctgtctctacaaaacaaaattagaaaaattaactgggcgtagtggcatgtgcctgttgtcccagctacttgggaggctgaggtgggagaatggcttgagcccaggaagcggaggttgcagtgagccaagatcatgtcactgcacttcagcctgggtgacagaaccagaccctgtctttaaaaagggagttggtggggagaggttctagaatgtcatgtagcaaccagtttaaggactgggactcagggatccaactcccacagtttccctgtgtgaccctaggcatttgacttagcctttctgagcctcaggttttttgtttctgaagtaaaaggattggactaggtaatctccaagatcctaggaacccaggagaaagatgagaaaatgtacaagaatgaacactcaggtggaaatgctgcaatcctgagaagctcccaggatgaatgaaaggcacaggacctcttacccctcacccctgcccccctcaagagctggtttctcaaacctttctcttaggccccttcaaagggggaaaactaaaaattatacaagttatagttcaaggactttaaatagattatttatatgattgctcataaggatgaggctgtgaggagggaacaccttatttaatctaatgaaattccataggaaagaggccttttgtatattgaatcaatttatctgccttctcagtgcatctgtcatattctgaaagattctgggttgatcttttgcgataacctctatggctgtgagtgtgtgtgtgtgtttgtgtattttttaacattttgtataatgattggaggttggtaaaaagtaacacaacagtacttttttaatacaaacttggtgtggt

SEQ ID NO: 143455 - DNA, 719 bp, Homo sapiens
  Payload ID: 8339
  Gene Symbol: IFNAR2
  Gene Name: interferon (alpha, beta and omega) receptor 2
  ENST ID: ENST00000417007
  CDS Start-End: 1-165
tttaccaaccacattaatgtgatggtgaaatttccatctattgttgaggaagaattacagtttgatttatctctcgtcattgaagaacagtcagagggaattgttaagaagggagaagatgagaaactagacatcagtcagttttgtcacagacaagctctgtgaccttggagaagttacttagccacactgagctacagttttctcatccgttgaatggagcataaacccgaaataaaaggaaacatgagtggaaatttcacctatatcattgacaagttaattccaaacacgaactactgtgtatctgtttatttagagcacagtgatgagcaagcagtaataaagtctcccttaaaatgcaccctccttccacctggccaggaatcagaatcagcagaatctgccaaaataggaggaataattactgtgtttttgatagcattggtcttgacaagcaccatagtgacactgaaatggattggttatatatgcttaagaaatagcctccccaaagtcttgaggcaaggtctcgctaagggctggaatgcagtggctattcacaggtgcagtcataatgcactacagtctgaaactcctgagctcaaacagtcgtcctgcctaagcttccccagtagctgggattacaagcgtgcatccctgtgccccagtgattaagttttattatgtagaaaataaagagcaaacagtacagctga

SEQ ID NO: 143456 - DNA, 726 bp, Homo sapiens
  Payload ID: 8339
  Gene Symbol: IFNAR2
  Gene Name: interferon (alpha, beta and omega) receptor 2
  ENST ID: ENST00000447980
  CDS Start-End: 115-726
gcacctgcgaccccaggacccctcccgggccctgtcctgcgccctccacgcgtcgcccctgctgggagtccgctttcgttgcacccctccgcgtcccaccccaccccaccaaggatgcccaggataccgggcatttgccactgcaagatatgtaaaagtcaagagaagactctaaaaatagcaaagatgcttttgagccagaatgccttcatcttcagatcacttaatttggttctcatggtgtatatcagcctcgtgtttggtatttcatatgattcgcctgattacacagatgaatcttgcactttcaagatatcattgcgaaatttccggtccatcttatcatgggaattaaaaaaccactccattgtaccaactcactatacattgctgtatacaatcatgagtaaaccagaagatttgaaggtggttaagaactgtgcaaataccacaagatcattttgtgacctcacagatgagtggagaagcacacacgaggcctatgtcaccgtcctagaaggattcagcgggaacacaacgttgttcagttgctcacacaatttctggctggccatagacatgtcttttgaaccaccagagtttgagattgttggttttaccaaccacattaatgtgatggtgaaatttccatctattgttgaggaagaattacagtttgatttatctctcgtcattgaagaacagtcagagggaattgttaagaag

SEQ ID NO: 143457 - DNA, 841 bp, Homo sapiens
  Payload ID: 8339
  Gene Symbol: IFNAR2
  Gene Name: interferon (alpha, beta and omega) receptor 2
  ENST ID: ENST00000443073
  CDS Start-End: 155-841
catctctcgggagccgcaaggcgagagctgcaaagattacacagatgaatcttgcactttcaagatatcattgcgaaatttccggtccatcttatcatgggaattaaaaaaccactccattgtaccaactcactatacattgctgtatacaatcatgagtaaaccagaagatttgaaggtggttaagaactgtgcaaataccacaagatcattttgtgacctcacagatgagtggagaagcacacacgaggcctatgtcaccgtcctagaaggattcagcgggaacacaacgttgttcagttgctcacacaatttctggctggccatagacatgtcttttgaaccaccagagtttgagattgttggttttaccaaccacattaatgtgatggtgaaatttccatctattgttgaggaagaattacagtttgatttatctctcgtcattgaagaacagtcagagggaattgttaagaagcataaacccgaaataaaaggaaacatgagtggaaatttcacctatatcattgacaagttaattccaaacacgaactactgtgtatctgtttatttagagcacagtgatgagcaagcagtaataaagtctcccttaaaatgcaccctccttccacctggccaggaatcagaatcagcagaatctgccaaaataggaggaataattactgtgtttttgatagcattggtcttgacaagcaccatagtgacactgaaatggattggttatatatgcttaagaaatagcctccccaaagtcttgaattttcataactttttagcctggccatttcctaacctgccaccgttggaagccatggatatg

SEQ ID NO: 143458 - DNA, 710 bp, Homo sapiens
  Payload ID: 8339
  Gene Symbol: IFNAR2
  Gene Name: interferon (alpha, beta and omega) receptor 2
  ENST ID: ENST00000413881
  CDS Start-End: 155-658
catctctcgggagccgcaaggcgagagctgcaaagattacacagatgaatcttgcactttcaagatatcattgcgaaatttccggtccatcttatcatgggaattaaaaaaccactccattgtaccaactcactatacattgctgtatacaatcatgagtaaaccagaagatttgaaggtggttaagaactgtgcaaataccacaagatcattttgtgacctcacagatgagtggagaagcacacacgaggcctatgtcaccgtcctagaaggattcagcgggaacacaacgttgttcagttgctcacacaatttctggctggccatagacatgtcttttgaaccaccagagtttgagattgttggttttaccaaccacattaatgtgatggtgaaatttccatctattgttgaggaagaattacagtttgatttatctctcgtcattgaagaacagtcagagggaattgttaagaagcataaacccgaaataaaaggaaacatgagtggaaatttcacctatatcattgacaagttaattccaaacacgaactactgtgtatctgtttatttagagcacagtgatgagcaagcagtaataaagtctcccttaaaatgcaccctccttccacctggccaggaatcagaattttcataactttttagcctggccatttcctaacctgccaccgttggaagccatggatatg

SEQ ID NO: 143459 - DNA, 2139 bp, Homo sapiens
  Payload ID: 8340
  Gene Symbol: IFNGR1
  Gene Name: interferon gamma receptor 1
  Uniprot ID: P15260
  ENST ID: ENST00000367739
  CDS Start-End: 123-1592
gcctcctgccgacgccggcacagaccccggtgacggaagtgacgtaaggccggggctggagggcagtgctgggctggtcccgcaggcgctcggggttggagccagcgaccgtcggtagcagcatggctctcctctttctcctaccccttgtcatgcagggtgtgagcagggctgagatgggcaccgcggatctggggccgtcctcagtgcctacaccaactaatgttacaattgaatcctataacatgaaccctatcgtatattgggagtaccagatcatgccacaggtccctgtttttaccgtagaggtaaagaactatggtgttaagaattcagaatggattgatgcctgcatcaatatttctcatcattattgtaatatttctgatcatgttggtgatccatcaaattctctttgggtcagagttaaagccagggttggacaaaaagaatctgcctatgcaaagtcagaagaatttgctgtatgccgagatggaaaaattggaccacctaaactggatatcagaaaggaggagaagcaaatcatgattgacatatttcacccttcagtttttgtaaatggagacgagcaggaagtcgattatgatcccgaaactacctgttacattagggtgtacaatgtgtatgtgagaatgaacggaagtgagatccagtataaaatactcacgcagaaggaagatgattgtgacgagattcagtgccagttagcgattccagtatcctcactgaattctcagtactgtgtttcagcagaaggagtcttacatgtgtggggtgttacaactgaaaagtcaaaagaagtttgtattaccattttcaatagcagtataaaaggttctctttggattccagttgttgctgctttactactctttctagtgcttagcctggtattcatctgtttttatattaagaaaattaatccattgaaggaaaaaagcataatattacccaagtccttgatctctgtggtaagaagtgctactttagagacaaaacctgaatcaaaatatgtatcactcatcacgtcataccagccattttccttagaaaaggaggtggtctgtgaagagccgttgtctccagcaacagttccaggcatgcataccgaagacaatccaggaaaagtggaacatacagaagaactttctagtataacagaagtggtgactactgaagaaaatattcctgacgtggtcccgggcagccatctgactccaatagagagagagagttcttcacctttaagtagtaaccagtctgaacctggcagcatcgctttaaactcgtatcactccagaaattgttctgagagtgatcactccagaaatggttttgatactgattccagctgtctggaatcacatagctccttatctgactcagaatttcccccaaataataaaggtgaaataaaaacagaaggacaagagctcataaccgtaataaaagcccccacctcctttggttatgataaaccacatgtgctagtggatctacttgtggatgatagcggtaaagagtccttgattggttatagaccaacagaagattccaaagaattttcatgagatcagctaagttgcaccaactttgaagtctgattttcctggacagttttctgctttaatttcatgaaaagattatgatctcagaaattgtatcttagttggtatcaaccaaatggagtgacttagtgtacatgaaagcgtaaagaggatgtgtggcattttcacttttggcttgtaaagtacagacttttttttttttttaaacaaaaaaagcattgtaacttatgaacctttacatccagataggttaccagtaacggaacagtatccagtactcctggttcctaggtgagcaggtgatgccccagggacctttgtagccacttcactttttttcttttctctgccttggtatagcatatgtttttgtaagtttatgcatacagtaattttaagtaatttcagaagaaattctgcaagcttttcaaaattggacttaaaatctaattcaaactaatagaattaatggaatatgtaaatagaaacgtgtatattttttatgaaacattacagttagagatttttaaataaagaattttaaaactcg

SEQ ID NO: 143460 - DNA, 753 bp, Homo sapiens
  Payload ID: 8340
  Gene Symbol: IFNGR1
  Gene Name: interferon gamma receptor 1
  ENST ID: ENST00000458076
  CDS Start-End: 123-753
gcctcctgccgacgccggcacagaccccggtgacggaagtgacgtaaggccggggctggagggcagtgctgggctggtcccgcaggcgctcggggttggagccagcgaccgtcggtagcagcatggctctcctctttctcctaccccttgtcatgcagggtgtgagcagggctgagatgggcaccgcggatctggggccgtcctcagtgcctacaccaactaatgttacaattgaatcctataacatgaaccctatcgtatattgggagtaccagatcatgccacaggtccctgtttttaccgtagaggtaaagaactatggagttaaagccagggttggacaaaaagaatctgcctatgcaaagtcagaagaatttgctgtatgccgagatggaaaaattggaccacctaaactggatatcagaaaggaggagaagcaaatcatgattgacatatttcacccttcagtttttgtaaatggagacgagcaggaagtcgattatgatcccgaaactacctgttacattagggtgtacaatgtgtatgtgagaatgaacggaagtgagatccagtataaaatactcacgcagaaggaagatgattgtgacgagattcagtgccagttagcgattccagtatcctcactgaattctcagtactgtgtttcagcagaaggagtcttacatgtgtggggtgttacaactgaaaagtcaaaagaagtttgtattaccattttcaatagcagtataaaag

SEQ ID NO: 143461 - DNA, 748 bp, Homo sapiens
  Payload ID: 8340
  Gene Symbol: IFNGR1
  Gene Name: interferon gamma receptor 1
  ENST ID: ENST00000414770
  CDS Start-End: 264-748
gcctcctgccgacgccggcacagaccccggtgacggaagtgacgtaaggccggggctggagggcagtgctgggctggtcccgcaggcgctcggggttggagccagcgaccgtcggtagcagcatggctctcctctttctcctaccccttgtcatgcagggtgtgagcagggctgagatgggcaccgcggatctggggccgtcctcagtggccataatataattgtgataatgtaataaaatcaggaaacattacctgaagcagatgcttttgaagtcaccagaaaatagtcttctccaattccaatttaaatatggagtgcctacaccaactaatgttacaattgaatcctataacatgaaccctatcgtatattgggagtaccagatcatgccacaggtccctgtttttaccgtagaggtaaagaactatggtgttaagaattcagaatggattgatgcctgcatcaatatttctcatcattattgtaatatttctgatcatgttggtgatccatcaaattctctttgggtcagagttaaagccagggttggacaaaaagaatctgcctatgcaaagtcagaagaatttgctgtatgccgagatggaaaaattggaccacctaaactggatatcagaaaggaggagaagcaaatcatgattgacatatttcacccttcagtttttgtaaatggagacgagcaggaagtcgattatgatcccgaaactacctgttacattagggtgta

SEQ ID NO: 143462 - DNA, 2055 bp, Homo sapiens
  Payload ID: 8340
  Gene Symbol: IFNGR1
  Gene Name: interferon gamma receptor 1
  ENST ID: ENST00000543628
  CDS Start-End: 44-868
ccgcaggcgctcggggttggagccagcgaccgtcggtagcagcatggctctcctctttctcctaccccttgtcatgcagggtgtgagcagggctgagatgggcaccgcggatctggggccgtcctcagtgcctacaccaactaatgttacaattgaatcctataacatgaaccctatcgtatattgggagtaccagatcatgccacaggtccctgtttttaccgtagaggtaaagaactatggtgttaagaattcagaatggattgatgcctgcatcaatatttctcatcattattgtaatatttctgatcatgttggtgatccatcaaattctctttgggtcagagttaaagccagggttggacaaaaagaatctgcctatgcaaagtcagaagaatttgctgtatgccgagatggaaaaattggaccacctaaactggatatcagaaaggaggagaagcaaatcatgattgacatatttcacccttcagtttttgtaaatggagacgagcaggaagtcgattatgatcccgaaactacctgttacattagggtgtacaatgtgtatgtgagaatgaacggaagtgagatccagtataaaatactcacgcagaaggaagatgattgtgacgagattcagtgccagttagcgattccagtatcctcactgaattctcagtactgtgtttcagcagaaggagtcttacatgtgtggggtgttacaactgaaaagtcaaaagaagtttgtattaccattttcaatagcagtataaaaggttctctttggattccagttgttgctgctttactactcttttgcttagcctggtattcatctgtttttatattaagaaaattaatccattgaaggaaaaaagcataatattacccaagtccttgatctctgtggtaagaagtgctactttagagacaaaacctgaatcaaaatatgtatcactcatcacgtcataccagccattttccttagaaaaggaggtggtctgtgaagagccgttgtctccagcaacagttccaggcatgcataccgaagacaatccaggaaaagtggaacatacagaagaactttctagtataacagaagtggtgactactgaagaaaatattcctgacgtggtcccgggcagccatctgactccaatagagagagagagttcttcacctttaagtagtaaccagtctgaacctggcagcatcgctttaaactcgtatcactccagaaattgttctgagagtgatcactccagaaatggttttgatactgattccagctgtctggaatcacatagctccttatctgactcagaatttcccccaaataataaaggtgaaataaaaacagaaggacaagagctcataaccgtaataaaagcccccacctcctttggttatgataaaccacatgtgctagtggatctacttgtggatgatagcggtaaagagtccttgattggttatagaccaacagaagattccaaagaattttcatgagatcagctaagttgcaccaactttgaagtctgattttcctggacagttttctgctttaatttcatgaaaagattatgatctcagaaattgtatcttagttggtatcaaccaaatggagtgacttagtgtacatgaaagcgtaaagaggatgtgtggcattttcacttttggcttgtaaagtacagacttttttttttttttaaacaaaaaaagcattgtaacttatgaacctttacatccagataggttaccagtaacggaacagtatccagtactcctggttcctaggtgagcaggtgatgccccagggacctttgtagccacttcactttttttcttttctctgccttggtatagcatatgtttttgtaagtttatgcatacagtaattttaagtaatttcagaagaaattctgcaagcttttcaaaattggacttaaaatctaattcaaactaatagaattaatggaatatgtaaatagaaacgtgtatattttttatgaaacattacagttagagatttttaaataaagaattttaaaactc

SEQ ID NO: 143463 - DNA, 2221 bp, Homo sapiens
  Payload ID: 8341
  Gene Symbol: IFNGR2
  Gene Name: interferon gamma receptor 2 (interferon gamma transducer 1)
  Uniprot ID: P38484
  ENST ID: ENST00000290219
  CDS Start-End: 649-1662
gttgactggaggcggaggttgcagtgagccgagatcgccccactgcactccagcctggtgactccgtctcaaaaaaaaggggaggggggcgggggagagttgaaagcttaatatgtactttgggggctattaaagcaaacatttcgactaaaggggcgaatcctcgaattgtgcgatcaagcacccgagaggagagttggggggggtcaggaggggtgggggctccagggaaagcccgggggtctgggccggggtctcgcggggcccttccggaaggatcgcggcccccgaaggtgggcgtcccgcggggctccagtctccaggacgttccgggaggctccgcgctctgggaggccggctgcgtggggtccccgcgctgcagccgcagaggccccccagggccgcggttcccggagcgggaaagtcccgcgcgggggcggtggcctcgggggcgggacggggcgggggcgggggcgcgggcggccgagccgaatcccctccaccgggacgccccgctgctgctcgggaagaggcgggccctgcgcgccctgcgctcgccatggcggtttgggcggcgacgtgagcggctccgcggaccccgagcggggccccggccgcgacctgagccgccgccgagcgcccggggccatgcgaccgacgctgctgtggtcgctgctgctgctgctcggagtcttcgccgccgccgccgcggccccgccagaccctctttcccagctgcccgctcctcagcacccgaagattcgcctgtacaacgcagagcaggtcctgagttgggagccagtggccctgagcaatagcacgaggcctgttgtctaccaagtgcagtttaaatacaccgacagtaaatggttcacggccgacatcatgtccataggggtgaattgtacacagatcacagcaacagagtgtgacttcactgccgccagtccctcagcaggcttcccaatggatttcaatgtcactctacgccttcgagctgagctgggagcactccattctgcctgggtgacaatgccttggtttcaacactatcggaatgtgactgtcgggcctccagaaaacattgaggtgaccccaggagaaggctccctcatcatcaggttctcctctccctttgacatcgctgatacctccacggcctttttttgttattatgtccattactgggaaaaaggaggaatccaacaggtcaaaggccctttcagaagcaactccatttcattggataacttaaaaccctccagagtgtactgtttacaagtccaggcacaactgctttggaacaaaagtaacatctttagagtcgggcatttaagcaacatatcttgctacgaaacaatggcagatgcctccactgagcttcagcaagtcatcctgatctccgtgggaacattttcgttgctgtcggtgctggcaggagcctgtttcttcctggtcctgaaatatagaggcctgattaaatactggtttcacactccaccaagcatcccattacagatagaagagtatttaaaagacccaactcagcccatcttagaggccttggacaaggacagctcaccaaaggatgacgtctgggactctgtgtccattatctcgtttccggaaaaggagcaagaagatgttctccaaacgctttgaaccaaagcatgggcctagcccactggctccctggaagagatcaagccatcggagctgctagagttctgtctggactttccagagaccagtattcccttttgctgcctctaaaaggcctgtccctgcagacatgagagacagcaggtctcatgggggtgacaagctttttttttttttcttaaagaattttcaaaatcaaattccagaatgattttacggagatatcccaggaaaattaaggcttctcttaaacactaaaaaggcatgtaattgcttgttagcaaaatggatatgacacatctctgatacttttttcattattggttgggctgagcagtcagaagacctggtcgtcgtcttgactttggcaaatgagccggagccccttgggcaggtcacacaacctgtcccagcgagggacaccgagtggcccttcatgtacatccatggtgtgctggcttaaaatgtaattaatcttgtaaatatactcctagtaatttaagattttgtttttaaactggaaataaaagattgtatagtgcatgttttttaaagtcta

SEQ ID NO: 143464 - DNA, 1742 bp, Homo sapiens
  Payload ID: 8341
  Gene Symbol: IFNGR2
  Gene Name: interferon gamma receptor 2 (interferon gamma transducer 1)
  ENST ID: ENST00000381995
  CDS Start-End: 113-1183
gccctgcgcgccctgcgctcgccatggcggtttgggcggcgacgtgagcggctccgcggaccccgagcggggccccggccgcgacctgagccgccgccgagcgcccggggccatgcgaccgacgctgctgtggtcgctgctgctgctgctcggagtcttcgccgccgccgccgcggccccgccagcacagctaactttggagacctaccaagaatggtgcaatgattcagcagctactcatgaccctctttcccagctgcccgctcctcagcacccgaagattcgcctgtacaacgcagagcaggtcctgagttgggagccagtggccctgagcaatagcacgaggcctgttgtctaccaagtgcagtttaaatacaccgacagtaaatggttcacggccgacatcatgtccataggggtgaattgtacacagatcacagcaacagagtgtgacttcactgccgccagtccctcagcaggcttcccaatggatttcaatgtcactctacgccttcgagctgagctgggagcactccattctgcctgggtgacaatgccttggtttcaacactatcggaatgtgactgtcgggcctccagaaaacattgaggtgaccccaggagaaggctccctcatcatcaggttctcctctccctttgacatcgctgatacctccacggcctttttttgttattatgtccattactgggaaaaaggaggaatccaacaggtcaaaggccctttcagaagcaactccatttcattggataacttaaaaccctccagagtgtactgtttacaagtccaggcacaactgctttggaacaaaagtaacatctttagagtcgggcatttaagcaacatatcttgctacgaaacaatggcagatgcctccactgagcttcagcaagtcatcctgatctccgtgggaacattttcgttgctgtcggtgctggcaggagcctgtttcttcctggtcctgaaatatagaggcctgattaaatactggtttcacactccaccaagcatcccattacagatagaagagtatttaaaagacccaactcagcccatcttagaggccttggacaaggacagctcaccaaaggatgacgtctgggactctgtgtccattatctcgtttccggaaaaggagcaagaagatgttctccaaacgctttgaaccaaagcatgggcctagcccactggctccctggaagagatcaagccatcggagctgctagagttctgtctggactttccagagaccagtattcccttttgctgcctctaaaaggcctgtccctgcagacatgagagacagcaggtctcatgggggtgacaagctttttttttttttcttaaagaattttcaaaatcaaattccagaatgattttacggagatatcccaggaaaattaaggcttctcttaaacactaaaaaggcatgtaattgcttgttagcaaaatggatatgacacatctctgatacttttttcattattggttgggctgagcagtcagaagacctggtcgtcgtcttgactttggcaaatgagccggagccccttgggcaggtcacacaacctgtcccagcgagggacaccgagtggcccttcatgtacatccatggtgtgctggcttaaaatgtaattaatcttgtaaatatactcctagtaatttaagattttgtttttaaactggaaataaaagattgtatagtgcatgttttttaaagtcta

SEQ ID NO: 143465 - DNA, 1684 bp, Homo sapiens
  Payload ID: 8341
  Gene Symbol: IFNGR2
  Gene Name: interferon gamma receptor 2 (interferon gamma transducer 1)
  ENST ID: ENST00000405436
  CDS Start-End: 368-1144
ggcggcgacgtgagcggctccgcggaccccgagcggggccccggccgcgacctgagccgccgccgagcgcccggggccatgcgaccgacgctgctgtggtcgctgctgctgctgctcggagtcttcgccgccgccgccgcggccccgccagctaactttggagacctaccaagaatggtgcaatgattcagcagctactcatgaccctctttcccagctgcccgctcctcagcacccgaagattcgcctgtacaacgcagagcaggtcctgagttgggagccagtggccctgagcaatagcacgaggcctgttgtctaccaagtgcagtttaaatacaccgacagtaaatggttcacggccgacatcatgtccataggggtgaattgtacacagatcacagcaacagagtgtgacttcactgccgccagtccctcagcaggcttcccaatggatttcaatgtcactctacgccttcgagctgagctgggagcactccattctgcctgggtgacaatgccttggtttcaacactatcggaatgtgactgtcgggcctccagaaaacattgaggtgaccccaggagaaggctccctcatcatcaggttctcctctccctttgacatcgctgatacctccacggcctttttttgttattatgtccattactgggaaaaaggaggaatccaacaggtcaaaggccctttcagaagcaactccatttcattggataacttaaaaccctccagagtgtactgtttacaagtccaggcacaactgctttggaacaaaagtaacatctttagagtcgggcatttaagcaacatatcttgctacgaaacaatggcagatgcctccactgagcttcagcaagtcatcctgatctccgtgggaacattttcgttgctgtcggtgctggcaggagcctgtttcttcctggtcctgaaatatagaggcctgattaaatactggtttcacactccaccaagcatcccattacagatagaagagtatttaaaagacccaactcagcccatcttagaggccttggacaaggacagctcaccaaaggatgacgtctgggactctgtgtccattatctcgtttccggaaaaggagcaagaagatgttctccaaacgctttgaaccaaagcatgggcctagcccactggctccctggaagagatcaagccatcggagctgctagagttctgtctggactttccagagaccagtattcccttttgctgcctctaaaaggcctgtccctgcagacatgagagacagcaggtctcatgggggtgacaagctttttttttttttcttaaagaattttcaaaatcaaattccagaatgattttacggagatatcccaggaaaattaaggcttctcttaaacactaaaaaggcatgtaattgcttgttagcaaaatggatatgacacatctctgatacttttttcattattggttgggctgagcagtcagaagacctggtcgtcgtcttgactttggcaaatgagccggagccccttgggcaggtcacacaacctgtcccagcgagggacaccgagtggcccttcatgtacatccatggtgtgctggcttaaaatgtaattaatcttgtaaatatactcctagtaatttaagattttgtttttaaactggaaataaaagattgtatagt

SEQ ID NO: 143466 - DNA, 727 bp, Homo sapiens
  Payload ID: 8341
  Gene Symbol: IFNGR2
  Gene Name: interferon gamma receptor 2 (interferon gamma transducer 1)
  ENST ID: ENST00000421802
  CDS Start-End: 1-182
acgaaacaatggcagatgcctccactgagcttcagcaagtcatcctgatctccgtgggaacattttcgttgctgtcggtgctggcaggagcctgtttcttcctggtcctgaaatatagaggcctgattaaatactggtttcacactccaccaagcatcccattacagatagaagaggtttaaaagacaagaaacaaaatgatgaaaaagtgtgaccggcctgagagttcagagcctctgaagtgtcaagggatccacagtgcaggtaggatgaagagtctgagaagggagatgggatcctccgaaaagagaaaatcgggtcttacagcgcgatgtaagacgatgcggatgccacttccctcccaccccgtcccgtccgaggcctccgccccctgcccctccgcaccccccgacccaggcacgcgcagcggggagcagcccagcctagcccgtctcactgctttggttttgaaaggtcacgtatttaccttagaatttcagcaccttccaacttactgttttaagtacctttaaccagcctattggctaaaaaccgaaacggtcctacccgcgactaccactgctccagtgacaatgctctgctgctacttatttaacggagctcaaggtttataattctcgaaagaatgttgttccccttccctttcccctcccgcctctgtacttgactctcgtaagaatgaaatcagaaaagtgcagaaaacaca

SEQ ID NO: 143467 - DNA, 906 bp, Homo sapiens
  Payload ID: 8341
  Gene Symbol: IFNGR2
  Gene Name: interferon gamma receptor 2 (interferon gamma transducer 1)
  ENST ID: ENST00000439213
  CDS Start-End: 118-330
ggcgggccctgcgcgccctgcgctcgccatggcggtttgggcggcgacgtgagcggctccgcggaccccgagcggggccccggccgcgacctgagccgccgccgagcgcccggggccatgcgaccgacgctgctgtggtcgctgctgctgctgctcggagtcttcgccgccgccgccgcggccccgccagcacagctaactttggagacctaccaagaatggtgcaatgattcagcagctactcatgagatgggagatggtgaacaggcgtgtggagggcggaataatggtccccaaagatgtccacgccctcatcctcagagtccgtgaacctgggaatgtgctgcctgacgtacaaaagggactccgcagatgtgaaccctctttcccagctgcccgctcctcagcacccgaagattcgcctgtacaacgcagagcaggtcctgagttgggagccagtggccctgagcaatagcacgaggcctgttgtctaccaagtgcagtttaaatacaccgacagtaaatggttcacggccgacatcatgtccataggggtgaattgtacacagatcacagcaacagagtgtgacttcactgccgccagtccctcagcaggcttcccaatggatttcaatgtcactctacgccttcgagctgagctgggagcactccattctgcctgggtgacaatgccttggtttcaacactatcggaatgtgactgtcgggcctccagaaaacattgaggtgaccccaggagaaggctccctcatcatcaggttctcctctccctttgacatcgctgatacctccacggcctttttttgttattatgtccattactgggaaaaaggaggaatccaacaggtcaaaggccctttcagaagcaactccatttcattggata

SEQ ID NO: 143468 - DNA, 966 bp, Homo sapiens
  Payload ID: 8341
  Gene Symbol: IFNGR2
  Gene Name: interferon gamma receptor 2 (interferon gamma transducer 1)
  ENST ID: ENST00000545369
  CDS Start-End: 104-217
gccctgcgctcgccatggcggtttgggcggcgacgtgagcggctccgcggaccccgagcggggccccggccgcgacctgagccgccgccgagcgcccggggccatgcgaccgacgctgctgtggtcgctgctgctgctgctcggagtcttcgccgccgccgccgcggccccgccagcaccgacagtaaatggttcacggccgacatcatgtccataggggtgaattgtacacagatcacagcaacagagtgtgacttcactgccgccagtccctcagcaggcttcccaatggatttcaatgtcactctacgccttcgagctgagctgggagcactccattctgcctgggtgacaatgccttggtttcaacactatcggaatgtgactgtcgggcctccagaaaacattgaggtgaccccaggagaaggctccctcatcatcaggttctcctctccctttgacatcgctgatacctccacggcctttttttgttattatgtccattactgggaaaaaggaggaatccaacaggtcaaaggccctttcagaagcaactccatttcattggataacttaaaaccctccagagtgtactgtttacaagtccaggcacaactgctttggaacaaaagtaacatctttagagtcgggcatttaagcaacatatcttgctacgaaacaatggcagatgcctccactgagcttcagcaagtcatcctgatctccgtgggaacattttcgttgctgtcggtgctggcaggagcctgtttcttcctggtcctgaaatatagaggcctgattaaatactggtttcacactccaccaagcatcccattacagatagaagagtatttaaaagacccaactcagcccatcttagaggccttggacaaggacagctcaccaaaggatgacgtctgggactctgtgtccattatctcgtttccggaaaaggagcaagaagat

SEQ ID NO: 143469 - DNA, 1500 bp, Homo sapiens
  Payload ID: 8341
  Gene Symbol: IFNGR2
  Gene Name: interferon gamma receptor 2 (interferon gamma transducer 1)
  Uniprot ID: P38484
  ENST ID: ENST00000576463
  CDS Start-End: 1-941
accctctttcccagctgcccgctcctcagcacccgaagattcgcctgtacaacgcagagcaggtcctgagttgggagccagtggccctgagcaatagcacgaggcctgttgtctaccaagtgcagtttaaatacaccgacagtaaatggttcacggccgacatcatgtccataggggtgaattgtacacagatcacagcaacagagtgtgacttcactgccgccagtccctcagcaggcttcccaatggatttcaatgtcactctacgccttcgagctgagctgggagcactccattctgcctgggtgacaatgccttggtttcaacactatcggaatgtgactgtcgggcctccagaaaacattgaggtgaccccaggagaaggctccctcatcatcaggttctcctctccctttgacatcgctgatacctccacggcctttttttgttattatgtccattactgggaaaaaggaggaatccaacaggtcaaaggccctttcagaagcaactccatttcattggataacttaaaaccctccagagtgtactgtttacaagtccaggcacaactgctttggaacaaaagtaacatctttagagtcgggcatttaagcaacatatcttgctacgaaacaatggcagatgcctccactgagcttcagcaagtcatcctgatctccgtgggaacattttcgttgctgtcggtgctggcaggagcctgtttcttcctggtcctgaaatatagaggcctgattaaatactggtttcacactccaccaagcatcccattacagatagaagagtatttaaaagacccaactcagcccatcttagaggccttggacaaggacagctcaccaaaggatgacgtctgggactctgtgtccattatctcgtttccggaaaaggagcaagaagatgttctccaaacgctttgaaccaaagcatgggcctagcccactggctccctggaagagatcaagccatcggagctgctagagttctgtctggactttccagagaccagtattcccttttgctgcctctaaaaggcctgtccctgcagacatgagagacagcaggtctcatgggggtgacaagctttttttttttttcttaaagaattttcaaaatcaaattccagaatgattttacggagatatcccaggaaaattaaggcttctcttaaacactaaaaaggcatgtaattgcttgttagcaaaatggatatgacacatctctgatacttttttcattattggttgggctgagcagtcagaagacctggtcgtcgtcttgactttggcaaatgagccggagccccttgggcaggtcacacaacctgtcccagcgagggacaccgagtggcccttcatgtacatccatggtgtgctggcttaaaatgtaattaatcttgtaaatatactcctagtaatttaagattttgtttttaaactggaaataaaagattgtatagtgcatgttttttaaagtcta

SEQ ID NO: 143470 - DNA, 716 bp, Homo sapiens
  Payload ID: 8341
  Gene Symbol: IFNGR2
  Gene Name: interferon gamma receptor 2 (interferon gamma transducer 1)
  ENST ID: ENST00000572016
  CDS Start-End: 1-140
cacagctaactttggagacctaccaagaatggtgcaatgattcagcagctactcatgagatgggagatggtgaacaggcgtgtggagggcggaataatggtccccaaagatgtccacgccctcatcctcagagtccgtgaacctgggaatgtgctgcctgacgtacaaaagggactccgcagatgtgaaccctctttcccagctgcccgctcctcagcacccgaagattcgcctgtacaacgcagagcaggtcctgagttgggagccagtggccctgagcaatagcacgaggcctgttgtctaccaagtgcagtttaaatacaccgacagtaaatggttcacggccgacatcatgtccataggggtgaattgtacacagatcacagcaacagagtgtgacttcactgccgccagtccctcagcaggcttcccaatggatttcaatgtcactctacgccttcgagctgagctgggagcactccattctgcctgggtgacaatgccttggtttcaacactatcggaatgtgactgtcgggcctccagaaaacattgaggtgaccccaggagaaggctccctcatcatcaggttctcctctccctttgacatcgctgatacctccacggcctttttttgttattatgtccattactgggaaaaaggaggaatccaacaggtcaaaggccctttcagaagcaactccatttcattggata

SEQ ID NO: 143471 - DNA, 727 bp, Homo sapiens; identical to SEQ ID NO: 143466
  Payload ID: 8341
  Gene Symbol: IFNGR2
  Gene Name: interferon gamma receptor 2 (interferon gamma transducer 1)
  ENST ID: ENST00000575304
  CDS Start-End: 1-182

SEQ ID NO: 143472 - DNA, 1557 bp, Homo sapiens
  Payload ID: 8341
  Gene Symbol: IFNGR2
  Gene Name: interferon gamma receptor 2 (interferon gamma transducer 1)
  ENST ID: ENST00000573079
  CDS Start-End: 1-998
cacagctaactttggagacctaccaagaatggtgcaatgattcagcagctactcatgaccctctttcccagctgcccgctcctcagcacccgaagattcgcctgtacaacgcagagcaggtcctgagttgggagccagtggccctgagcaatagcacgaggcctgttgtctaccaagtgcagtttaaatacaccgacagtaaatggttcacggccgacatcatgtccataggggtgaattgtacacagatcacagcaacagagtgtgacttcactgccgccagtccctcagcaggcttcccaatggatttcaatgtcactctacgccttcgagctgagctgggagcactccattctgcctgggtgacaatgccttggtttcaacactatcggaatgtgactgtcgggcctccagaaaacattgaggtgaccccaggagaaggctccctcatcatcaggttctcctctccctttgacatcgctgatacctccacggcctttttttgttattatgtccattactgggaaaaaggaggaatccaacaggtcaaaggccctttcagaagcaactccatttcattggataacttaaaaccctccagagtgtactgtttacaagtccaggcacaactgctttggaacaaaagtaacatctttagagtcgggcatttaagcaacatatcttgctacgaaacaatggcagatgcctccactgagcttcagcaagtcatcctgatctccgtgggaacattttcgttgctgtcggtgctggcaggagcctgtttcttcctggtcctgaaatatagaggcctgattaaatactggtttcacactccaccaagcatcccattacagatagaagagtatttaaaagacccaactcagcccatcttagaggccttggacaaggacagctcaccaaaggatgacgtctgggactctgtgtccattatctcgtttccggaaaaggagcaagaagatgttctccaaacgctttgaaccaaagcatgggcctagcccactggctccctggaagagatcaagccatcggagctgctagagttctgtctggactttccagagaccagtattcccttttgctgcctctaaaaggcctgtccctgcagacatgagagacagcaggtctcatgggggtgacaagctttttttttttttcttaaagaattttcaaaatcaaattccagaatgattttacggagatatcccaggaaaattaaggcttctcttaaacactaaaaaggcatgtaattgcttgttagcaaaatggatatgacacatctctgatacttttttcattattggttgggctgagcagtcagaagacctggtcgtcgtcttgactttggcaaatgagccggagccccttgggcaggtcacacaacctgtcccagcgagggacaccgagtggcccttcatgtacatccatggtgtgctggcttaaaatgtaattaatcttgtaaatatactcctagtaatttaagattttgtttttaaactggaaataaaagattgtatagtgcatgttttttaaagtcta

SEQ ID NO: 143473 - DNA, 790 bp, Homo sapiens
  Payload ID: 8341
  Gene Symbol: IFNGR2
  Gene Name: interferon gamma receptor 2 (interferon gamma transducer 1)
  ENST ID: ENST00000573887
  CDS Start-End: 1-41
caccgacagtaaatggttcacggccgacatcatgtccataggggtgaattgtacacagatcacagcaacagagtgtgacttcactgccgccagtccctcagcaggcttcccaatggatttcaatgtcactctacgccttcgagctgagctgggagcactccattctgcctgggtgacaatgccttggtttcaacactatcggaatgtgactgtcgggcctccagaaaacattgaggtgaccccaggagaaggctccctcatcatcaggttctcctctccctttgacatcgctgatacctccacggcctttttttgttattatgtccattactgggaaaaaggaggaatccaacaggtcaaaggccctttcagaagcaactccatttcattggataacttaaaaccctccagagtgtactgtttacaagtccaggcacaactgctttggaacaaaagtaacatctttagagtcgggcatttaagcaacatatcttgctacgaaacaatggcagatgcctccactgagcttcagcaagtcatcctgatctccgtgggaacattttcgttgctgtcggtgctggcaggagcctgtttcttcctggtcctgaaatatagaggcctgattaaatactggtttcacactccaccaagcatcccattacagatagaagagtatttaaaagacccaactcagcccatcttagaggccttggacaaggacagctcaccaaaggatgacgtctgggactctgtgtccattatctcgtttccggaaaaggagcaagaagat

SEQ ID NO: 143474 - DNA, 1533 bp, Homo sapiens
  Payload ID: 8341
  Gene Symbol: IFNGR2
  Gene Name: interferon gamma receptor 2 (interferon gamma transducer 1)
  ENST ID: ENST00000571550
  CDS Start-End: 1-993
ctaactttggagacctaccaagaatggtgcaatgattcagcagctactcatgaccctctttcccagctgcccgctcctcagcacccgaagattcgcctgtacaacgcagagcaggtcctgagttgggagccagtggccctgagcaatagcacgaggcctgttgtctaccaagtgcagtttaaatacaccgacagtaaatggttcacggccgacatcatgtccataggggtgaattgtacacagatcacagcaacagagtgtgacttcactgccgccagtccctcagcaggcttcccaatggatttcaatgtcactctacgccttcgagctgagctgggagcactccattctgcctgggtgacaatgccttggtttcaacactatcggaatgtgactgtcgggcctccagaaaacattgaggtgaccccaggagaaggctccctcatcatcaggttctcctctccctttgacatcgctgatacctccacggcctttttttgttattatgtccattactgggaaaaaggaggaatccaacaggtcaaaggccctttcagaagcaactccatttcattggataacttaaaaccctccagagtgtactgtttacaagtccaggcacaactgctttggaacaaaagtaacatctttagagtcgggcatttaagcaacatatcttgctacgaaacaatggcagatgcctccactgagcttcagcaagtcatcctgatctccgtgggaacattttcgttgctgtcggtgctggcaggagcctgtttcttcctggtcctgaaatatagaggcctgattaaatactggtttcacactccaccaagcatcccattacagatagaagagtatttaaaagacccaactcagcccatcttagaggccttggacaaggacagctcaccaaaggatgacgtctgggactctgtgtccattatctcgtttccggaaaaggagcaagaagatgttctccaaacgctttgaaccaaagcatgggcctagcccactggctccctggaagagatcaagccatcggagctgctagagttctgtctggactttccagagaccagtattcccttttgctgcctctaaaaggcctgtccctgcagacatgagagacagcaggtctcatgggggtgacaagctttttttttttttcttaaagaattttcaaaatcaaattccagaatgattttacggagatatcccaggaaaattaaggcttctcttaaacactaaaaaggcatgtaattgcttgttagcaaaatggatatgacacatctctgatacttttttcattattggttgggctgagcagtcagaagacctggtcgtcgtcttgactttggcaaatgagccggagccccttgggcaggtcacacaacctgtcccagcgagggacaccgagtggcccttcatgtacatccatggtgtgctggcttaaaatgtaattaatcttgtaaatatactcctagtaatttaagattttgtttttaaactggaaataaaagattgtatagt

SEQ ID NO: 143475 - DNA, 844 bp, Homo sapiens
  Payload ID: 8342
  Gene Symbol: IFITM1
  Gene Name: interferon induced transmembrane protein 1
  Uniprot ID: P13164
  ENST ID: ENST00000328221
  CDS Start-End: 340-717
cgttcctgggcctggagggctgctttggggcaggaaactttggccaccaggcctctgacctgcaccaggagacactgggaggtttagtccccaaacccgcacagagcaggactgcagcctgaggaaagagcaaggatttcaggagagaggcctgcgacaagtgagcaggaaatagaaacttaagagaaatacacacttctgagaaactgaaacgacaggggaaaggaggtctcactgagcaccgtcccagcatccggacaccacagcggcccttcgctccacgcagaaaaccacacttctcaaaccttcactcaacacttccttccccaaagccagaagatgcacaaggaggaacatgaggtggctgtgctggggccaccccccagcaccatccttccaaggtccaccgtgatcaacatccacagcgagacctccgtgcccgaccatgtcgtctggtccctgttcaacaccctcttcttgaactggtgctgtctgggcttcatagcattcgcctactccgtgaagtctagggacaggaagatggttggcgacgtgaccggggcccaggcctatgcctccaccgccaagtgcctgaacatctgggccctgattctgggcatcctcatgaccattggattcatcctgttactggtattcggctctgtgacagtctaccatattatgttacagataatacaggaaaaacggggttactagtagccgcccatagcctgcaacctttgcactccactgtgcaatgctggccctgcacgctggggctgttgcccctgcccccttggtcctgcccctagatacagcagtttatacccacacacctgtctac

SEQ ID NO: 143476 - DNA, 855 bp, Homo sapiens
  Payload ID: 8342
  Gene Symbol: IFITM1
  Gene Name: interferon induced transmembrane protein 1
  Uniprot ID: P13164
  ENST ID: ENST00000408968
  CDS Start-End: 319-696
ctagtcctgacttgagtttctgatgaggaagcctctctccttagccttcagcctttcctcccaccctgccataaagtaatttgatcctcaagaagttaaaccacacctcattggtccctggctaattcaccaatttacaaacagcaggaaatagaaacttaagagaaatacacacttctgagaaactgaaacgacaggggaaaggaggtctcactgagcaccgtcccagcatccggacaccacagcggcccttcgctccacgcagaaaaccacacttctcaaaccttcactcaacacttccttccccaaagccagaagatgcacaaggaggaacatgaggtggctgtgctggggccaccccccagcaccatccttccaaggtccaccgtgatcaacatccacagcgagacctccgtgcccgaccatgtcgtctggtccctgttcaacaccctcttcttgaactggtgctgtctgggcttcatagcattcgcctactccgtgaagtctagggacaggaagatggttggcgacgtgaccggggcccaggcctatgcctccaccgccaagtgcctgaacatctgggccctgattctgggcatcctcatgaccattggattcatcctgttactggtattcggctctgtgacagtctaccatattatgttacagataatacaggaaaaacggggttactagtagccgcccatagcctgcaacctttgcactccactgtgcaatgctggccctgcacgctggggctgttgcccctgcccccttggtcctgcccctagatacagcagtttatacccacacacctgtctacagtgtcattcaataaagtgcacgtgcttgtga

SEQ ID NO: 143477 - DNA, 730 bp, Homo sapiens
  Payload ID: 8342
  Gene Symbol: IFITM1
  Gene Name: interferon induced transmembrane protein 1
  Uniprot ID: P13164
  ENST ID: ENST00000528780
  CDS Start-End: 194-571
gtcagttctccccagagtccccgttcctgggcctggagggctgctttggggcaggaaactttggccaccaggcctctgacctgcaccaggagacactgggaggtttagtccccaaacccgcacagagcaggactgcagcctgaggaaagagcaaggatttcaggagagaggcctgcgacaagtgagccagaagatgcacaaggaggaacatgaggtggctgtgctggggccaccccccagcaccatccttccaaggtccaccgtgatcaacatccacagcgagacctccgtgcccgaccatgtcgtctggtccctgttcaacaccctcttcttgaactggtgctgtctgggcttcatagcattcgcctactccgtgaagtctagggacaggaagatggttggcgacgtgaccggggcccaggcctatgcctccaccgccaagtgcctgaacatctgggccctgattctgggcatcctcatgaccattggattcatcctgttactggtattcggctctgtgacagtctaccatattatgttacagataatacaggaaaaacggggttactagtagccgcccatagcctgcaacctttgcactccactgtgcaatgctggccctgcacgctggggctgttgcccctgcccccttggtcctgcccctagatacagcagtttatacccacacacctgtctacagtgtcattcaataaagtgcacgtgcttgtga

SEQ ID NO: 143478 - DNA, 3706 bp, Homo sapiens
  Payload ID: 8343
  Gene Symbol: IFITM10
  Gene Name: interferon induced transmembrane protein 10
  Uniprot ID: A6NMD0
  ENST ID: ENST00000340134
  CDS Start-End: 150-836
aagggttcagagtcaggcacaggcaggcagacaggaccccaagcaggactggccttccagacaggaaagagggttgcggagacacaggaggccagttgagagtggcagaggagaaaggagtttcatgggaggatggggcttggagagagatgagggagggaaaacgggggccgccatgcatcctcagcttccgggggactttggagagggtcgaggctcagtgggagctggaggcccagggccccggccagtgcccagccccgctgggagacccggccagcaccacggacggcgcccaggaagcccgagtccccctggacggggccttctggattccgaggcccccggcaggttcgcccaagggctgcttcgcttgcgtgtccaagccccctgccctgcaggctccggcggcccctgcccctgagccctcggcctctcccccgatggcgcccacactgttccccatggagtccaagagcagcaagaccgacagcgtgcgggctgccggcgcgccccctgcctgcaagcacctagccgagaagaagacgatgaccaaccccacgaccgtcatcgaggtctacccggacaccaccgaggtgaacgactattacctgtggtccatcttcaacttcgtctacctcaacttctgctgcctgggcttcatcgccttggcctactccctcaaagtgcgagacaagaagcttctcaatgacctgaatggagccgtggaggatgcaaagacggcccggctgttcaacatcaccagttctgccctggcagcctcctgcatcatcctcgtcttcatcttcctgcggtaccccctcaccgactactaaggcccgccaggcacggctgctggcggagacaagcactgagacatgtttattctcatggtccctgaaacgcaggatcccatgaggttggggcagggcagggcttcttgtcctggggcccccttgagctgtgaactgggcagcaaggccatcagaagctgagtacagcaagggggcagtgagcttggccctcagtccaccccctccgcctcctggcctccaccctgcctgtgtctggggcctgggggcttctcccctcgctgctgcaccctggcttccagcgtctgtgtccctgccctcacgtgccccttcccaggctcctggggccccttggacctgacacctagcaggaagggcttatgcaaaattgtcccaggttgggaggactcactctgtgctccccgaccctgcctcctccacgatgtgaccccgctcagagcccttgtgtctgtgaactttcaatgaaatacccatgcagctccagcccagccttctactttgtgtccctggcagggcctggagaagtctggaggctttgcaatcctccctcaggaactgcctggcggtcagggccccgggtgctgtgtcccaacagactgcaggggacggtctgctccatcacagctgtgccagacagtgaatgggaagggggggcatttggtggaggtaccccaaactcgagtcacttagagggtcaggcagcctcctggggggacggaagggggtggggcacagcctcagctgcctgcattggccaaatcagagcaaaggaaaccacaaattcactcggaaggaagcagcaggcagagacgatagacgcctggctaacccctgtccctcctggagggctctgggacctggacaggcccctttacctctctcgtgcccatctccttagctgtaaaataggaaaatggcctttcacttctataatcactgtgaaaatgaacggaagatgcctttcaaaggccgaggccagcgccctgacggcccatggcatgtgcagtccacaatgtgggaggcaggatgcagggatgggctctgtccccttggaactcaggcacagtcatgggggtgccggtcagccctgaagacaagctgatgagggtgcactaggaaaagtgcagggcatcggcgaggcacacgaaggaggtggggaggtgaagatggagaagaagccgaggcagtggccatgggtgtggagcttcgcgctgtgggtgcccagctggtctgggaaaccgcaggaaatcccgcagctcaggtgcgcagtgggaaggacttgctattccgtgggaaggcaggcaaaccttcccagggaaggggcatggccgtgcgcctcatgttttgggaagctcgtgccctctggggtagcgaggccagcttggaggggagtccagtggacagaggtggatgcaagtggagggagctgagcctgggctggggctggcagcagagggctggacagcagggcgcctgcgtggcagctgtgcagtcagtggggttgactggtttggaaggtaaggtgggggagaagcccggaggattcctgtcccttgacttggacagcccagtggagagggctgtgtaccaagggcaggaaaccagggagaagaagatgttgactttaagataccaagcagagaagggaagagccttctgggctggagacgtggggtgcctcagaagggaggaccttgagctagcagcagatgggacaaacgcaggggacagggcacagccgtggcaggagtgcagcgagcaagattctggtcacagtcctgacccagaaacctgcagaggaagggagggtggccagcacctgcccgtgggcctggggtgcagcccaggcagaggtggatggagggggtgctcagggaagaggggaggggagtgtgtgacctcaaaatgggagggcttgggggtcagagtcgagagaggggacagggtggggaccatgtgggactcttgagcactgacccttgaacccaggcagtggtgggatgggagggcaggaggcggcgggctgcgaggctgatgcggggctgcacggagctgtcattgagcctcttggaggatggtgggagaagtgccaggggcggctgaaagccttgccgagactgtgggcagcctggttgtgggcacttcggatgcttgcaccattagacccagaggcttcctggacaagcctgggctggaagaggatggcagaggctgctgggccttggaagagagagggtcctggcttctagttcctggggcagctaaggccaaccccagtgtccaggtgtcttccatgttatgcctgggagggaagaaagtagaggggcaaatgctttctttgcctattttccttaaacatttggtggcagtgctggtggctgcctgggacaggggccaggaggaaacacccctgcattagggaagccctcagccagcttttccctgggatgttcctgcgcctggctgaagctttctgagttcatgttggggaaatggaacggtcaccttccagccagtaaaggcacccctagctcttgggatgtttgtatccaactccgggcaatgtggggctacaaaggcccctggcttccataccctggggaccgggggagggctggtgctcccgcggtgggtgtccacggtgaggtcaggcccccacagcaggtgcattctcgccctcagcaggcaggcaagcaggcatcagctccggcgctggtctctggcttcgaagtctgtgtctttgcctgtctgtactcatgcctgacctgctggcgctccctgtccactgcactcctcccacctcatttttatgtgattttgcacagtgcctggcagacatttgacattcaataaacattgtacgaacgaaagaa

SEQ ID NO: 143479 - DNA, 3807 bp, Homo sapiens
  Payload ID: 8343
  Gene Symbol: IFITM10
  Gene Name: interferon induced transmembrane protein 10
  ENST ID: ENST00000382123
  CDS Start-End: 139-525
gtcaggcacaggcaggcagacaggaccccaagcaggactggccttccagacaggaaagagggttgcggagacacaggaggccagttgagagtggcagaggagaaaggagtttcatgggaggatggggcttggagagagatgagggagggaaaacgggggccgccatgcatcctcagcttccgggggactttggagagggtcgaggctcagtgggagctggaggttgggccgctgggaggcggatcagtggacagacagcggcccgcgggacggcggaaggacgcgcgcaccgaggctcagggggtccggccgcgcgccgaggagtcgcttgtaggcccagggccccggccagtgcccagccccgctgggagacccggccagcaccacggacggcgcccaggaagcccgagtccccctggacggggccttctggattccgaggcccccggcaggttcgcccaagggctgcttcgcttgcgtgtccaagccccctgccctgcaggctccggcggcccctgcccctgagccctcggcctctcccccgatggcgcccacactgttccccatggagtccaagagcagcaagaccgacagcgtgcgggctgccggcgcgccccctgcctgcaagcacctagccgagaagaagacgatgaccaaccccacgaccgtcatcgaggtctacccggacaccaccgaggtgaacgactattacctgtggtccatcttcaacttcgtctacctcaacttctgctgcctgggcttcatcgccttggcctactccctcaaagtgcgagacaagaagcttctcaatgacctgaatggagccgtggaggatgcaaagacggcccggctgttcaacatcaccagttctgccctggcagcctcctgcatcatcctcgtcttcatcttcctgcggtaccccctcaccgactactaaggcccgccaggcacggctgctggcggagacaagcactgagacatgtttattctcatggtccctgaaacgcaggatcccatgaggttggggcagggcagggcttcttgtcctggggcccccttgagctgtgaactgggcagcaaggccatcagaagctgagtacagcaagggggcagtgagcttggccctcagtccaccccctccgcctcctggcctccaccctgcctgtgtctggggcctgggggcttctcccctcgctgctgcaccctggcttccagcgtctgtgtccctgccctcacgtgccccttcccaggctcctggggccccttggacctgacacctagcaggaagggcttatgcaaaattgtcccaggttgggaggactcactctgtgctccccgaccctgcctcctccacgatgtgaccccgctcagagcccttgtgtctgtgaactttcaatgaaatacccatgcagctccagcccagccttctactttgtgtccctggcagggcctggagaagtctggaggctttgcaatcctccctcaggaactgcctggcggtcagggccccgggtgctgtgtcccaacagactgcaggggacggtctgctccatcacagctgtgccagacagtgaatgggaagggggggcatttggtggaggtaccccaaactcgagtcacttagagggtcaggcagcctcctggggggacggaagggggtggggcacagcctcagctgcctgcattggccaaatcagagcaaaggaaaccacaaattcactcggaaggaagcagcaggcagagacgatagacgcctggctaacccctgtccctcctggagggctctgggacctggacaggcccctttacctctctcgtgcccatctccttagctgtaaaataggaaaatggcctttcacttctataatcactgtgaaaatgaacggaagatgcctttcaaaggccgaggccagcgccctgacggcccatggcatgtgcagtccacaatgtgggaggcaggatgcagggatgggctctgtccccttggaactcaggcacagtcatgggggtgccggtcagccctgaagacaagctgatgagggtgcactaggaaaagtgcagggcatcggcgaggcacacgaaggaggtggggaggtgaagatggagaagaagccgaggcagtggccatgggtgtggagcttcgcgctgtgggtgcccagctggtctgggaaaccgcaggaaatcccgcagctcaggtgcgcagtgggaaggacttgctattccgtgggaaggcaggcaaaccttcccagggaaggggcatggccgtgcgcctcatgttttgggaagctcgtgccctctggggtagcgaggccagcttggaggggagtccagtggacagaggtggatgcaagtggagggagctgagcctgggctggggctggcagcagagggctggacagcagggcgcctgcgtggcagctgtgcagtcagtggggttgactggtttggaaggtaaggtgggggagaagcccggaggattcctgtcccttgacttggacagcccagtggagagggctgtgtaccaagggcaggaaaccagggagaagaagatgttgactttaagataccaagcagagaagggaagagccttctgggctggagacgtggggtgcctcagaagggaggaccttgagctagcagcagatgggacaaacgcaggggacagggcacagccgtggcaggagtgcagcgagcaagattctggtcacagtcctgacccagaaacctgcagaggaagggagggtggccagcacctgcccgtgggcctggggtgcagcccaggcagaggtggatggagggggtgctcagggaagaggggaggggagtgtgtgacctcaaaatgggagggcttgggggtcagagtcgagagaggggacagggtggggaccatgtgggactcttgagcactgacccttgaacccaggcagtggtgggatgggagggcaggaggcggcgggctgcgaggctgatgcggggctgcacggagctgtcattgagcctcttggaggatggtgggagaagtgccaggggcggctgaaagccttgccgagactgtgggcagcctggttgtgggcacttcggatgcttgcaccattagacccagaggcttcctggacaagcctgggctggaagaggatggcagaggctgctgggccttggaagagagagggtcctggcttctagttcctggggcagctaaggccaaccccagtgtccaggtgtcttccatgttatgcctgggagggaagaaagtagaggggcaaatgctttctttgcctattttccttaaacatttggtggcagtgctggtggctgcctgggacaggggccaggaggaaacacccctgcattagggaagccctcagccagcttttccctgggatgttcctgcgcctggctgaagctttctgagttcatgttggggaaatggaacggtcaccttccagccagtaaaggcacccctagctcttgggatgtttgtatccaactccgggcaatgtggggctacaaaggcccctggcttccataccctggggaccgggggagggctggtgctcccgcggtgggtgtccacggtgaggtcaggcccccacagcaggtgcattctcgccctcagcaggcaggcaagcaggcatcagctccggcgctggtctctggcttcgaagtctgtgtctttgcctgtctgtactcatgcctgacctgctggcgctccctgtccactgcactcctcccacctcatttttatgtgattttgcacagtgcctggcagacatttgacattcaataaacattgtacgaacgaaagaa

SEQ ID NO: 143480 - DNA, 3020 bp, Homo sapiens
  Payload ID: 8343
  Gene Symbol: IFITM10
  Gene Name: interferon induced transmembrane protein 10
  ENST ID: ENST00000630256
  CDS Start-End: 1-150
gtgcgagacaagaagcttctcaatgacctgaatggagccgtggaggatgcaaagacggcccggctgttcaacatcaccagttctgccctggcagcctcctgcatcatcctcgtcttcatcttcctgcggtaccccctcaccgactactaaggcccgccaggcacggctgctggcggagacaagcactgagacatgtttattctcatggtccctgaaacgcaggatcccatgaggttggggcagggcagggcttcttgtcctggggcccccttgagctgtgaactgggcagcaaggccatcagaagctgagtacagcaagggggcagtgagcttggccctcagtccaccccctccgcctcctggcctccaccctgcctgtgtctggggcctgggggcttctcccctcgctgctgcaccctggcttccagcgtctgtgtccctgccctcacgtgccccttcccaggctcctggggccccttggacctgacacctagcaggaagggcttatgcaaaattgtcccaggttgggaggactcactctgtgctccccgaccctgcctcctccacgatgtgaccccgctcagagcccttgtgtctgtgaactttcaatgaaatacccatgcagctccagcccagccttctactttgtgtccctggcagggcctggagaagtctggaggctttgcaatcctccctcaggaactgcctggcggtcagggccccgggtgctgtgtcccaacagactgcaggggacggtctgctccatcacagctgtgccagacagtgaatgggaagggggggcatttggtggaggtaccccaaactcgagtcacttagagggtcaggcagcctcctggggggacggaagggggtggggcacagcctcagctgcctgcattggccaaatcagagcaaaggaaaccacaaattcactcggaaggaagcagcaggcagagacgatagacgcctggctaacccctgtccctcctggagggctctgggacctggacaggcccctttacctctctcgtgcccatctccttagctgtaaaataggaaaatggcctttcacttctataatcactgtgaaaatgaacggaagatgcctttcaaaggccgaggccagcgccctgacggcccatggcatgtgcagtccacaatgtgggaggcaggatgcagggatgggctctgtccccttggaactcaggcacagtcatgggggtgccggtcagccctgaagacaagctgatgagggtgcactaggaaaagtgcagggcatcggcgaggcacacgaaggaggtggggaggtgaagatggagaagaagccgaggcagtggccatgggtgtggagcttcgcgctgtgggtgcccagctggtctgggaaaccgcaggaaatcccgcagctcaggtgcgcagtgggaaggacttgctattccgtgggaaggcaggcaaaccttcccagggaaggggcatggccgtgcgcctcatgttttgggaagctcgtgccctctggggtagcgaggccagcttggaggggagtccagtggacagaggtggatgcaagtggagggagctgagcctgggctggggctggcagcagagggctggacagcagggcgcctgcgtggcagctgtgcagtcagtggggttgactggtttggaaggtaaggtgggggagaagcccggaggattcctgtcccttgacttggacagcccagtggagagggctgtgtaccaagggcaggaaaccagggagaagaagatgttgactttaagataccaagcagagaagggaagagccttctgggctggagacgtggggtgcctcagaagggaggaccttgagctagcagcagatgggacaaacgcaggggacagggcacagccgtggcaggagtgcagcgagcaagattctggtcacagtcctgacccagaaacctgcagaggaagggagggtggccagcacctgcccgtgggcctggggtgcagcccaggcagaggtggatggagggggtgctcagggaagaggggaggggagtgtgtgacctcaaaatgggagggcttgggggtcagagtcgagagaggggacagggtggggaccatgtgggactcttgagcactgacccttgaacccaggcagtggtgggatgggagggcaggaggcggcgggctgcgaggctgatgcggggctgcacggagctgtcattgagcctcttggaggatggtgggagaagtgccaggggcggctgaaagccttgccgagactgtgggcagcctggttgtgggcacttcggatgcttgcaccattagacccagaggcttcctggacaagcctgggctggaagaggatggcagaggctgctgggccttggaagagagagggtcctggcttctagttcctggggcagctaaggccaaccccagtgtccaggtgtcttccatgttatgcctgggagggaagaaagtagaggggcaaatgctttctttgcctattttccttaaacatttggtggcagtgctggtggctgcctgggacaggggccaggaggaaacacccctgcattagggaagccctcagccagcttttccctgggatgttcctgcgcctggctgaagctttctgagttcatgttggggaaatggaacggtcaccttccagccagtaaaggcacccctagctcttgggatgtttgtatccaactccgggcaatgtggggctacaaaggcccctggcttccataccctggggaccgggggagggctggtgctcccgcggtgggtgtccacggtgaggtcaggcccccacagcaggtgcattctcgccctcagcaggcaggcaagcaggcatcagctccggcgctggtctctggcttcgaagtctgtgtctttgcctgtctgtactcatgcctgacctgctggcgctccctgtccactgcactcctcccacctcatttttatgtgattttgcacagtgcctggcagacatttgacattcaataaacattgtacgaacgaaagaa

SEQ ID NO: 143481 - DNA, 382 bp, Homo sapiens
  Payload ID: 8344
  Gene Symbol: IFITM2
  Gene Name: interferon induced transmembrane protein 2
  ENST ID: ENST00000399815
  CDS Start-End: 1-223
gggcttcatagcattcgcgtactccgtgaagtctagggacaggaagatggttggcgacgtgaccggggcccaggcctatgcctccaccgccaagtgcctgaacatctgggccctgattctgggcatcctcatgaccattggattcatcctgttactggtattcggctctgtgacagtctaccatattatgttacagataatacaggaaaaacggggttactagtagccgcccatagcctgcaacctttgcactccactgtgcaatgctggccctgcacgctggggctgttgcccctgcccccttggtcctgcccctagatacagcagtttatacccacacacctgtctacagtgtcattcaataaagtgcacgtgcttgtga

SEQ ID NO: 143482 - DNA, 659 bp, Homo sapiens
  Payload ID: 8344
  Gene Symbol: IFITM2
  Gene Name: interferon induced transmembrane protein 2
  Uniprot ID: Q01629
  ENST ID: ENST00000399817
  CDS Start-End: 31-429
atcccggtaacccgatcaccgctggtcaccatgaaccacattgtgcaaaccttctctcctgtcaacagcggccagcctcccaactacgagatgctcaaggaggagcaggaagtggctatgctgggggtgccccacaaccctgctcccccgatgtccaccgtgatccacatccgcagcgagacctccgtgcctgaccatgtggtctggtccctgttcaacaccctcttcatgaacacctgctgcctgggcttcatagcattcgcgtactccgtgaagtctagggacaggaagatggttggcgacgtgaccggggcccaggcctatgcctccaccgccaagtgcctgaacatctgggccctgattttgggcatcttcatgaccattctgctcatcatcatcccagtgttggtcgtccaggcccagcgatagatcaggaggcatcattgaggccaggagctctgcccgtgacctgtatcccacgtactctatcttccattcctcgccctgcccccagaggccaggagctctgcccttgacctgtattccacttactccaccttccattcctcgccctgtccccacagccgagtcctgcatcagccctttatcctcacacgcttttctacaatggcattcaataaagtgtatatgtttctggt

SEQ ID NO: 143483 - DNA, 634 bp, Homo sapiens
  Payload ID: 8344
  Gene Symbol: IFITM2
  Gene Name: interferon induced transmembrane protein 2
  ENST ID: ENST00000527146
  CDS Start-End: 1-167
ccgtgatccacatccgcagcgagacctccgtgcctgaccatgtggtctggtccctgttcaacaccctcttcatgaacacctgctgcctgggcttcatagcattcgcgtactccgtgaagactggcacccaggctctcccagaaagtgagaagggaactcacaggtgacttcaccccatggtggggagaacagcctgtgctggggccaaggcagaaggaggatgagccccgaggctcctggagagtctgagccggtctagggacaggaagatggttggcgacgtgaccggggcccaggcctatgcctccaccgccaagtgcctgaacatctgggccctgattttgggcatcttcatgaccattctgctcatcatcatcccagtgttggtcgtccaggcccagcgatagatcaggaggcatcattgaggccaggagctctgcccgtgacctgtatcccacgtactctatcttccattcctcgccctgcccccagaggccaggagctctgcccttgacctgtattccacttactccaccttccattcctcgccctgtccccacagccgagtcctgcatcagccctttatcctcacacgcttttctacaatggcattcaataaagtgtatatgtttct

SEQ ID NO: 143484 - DNA, 588 bp, Homo sapiens
  Payload ID: 8344
  Gene Symbol: IFITM2
  Gene Name: interferon induced transmembrane protein 2
  ENST ID: ENST00000533141
  CDS Start-End: 185-523
gtgcccgccatcacacccggctaatttttttttgtatatttagtagagacggggtttcaccgtgttagccaggatggtctcgatctcctgacctcatgatcctcccacctcagcctcccaaagtgctgggattacaggcgtgagccacggcgcccggcagagcggccagcctcccaactacgagatgctcaaggaggagcaggaagtggctatgctgggggtgccccacaaccctgctcccccgatgtccaccgtgatccacatccgcagcgagacctccgtgcctgaccatgtggtctggtccctgttcaacaccctcttcatgaacacctgctgcctgggcttcatagcattcgcgtactccgtgaagtctagggacaggaagatggttggcgacgtgaccggggcccaggcctatgcctccaccgccaagtgcctgaacatctgggccctgattttgggcatcttcatgaccattctgctcatcatcatcccagtgttggtcgtccaggcccagcgatagatcaggaggcatcattgaggccaggagctctgcccgtgacctgtatcccacgtactctatcttcc

SEQ ID NO: 143485 - DNA, 605 bp, Homo sapiens
  Payload ID: 8344
  Gene Symbol: IFITM2
  Gene Name: interferon induced transmembrane protein 2
  ENST ID: ENST00000602569
  CDS Start-End: 37-375
tctcctgtcaacagcggccagcctcccaactacgagatgctcaaggaggagcaggaagtggctatgctgggggtgccccacaaccctgctcccccgatgtccaccgtgatccacatccgcagcgagacctccgtgcctgaccatgtggtctggtccctgttcaacaccctcttcatgaacacctgctgcctgggcttcatagcattcgcgtactccgtgaagtctagggacaggaagatggttggcgacgtgaccggggcccaggcctatgcctccaccgccaagtgcctgaacatctgggccctgattttgggcatcttcatgaccattctgctcatcatcatcccagtgttggtcgtccaggcccagcgatagatcaggaggcatcattgaggccaggagctctgcccgtgacctgtatcccacgtactctatcttccattcctcgccctgcccccagaggccaggagctctgcccttgacctgtattccacttactccaccttccattcctcgccctgtccccacagccgagtcctgcatcagccctttatcctcacacgcttttctacaatggcattcaataaagtgtatatgtttctggt

SEQ ID NO: 143486 - DNA, 892 bp, Homo sapiens
  Payload ID: 8344
  Gene Symbol: IFITM2
  Gene Name: interferon induced transmembrane protein 2
  Uniprot ID: Q01629
  ENST ID: ENST00000616316
  CDS Start-End: 267-665
agtctccaggaccccacaccactaacaagatgagacttgtgctcctttgggctctagagaggaagcccctcttagccctcagcccctctttcctccctctcctaaagtaatttgatcctcaggaatttgttctgcccttatctggccctggccagctctgcatttgacaaatgccaggaagaggaaactgttgagaaaacggaactactggggaaagggagggctcactgagaaccatcccggtaacccgatcaccgctggtcaccatgaaccacattgtgcaaaccttctctcctgtcaacagcggccagcctcccaactacgagatgctcaaggaggagcaggaagtggctatgctgggggtgccccacaaccctgctcccccgatgtccaccgtgatccacatccgcagcgagacctccgtgcctgaccatgtggtctggtccctgttcaacaccctcttcatgaacacctgctgcctgggcttcatagcattcgcgtactccgtgaagtctagggacaggaagatggttggcgacgtgaccggggcccaggcctatgcctccaccgccaagtgcctgaacatctgggccctgattttgggcatcttcatgaccattctgctcatcatcatcccagtgttggtcgtccaggcccagcgatagatcaggaggcatcattgaggccaggagctctgcccgtgacctgtatcccacgtactctatcttccattcctcgccctgcccccagaggccaggagctctgcccttgacctgtattccacttactccaccttccattcctcgccctgtccccacagccgagtcctgcatcagccctttatcctcacacgcttttctacaatggcattcaataaagtgtatatgtttct

SEQ ID NO: 143487 - DNA, 808 bp, Homo sapiens
  Payload ID: 8345
  Gene Symbol: IFITM3
  Gene Name: interferon induced transmembrane protein 3
  Uniprot ID: Q01628
  ENST ID: ENST00000399808
  CDS Start-End: 238-639
tgctcccttgggctctagagaggaagcccctcttagccctcagcccctctttcctccctctcctaaagtaatttgatcctcaggaatttgttccgccctcatctggccccggccaaatcccgatttgacaaatgccaggaaaaggaaactgttgagaaaccgaaactactggggaaagggagggctcactgagaaccatcccagtaacccgaccgccgctggtcttcgctggacaccatgaatcacactgtccaaaccttcttctctcctgtcaacagtggccagccccccaactatgagatgctcaaggaggagcacgaggtggctgtgctgggggcgccccacaaccctgctcccccgacgtccaccgtgatccacatccgcagcgagacctccgtgcccgaccatgtcgtctggtccctgttcaacaccctcttcatgaacccctgctgcctgggcttcatagcattcgcctactccgtgaagtctagggacaggaagatggttggcgacgtgaccggggcccaggcctatgcctccaccgccaagtgcctgaacatctgggccctgattctgggcatcctcatgaccattctgctcatcgtcatcccagtgctgatcttccaggcctatggatagatcaggaggcatcactgaggccaggagctctgcccatgacctgtatcccacgtactccaacttccattcctcgccctgcccccggagccgagtcctgtatcagccctttatcctcacacgcttttctacaatggcattcaataaagtgcacgtgtttctggtgctgctg

SEQ ID NO: 143488 - DNA, 543 bp, Homo sapiens
  Payload ID: 8345
  Gene Symbol: IFITM3
  Gene Name: interferon induced transmembrane protein 3
  ENST ID: ENST00000526811
  CDS Start-End: 140-478
gagacggggtttcaccgtgtcagccaggatggtctcgatctcctgacctcatgatcctcccacctcagcctcccaaagtgctgggattacaggcgtgagccgcggcgcccggcagagtggccagccccccaactatgagatgctcaaggaggagcacgaggtggctgtgctgggggcgccccacaaccctgctcccccgacgtccaccgtgatccacatccgcagcgagacctccgtgcccgaccatgtcgtctggtccctgttcaacaccctcttcatgaacccctgctgcctgggcttcatagcattcgcctactccgtgaagtctagggacaggaagatggttggcgacgtgaccggggcccaggcctatgcctccaccgccaagtgcctgaacatctgggccctgattctgggcatcctcatgaccattctgctcatcgtcatcccagtgctgatcttccaggcctatggatagatcaggaggcatcactgaggccaggagctctgcccatgacctgtatcccacgtactccaacttcc

SEQ ID NO: 143489 - DNA, 713 bp, Homo sapiens
  Payload ID: 8345
  Gene Symbol: IFITM3
  Gene Name: interferon induced transmembrane protein 3
  ENST ID: ENST00000602735
  CDS Start-End: 310-648
tcctcagagcgcagccaggccagaggctgcaccgaggtgcagaatcagaggaggcaccggagaccccagagtccagtctgagacggcacagggagcaggtctctggtggccttgacaagctccaggatagggtggggaggggactggaccctggggacctcagagcagagcaggggaaacaggagcccccacctggggagagggggcctcctctccaggaaccccaatcaagacgagcctcacgtgactcccacttcctcttggagggtgcaggggcctctcctgagtggccagccccccaactatgagatgctcaaggaggagcacgaggtggctgtgctgggggcgccccacaaccctgctcccccgacgtccaccgtgatccacatccgcagcgagacctccgtgcccgaccatgtcgtctggtccctgttcaacaccctcttcatgaacccctgctgcctgggcttcatagcattcgcctactccgtgaagtctagggacaggaagatggttggcgacgtgaccggggcccaggcctatgcctccaccgccaagtgcctgaacatctgggccctgattctgggcatcctcatgaccattctgctcatcgtcatcccagtgctgatcttccaggcctatggatagatcaggaggcatcactgaggccaggagctctgcccatgacctgtatcccacgtactccaacttcc

SEQ ID NO: 143490 - DNA, 500 bp, Homo sapiens
  Payload ID: 8345
  Gene Symbol: IFITM3
  Gene Name: interferon induced transmembrane protein 3
  ENST ID: ENST00000531688
  CDS Start-End: 1-167
ccgtgatccacatccgcagcgagacctccgtgcccgaccatgtcgtctggtccctgttcaacaccctcttcatgaacccctgctgcctgggcttcatagcattcgcctactccgtgaagactggcacccaggctctcccagaaagtgagaagggaactcacaggtgacttcaccccatggtggggagaacagcctgtgctgaggtcaaggcagaaggaggatgagccccgaggctcctggagagtctgagcccggtctagggacaggaagatggttggcgacgtgaccggggcccaggcctatgcctccaccgccaagtgcctgaacatctgggccctgattctgggcatcctcatgaccattctgctcatcgtcatcccagtgctgatcttccaggcctatggatagatcaggaggcatcactgaggccaggagctctgcccatgacctgtatcccacgtactccaacttccattcctcgccctgcccccggagccgag

SEQ ID NO: 143491 - DNA, 736 bp, Homo sapiens
  Payload ID: 8346
  Gene Symbol: IFITM5
  Gene Name: interferon induced transmembrane protein 5
  Uniprot ID: A6NNB3
  ENST ID: ENST00000382614
  CDS Start-End: 37-435
accagtctgagtgtggaagagacggcgctggaacccatggacacggcgtatccccgcgaggacacccgggcccccacgcccagcaaggccggtgcccacacagccctcacactgggggccccgcaccccccgcctcgagaccacttgatctggtcggtgttcagcaccctctacctgaatctgtgttgcctcggcttcctggcgctggcctactccatcaaggcccgagatcagaaggtggttggtgacctggaagcggcccggcgttttggctccaaagccaagtgctacaacatcctggccgcgatgtggacgctggtgccgccactgctgctcctggggctggtggtgactggtgccctgcacctggcccggctggccaaggactctgccgccttcttcagcaccaagtttgatgacgcggactatgactgacaggctgggtcctgatctggggcactagccccaggacactgaccccaggctgctgcccctggggcccaatactgactccccggagcctggccctccttctgtggggcctccatccctgccccatcctgatcctggggccctccagccccaacatgggcacctaaggctgaaccagtcagaccccggggtcttcaccctaacccgagagttcccgggccctaactctgcccccgatcctgcccctccctcctcacactccaggcccctcggttccacgattaaaagtgcctggttccagaaa

SEQ ID NO: 143492 - DNA, 3595 bp, Homo sapiens
  Payload ID: 8347
  Gene Symbol: IFIH1
  Gene Name: interferon induced with helicase C domain 1
  Uniprot ID: Q9BYX4
  ENST ID: ENST00000263642
  CDS Start-End: 397-3474
aacagaaaccaaagtcaggcaaactctgtaagaactgcctgacagaaagctggactcaaagctcctacccgagtgtgcagcaggatcgccccggtccgggaccccaggcgcacaccgcagagtccaaagtgccgcgcctgccggccgcacctgcctgccgcggccccgcgcgccgccccgctgcccacctgcccgcctgcccacctgcccaggtgcgagtgcagccccgcgcgccggcctgagagccctgtggacaacctcgtcattgtcaggcacagagcggtagaccctgcttctctaagtgggcagcggacagcggcacgcacatttcacctgtcccgcagacaacagcaccatctgcttgggagaaccctctcccttctctgagaaagaaagatgtcgaatgggtattccacagacgagaatttccgctatctcatctcgtgcttcagggccagggtgaaaatgtacatccaggtggagcctgtgctggactacctgacctttctgcctgcagaggtgaaggagcagattcagaggacagtcgccacctccgggaacatgcaggcagttgaactgctgctgagcaccttggagaagggagtctggcaccttggttggactcgggaattcgtggaggccctccggagaaccggcagccctctggccgcccgctacatgaaccctgagctcacggacttgccctctccatcgtttgagaacgctcatgatgaatatctccaactgctgaacctccttcagcccactctggtggacaagcttctagttagagacgtcttggataagtgcatggaggaggaactgttgacaattgaagacagaaaccggattgctgctgcagaaaacaatggaaatgaatcaggtgtaagagagctactaaaaaggattgtgcagaaagaaaactggttctctgcatttctgaatgttcttcgtcaaacaggaaacaatgaacttgtccaagagttaacaggctctgattgctcagaaagcaatgcagagattgagaatttatcacaagttgatggtcctcaagtggaagagcaacttctttcaaccacagttcagccaaatctggagaaggaggtctggggcatggagaataactcatcagaatcatcttttgcagattcttctgtagtttcagaatcagacacaagtttggcagaaggaagtgtcagctgcttagatgaaagtcttggacataacagcaacatgggcagtgattcaggcaccatgggaagtgattcagatgaagagaatgtggcagcaagagcatccccggagccagaactccagctcaggccttaccaaatggaagttgcccagccagccttggaagggaagaatatcatcatctgcctccctacagggagtggaaaaaccagagtggctgtttacattgccaaggatcacttagacaagaagaaaaaagcatctgagcctggaaaagttatagttcttgtcaataaggtactgctagttgaacagctcttccgcaaggagttccaaccatttttgaagaaatggtatcgtgttattggattaagtggtgatacccaactgaaaatatcatttccagaagttgtcaagtcctgtgatattattatcagtacagctcaaatccttgaaaactccctcttaaacttggaaaatggagaagatgctggtgttcaattgtcagacttttccctcattatcattgatgaatgtcatcacaccaacaaagaagcagtgtataataacatcatgaggcattatttgatgcagaagttgaaaaacaatagactcaagaaagaaaacaaaccagtgattccccttcctcagatactgggactaacagcttcacctggtgttggaggggccacgaagcaagccaaagctgaagaacacattttaaaactatgtgccaatcttgatgcatttactattaaaactgttaaagaaaaccttgatcaactgaaaaaccaaatacaggagccatgcaagaagtttgccattgcagatgcaaccagagaagatccatttaaagagaaacttctagaaataatgacaaggattcaaacttattgtcaaatgagtccaatgtcagattttggaactcaaccctatgaacaatgggccattcaaatggaaaaaaaagctgcaaaagaaggaaatcgcaaagaacgtgtttgtgcagaacatttgaggaagtacaatgaggccctacaaattaatgacacaattcgaatgatagatgcgtatactcatcttgaaactttctataatgaagagaaagataagaagtttgcagtcatagaagatgatagtgatgagggtggtgatgatgagtattgtgatggtgatgaagatgaggatgatttaaagaaacctttgaaactggatgaaacagatagatttctcatgactttattttttgaaaacaataaaatgttgaaaaggctggctgaaaacccagaatatgaaaatgaaaagctgaccaaattaagaaataccataatggagcaatatactaggactgaggaatcagcacgaggaataatctttacaaaaacacgacagagtgcatatgcgctttcccagtggattactgaaaatgaaaaatttgctgaagtaggagtcaaagcccaccatctgattggagctggacacagcagtgagttcaaacccatgacacagaatgaacaaaaagaagtcattagtaaatttcgcactggaaaaataaatctgcttatcgctaccacagtggcagaagaaggtctggatattaaagaatgtaacattgttatccgttatggtctcgtcaccaatgaaatagccatggtccaggcccgtggtcgagccagagctgatgagagcacctacgtcctggttgctcacagtggttcaggagttatcgaacatgagacagttaatgatttccgagagaagatgatgtataaagctatacattgtgttcaaaatatgaaaccagaggagtatgctcataagattttggaattacagatgcaaagtataatggaaaagaaaatgaaaaccaagagaaatattgccaagcattacaagaataacccatcactaataactttcctttgcaaaaactgcagtgtgctagcctgttctggggaagatatccatgtaattgagaaaatgcatcacgtcaatatgaccccagaattcaaggaactttacattgtaagagaaaacaaagcactgcaaaagaagtgtgccgactatcaaataaatggtgaaatcatctgcaaatgtggccaggcttggggaacaatgatggtgcacaaaggcttagatttgccttgtctcaaaataaggaattttgtagtggttttcaaaaataattcaacaaagaaacaatacaaaaagtgggtagaattacctatcacatttcccaatcttgactattcagaatgctgtttatttagtgatgaggattagcacttgattgaagattcttttaaaatactatcagttaaacatttaatatgattatgattaatgtattcattatgctacagaactgacataagaatcaataaaatgattgttttactctgca

SEQ ID NO: 143493 - DNA, 1617 bp, Homo sapiens
  Payload ID: 8347
  Gene Symbol: IFIH1
  Gene Name: interferon induced with helicase C domain 1
  Uniprot ID: Q9BYX4
  ENST ID: ENST00000421365
  CDS Start-End: 378-1043
caaactctgtaagaactgcctgacagaaagctggactcaaagctcctacccgagtgtgcagcaggatcgccccggtccgggaccccaggcgcacaccgcagagtccaaagtgccgcgcctgccggccgcacctgcctgccgcggccccgcgcgccgccccgctgcccacctgcccgcctgcccacctgcccaggtgcgagtgcagccccgcgcgccggcctgagagccctgtggacaacctcgtcattgtcaggcacagagcggtagaccctgcttctctaagtgggcagcggacagcggcacgcacatttcacctgtcccgcagacaacagcaccatctgcttgggagaaccctctcccttctctgagaaagaaagatgtcgaatgggtattccacagacgagaatttccgctatctcatctcgtgcttcagggccagggtgaaaatgtacatccaggtggagcctgtgctggactacctgacctttctgcctgcagaggtgaaggagcagattcagaggacagtcgccacctccgggaacatgcaggcagttgaactgctgctgagcaccttggagaagggagtctggcaccttggttggactcgggaattcgtggaggccctccggagaaccggcagccctctggccgcccgctacatgaaccctgagctcacggacttgccctctccatcgtttgagaacgctcatgatgaatatctccaactgctgaacctccttcagcccactctggtggacaagcttctagttagagacgtcttggataagtgcatggaggaggaactgttgacaattgaagacagaaaccggattgctgctgcagaaaacaatggaaatgaatcaggtgtaagagagctactaaaaaggattgtgcagaaagaaaactggttctctgcatttctgaatgttcttcgtcaaacaggaaacaatgaacttgtccaagagttaacaggctctgattgctcagaaagcaatgcaggtatttgtaattttactgaggaagattcttcaaattctgcctagtgattgagaattcaataaagcagaaagacacaatgctaaacaccaagatttttagaatcaaaattttaagagtggaacatatgtgatagatcatctattttatcaccttaacaaatgaggaaattgatgcctgggaaaatatcaactgatcaaagaccatttttcatccaaccaacactctttctactaccttattttaaaaacaatatgactaccagaaattttatcaagattatgtaacattaaatatacacaaatacattggaagaaagtattttagtggttataaaaaatctgctgcatattcttctgaacatttttatacattttaagcaatgtattaagcatttgataaaaggattgttttgtcaatatatctcaaccttacctaatgtgagattttaaacagcattcaataatagtaataacataacattttatagctccttctcctacattatttgtaaatctcacttaaactgctatcttatttttcttttcgtagtatgcatcctatgtttccaaaaatatcatatgaaagacaaattgaaagttaactattaattaattataa

SEQ ID NO: 143494 - DNA, 3579 bp, Homo sapiens
  Payload ID: 8348
  Gene Symbol: IRF1
  Gene Name: interferon regulatory factor 1
  Uniprot ID: P10914
  ENST ID: ENST00000245414
  CDS Start-End: 260-1237
tgctcggtggcgccgctgccctggcagagctcgccactccttagtcgaggcaagacgtgcgcccgagccccgccgaaccgaggccacccggagccgtgcccagtccacgccggccgtgcccggcggccttaagaacccggcaacctctgccttcttccctcttccactcggagtcgcgctccgcgcgccctcactgcagcccctgcgtcgccgggaccctcgcgcgcgaccgccgaatcgctcctgcagcagagccaacatgcccatcactcggatgcgcatgagaccctggctagagatgcagattaattccaaccaaatcccggggctcatctggattaataaagaggagatgatcttccagatcccatggaagcatgctgccaagcatggctgggacatcaacaaggatgcctgtttgttccggagctgggccattcacacaggccgatacaaagcaggggaaaaggagccagatcccaagacgtggaaggccaactttcgctgtgccatgaactccctgccagatatcgaggaggtgaaagaccagagcaggaacaagggcagctcagctgtgcgagtgtaccggatgcttccacctctcaccaagaaccagagaaaagaaagaaagtcgaagtccagccgagatgctaagagcaaggccaagaggaagtcatgtggggattccagccctgataccttctctgatggactcagcagctccactctgcctgatgaccacagcagctacacagttccaggctacatgcaggacttggaggtggagcaggccctgactccagcactgtcgccatgtgctgtcagcagcactctccccgactggcacatcccagtggaagttgtgccggacagcaccagtgatctgtacaacttccaggtgtcacccatgccctccacctctgaagctacaacagatgaggatgaggaagggaaattacctgaggacatcatgaagctcttggagcagtcggagtggcagccaacaaacgtggatgggaaggggtacctactcaatgaacctggagtccagcccacctctgtctatggagactttagctgtaaggaggagccagaaattgacagcccagggggggatattgggctgagtctacagcgtgtcttcacagatctgaagaacatggatgccacctggctggacagcctgctgaccccagtccggttgccctccatccaggccattccctgtgcaccgtagcagggcccctgggcccctcttattcctctaggcaagcaggacctggcatcatggtggatatggtgcagagaagctggacttctgtgggcccctcaacagccaagtgtgaccccactgccaagtggggatggggcctccctccttgggtcattgacctctcagggcctggcaggccagtgtctgggtttttcttgtggtgtaaagctggccctgcctcctgggaagatgaggttctgagaccagtgtatcaggtcagggacttggacaggagtcagtgtctggctttttcctctgagcccagctgcctggagagggtctcgctgtcactggctggctcctaggggaacagaccagtgaccccagaaaagcataacaccaatcccagggctggctctgcactaagagaaaattgcactaaatgaatctcgttcccaaagaactacccccttttcagctgagccctggggactgttccaaagccagtgaaatgtgaaggaaagtggggtccttcggggcgatgctccctcagcctcagaggagctctaccctgctccctgctttggctgaggggcttgggaaaaaaacttggcactttttcgtgtggatcttgccacatttctgatcagaggtgtacactaacatttcccccgagctcttggcctttgcatttatttatacagtgccttgctcggcgcccaccaccccctcaagccccagcagccctcaacaggcccagggagggaagtgtgagcgccttggtatgacttaaaattggaaatgtcatctaaccattaagtcatgtgtgaacacataaggacgtgtgtaaatatgtacatttgtctttttataaaaagtaaattgtttataaggggtgtggcctttttagagagaaatttaacttgtagatgattttactttttatggaaacactgatggacttattattggcatcccgcctgaacttgactttggggtgaacagggacatgcatctattataaaatcctttcggccaggcgcggtggctcacacctgtaatcccagcactttgggaggccgagatgggtggatcacctgaggtcaggagttcgagaccagcctggtgaaactccatttctactaaaaatgcaaaaattagctgggcgtggttgcgggtgcttgtaatcccagctactcaggaggctgaggcaagagaatcgcttgaacctgggaggtggaggttgcagtgagccgagaacatgccattgcactccagcccgggcaccaaaaaaaaaaaaaaaaaaaaaaacctttcatttggccgggcatggtggcttatgcctgtaatcctggcactttgggaggccaaggtgggcagatcacctgaggtcaggagtttgagaccagcctggccaacatggtgaaacctcatctctactaaaaatacaaaaattaggccgggcacggtggctcacgcctgtaatcccagcactttgggaggcagaggcgggcggatcacgaggtcaggagatcaagaccatcctggctaacacggtgaaaccccgtctctactaaaaatataaaaaattagccgggcctagtggcgggtgcctgtagtcccagctactcgggaggctgaggcaggagaatggcatgaaccccggaggcagagcttgcagtgagccgagattgcaccactgcactacagcctgggcgacagagcgagactccgtctcaaaaaaaaaaaaaaaaattagccgggcctggtggcgggcgcctgtaatcccagctactgtggaggctgaagcacaagaatcacttgaacccgggagatggaggttgcagtgagctgagactgtgccactgcactccagcctgggtgacaagagtgagactttgtctcaaaaaaaaaaaaatccttttgtttatgttcacatagacaatggcagaaggaggggacattcctgtcataggaacatgcttatataaacatagtcacctgtccttgactatcaccagggctgtcagttgattctgggctcctggggcccaaggagtgttaagttttgaggcatgtgccataggtgatgtgtcctgctaacacacagatgctgctccaaaaagtcagttgatatgacacagtcacagacagaacagtcagcagcccaagaaaggtcctcacggctgctgtgctgggtagcacttgccatccagtttctagagtgatgaaatgctctgtctgtaccgttcaatacagtaggcactggcactagccacatgtgccagctaagcacttgaaatgtggccagtgcaataaggaattgaacttttaattgcatttaataaactgtatgtaaatagtca

SEQ ID NO: 143495 - DNA, 2061 bp, Homo sapiens
  Payload ID: 8348
  Gene Symbol: IRF1
  Gene Name: interferon regulatory factor 1
  Uniprot ID: P10914
  ENST ID: ENST00000405885
  CDS Start-End: 219-1196
cccgctatgttcgtcccgcgcatccacacgccgtgccggggaccgagtgtcagcccacgcgtgggcgcccagtgctcccggctttcggcggtcccagctccgcgcccaggcgacaggttttgggctccctgtgctggtggcaagggctggcttactgcccaggtggctggagggaatcgtgacctacggagactgcgggaagaggcgccacagccaacatgcccatcactcggatgcgcatgagaccctggctagagatgcagattaattccaaccaaatcccggggctcatctggattaataaagaggagatgatcttccagatcccatggaagcatgctgccaagcatggctgggacatcaacaaggatgcctgtttgttccggagctgggccattcacacaggccgatacaaagcaggggaaaaggagccagatcccaagacgtggaaggccaactttcgctgtgccatgaactccctgccagatatcgaggaggtgaaagaccagagcaggaacaagggcagctcagctgtgcgagtgtaccggatgcttccacctctcaccaagaaccagagaaaagaaagaaagtcgaagtccagccgagatgctaagagcaaggccaagaggaagtcatgtggggattccagccctgataccttctctgatggactcagcagctccactctgcctgatgaccacagcagctacacagttccaggctacatgcaggacttggaggtggagcaggccctgactccagcactgtcgccatgtgctgtcagcagcactctccccgactggcacatcccagtggaagttgtgccggacagcaccagtgatctgtacaacttccaggtgtcacccatgccctccacctctgaagctacaacagatgaggatgaggaagggaaattacctgaggacatcatgaagctcttggagcagtcggagtggcagccaacaaacgtggatgggaaggggtacctactcaatgaacctggagtccagcccacctctgtctatggagactttagctgtaaggaggagccagaaattgacagcccagggggggatattgggctgagtctacagcgtgtcttcacagatctgaagaacatggatgccacctggctggacagcctgctgaccccagtccggttgccctccatccaggccattccctgtgcaccgtagcagggcccctgggcccctcttattcctctaggcaagcaggacctggcatcatggtggatatggtgcagagaagctggacttctgtgggcccctcaacagccaagtgtgaccccactgccaagtggggatggggcctccctccttgggtcattgacctctcagggcctggcaggccagtgtctgggtttttcttgtggtgtaaagctggccctgcctcctgggaagatgaggttctgagaccagtgtatcaggtcagggacttggacaggagtcagtgtctggctttttcctctgagcccagctgcctggagagggtctcgctgtcactggctggctcctaggggaacagaccagtgaccccagaaaagcataacaccaatcccagggctggctctgcactaagagaaaattgcactaaatgaatctcgttcccaaagaactacccccttttcagctgagccctggggactgttccaaagccagtgaaatgtgaaggaaagtggggtccttcggggcgatgctccctcagcctcagaggagctctaccctgctccctgctttggctgaggggcttgggaaaaaaacttggcactttttcgtgtggatcttgccacatttctgatcagaggtgtacactaacatttcccccgagctcttggcctttgcatttatttatacagtgccttgctcggcgcccaccaccccctcaagccccagcagccctcaacaggcccagggagggaagtgtgagcgccttggtatgacttaaaattggaaatgtcatctaaccattaagtcatgtgtgaacacataaggacgtgtgtaaatatgtacatttgtctttttataaaaagtaaattgttta

SEQ ID NO: 143496 - DNA, 524 bp, Homo sapiens
  Payload ID: 8348
  Gene Symbol: IRF1
  Gene Name: interferon regulatory factor 1
  ENST ID: ENST00000439555
  CDS Start-End: 188-343
ccgaaccgaggccacccggagccgtgcccagtccacgccggccgtgcccggcggccttaagaacccggcaacctctgccttcttccctcttccactcggagtcgcgctccgcgcgccctcactgcagcccctgcgtcgccgggaccctcgcgcgcgaccgccgaatcgctcctgcagcagagccaacatgcccatcactcggatgcgcatgagaccctggctagagatgcagattaattccaaccaaatcccggggctcatctggattaataaagccgatacaaagcaggggaaaaggagccagatcccaagacgtggaaggccaactttcgctgtgccatgaactccctgccagatatcgaggaggtgaaagaccagagcaggaacaagggcagctcagctgtgcgagtgtaccggatgcttccacctctcaccaagaaccagagaaaagaaagaaagtcgaagtccagccgagatgctaagagcaaggccaagaggaagtcatgtggggattccagccctga

SEQ ID NO: 143497 - DNA, 885 bp, Homo sapiens
  Payload ID: 8348
  Gene Symbol: IRF1
  Gene Name: interferon regulatory factor 1
  ENST ID: ENST00000458069
  CDS Start-End: 309-885
cgcagatctgcgtgcgcgcagccgccaggggcctgtaggtggcccgctatgttcgtcccgcgcatccacacgccgtgccggggaccgagtgtcagcccacgcgtgggcgcccagtgctcccggctttcggcggtcccagctccgcgcccaggcgacaggttttgggctccctgtgctggtggcaagggctggcttactgcccaggtggctggagggaatcgtgacctacggagactgcgggaagaggcgccacaggtgttccttgggccacttctccagaggaggggaaaccgggccggaaggccaacatgcccatcactcggatgcgcatgagaccctggctagagatgcagattaattccaaccaaatcccggggctcatctggattaataaagaggagatgatcttccagatcccatggaagcatgctgccaagcatggctgggacatcaacaaggatgcctgtttgttccggagctgggccattcacacaggccgatacaaagcaggggaaaaggagccagatcccaagacgtggaaggccaactttcgctgtgccatgaactccctgccagatatcgaggaggtgaaagaccagagcaggaacaagggcagctcagctgtgcgagtgtaccggatgcttccacctctcaccaagaaccagagaaaagaaagaaagtcgaagtccagccgagatgctaagagcaaggccaagaggaagtcatgtggggattccagccctgataccttctctgatggactcagcagctccactctgcctgatgaccacagcagctacacagttccaggctacatgcaggacttggaggtggagcaggccctgactccagcactgtcgccatgtgctgtcagcagcactctcc

SEQ ID NO: 143498 - DNA, 832 bp, Homo sapiens
  Payload ID: 8348
  Gene Symbol: IRF1
  Gene Name: interferon regulatory factor 1
  ENST ID: ENST00000437654
  CDS Start-End: 239-832
tggcagagctcgccactccttagtcgaggcaagacgtgcgcccgagccccgccgaaccgaggccacccggagccgtgcccagtccacgccggccgtgcccggcggccttaagaacccggcaacctctgccttcttccctcttccactcggagtcgcgctccgcgcgccctcactgcagcccctgcgtcgccgggaccctcgcgcgcgaccgccgaatcgctcctgcagcagagccaacatgcccatcactcggatgcgcatgagaccctggctagagatgcagattaattccaaccaaatcccggggctcatctggattaataaagaggagatgatcttccagatcccatggaagcatgctgccaagcatggctgggacatcaacaaggatgcctgtttgttccggagctgggccattcacacaggccgatacaaagcaggggaaaaggagccagatcccaagacgtggaaggccaactttcgctgtgccatgaactccctgccagatatcgaggaggtgaaagaccagagcaggaacaagggcagctcagctgtgcgagtgtaccggatgcttccacctctcaccaagaaccagagaaaagaaagaaagtcgaagtccagccgagatgctaagagcaaggccaagaggaagtcatgtggggattccagccctgataccttctctgatggactcagcagctccactctgcctgatgaccacagcagctacacagttccaggctacatgcaggacttggaggtggagcaggccctgactccagctacaacagatgaggatgaggaagggaaattacctgaggacatcatgaag

SEQ ID NO: 143499 - DNA, 523 bp, Homo sapiens
  Payload ID: 8348
  Gene Symbol: IRF1
  Gene Name: interferon regulatory factor 1
  ENST ID: ENST00000476613
  CDS Start-End: 168-523
agagcagttttattccagcgcagctcccctccgcactgagtgtagtacctagcagctggctgaggtgaggggagggtaactaagtgacctcgggtggggcaggtcactgcccaggtactgttcaacagattccagactggagcctctgtgttctctttacagccaacatgcccatcactcggatgcgcatgagaccctggctagagatgcagattaattccaaccaaatcccggggctcatctggattaataaagaggagatgatcttccagatcccatggaagcatgctgccaagcatggctgggacatcaacaaggatgcctgtttgttccggagctgggccattcacacaggccgatacaaagcaggggaaaaggagccagatcccaagacgtggaaggccaactttcgctgtgccatgaactccctgccagatatcgaggaggtgaaagaccagagcaggaacaagggcagctcagctgtgcgagtgtaccggatgcttccacctctcaccaagaacca

SEQ ID NO: 143500 - DNA, 821 bp, Homo sapiens
  Payload ID: 8348
  Gene Symbol: IRF1
  Gene Name: interferon regulatory factor 1
  ENST ID: ENST00000613424
  CDS Start-End: 117-722
cctctgccttcttccctcttccactcggagtcgcgctccgcgcgccctcactgcagcccctgcgtcgccgggaccctcgcgcgcgaccgccgaatcgctcctgcagcagagccaacatgcccatcactcggatgcgcatgagaccctggctagagatgcagattaattccaaccaaatcccggggctcatctggattaataaagaggagatgatcttccagatcccatggaagcatgctgccaagcatggctgggacatcaacaaggatgcctgtttgttccggagctgggccattcacacaggccgatacaaagcaggggaaaaggagccagatcccaagacgtggaaggccaactttcgctgtgccatgaactccctgccagatatcgaggaggtgaaagaccagagcaggaacaagggcagctcagctgtgcgagtgtaccggatgcttccacctctcaccaagaaccagagaaaagaaagaaagtcgaagtccagccgagatgctaagagcaaggccaagaggaagtcatgtggggattccagccctgataccttctctgatggactcagcagctccactctgcctgatgaccacagcagctacacagttccaggctacatgcaggacttggaggtggagcaggccctgactccagctcttggagcagtcggagtggcagccaacaaacgtggatgggaaggggtacctactcaatgaacctggagtccagcccacctctgtctatggagactttagctgtaaggaggagccagaaattgacagcccagggggggatattgggctgagtctacagcg

SEQ ID NO: 143501 - DNA, 2303 bp, Homo sapiens
  Payload ID: 8349
  Gene Symbol: IRF2
  Gene Name: interferon regulatory factor 2
  Uniprot ID: P14316
  ENST ID: ENST00000393593
  CDS Start-End: 209-1258
ggatttccagccgcggctcttcgcagtttcctctccttgttttgctttcgatctggactgttctcaggcaagccggggagtaacttttagttttgctcctgcgattattcaactgacgggctttcatttccatttcacataccctagcaacacttataccttgcggaattgtattggtagcgtgaaaaaagcacactgagagggcaccatgccggtggaaaggatgcgcatgcgcccgtggctggaggagcagataaactccaacacgatcccggggctcaagtggcttaacaaggaaaagaagatttttcagatcccctggatgcatgcggctagacatgggtgggatgtggaaaaagatgcaccactctttagaaactgggcaatccatacaggaaagcatcaaccaggagtagataaacctgatcccaaaacatggaaggcgaatttcagatgcgccatgaattccttgcctgatattgaagaagtcaaggataaaagcataaagaaaggaaataatgccttcagggtctaccgaatgctgcccctatcagaacggccttctaagaaaggaaagaaaccaaagacagaaaaagaagacaaagttaagcacatcaagcaagaaccagttgagtcatctctggggcttagtaatggagtaagtgatctttctcctgagtatgcggtcctgacttcaactataaaaaatgaagtggatagtacggtgaacatcatagttgtaggacagtcccatctggacagcaacattgagaatcaagagattgtcaccaatccgccagacatttgccaagttgtagaggtgaccactgagagcgacgagcagccggtcagcatgagcgagctctaccctctgcagatctcccccgtgtcttcctatgcagaaagcgaaacgactgatagtgtgcccagcgatgaagagagtgccgaggggcggccacactggcggaagaggaatattgaaggcaaacagtacctcagcaacatggggactcgaggctcctacctgctgcccggcatggcgtccttcgtcacttccaacaaaccggacctccaggtcaccatcaaagaggagagcaatccggtgccttacaacagctcctggcccccttttcaagacctccccctttcttcctccatgaccccagcatccagcagcagtcggccagaccgggagacccgggccagcgtcatcaagaaaacatcggatatcacccaggcccgcgtcaagagctgttaagcctctgactctccgcggtggttgttggggcttcttggctttgttttgttgtttgtttgtattttatttttttctctctgacacctattttagacaaatctaagggaaaaagccttgacaatagaacattgattgctgtgtccaactccagtactggagcttctctttaactcaggactccagcccattggtagacgtgtgtttctagagcctgctggatctcccagggctactcactcaagttcaaggaccaacaagggcagtggaggtgctgcattgcctgcggtcaaggccagcaaggtggagtggatgcctcagaacggacgagataatgtgaactagctggaattttttattcttgtgaatatgtacataggcagcactagcgacattgcagtctgcttctgcaccttatcttaaagcacttacagataggccttcttgtgatcttgctctatctcacagcacactcagcacccccttctctgcccattccccagcctctcttcctatcccatcccatcccatcccatcccatcccatcccatcccgctcttttcctacttttccttccctcaaagcttccattccacatccggaggagaagaaggaaatgaatttctctacagatgtcccattttcagactgctttaaaaaaaatccttctaatctgctatgcttgaatgccacgcggtacaaaggaaaaagtatcatggaaatattatgcaaattcccagatttgaagacaaaaatactctaattctaaccagagcaagcttttttattttttatacaggggaatattttattcaaggtaaaattctaaataaaatataattgttttttatcttttctacagcaaatttataattttaagattccttttcttgtttatcagcagttgttattacatccttgtggcacatttttttttttaattttgtaaaggtgaaaaaagcttttatgagctcatgtagcaatcagattttcctgtggattgataataaatgaatatgatatatagttaaatttttaaggggcatca

SEQ ID NO: 143502 - DNA, 586 bp, Homo sapiens
  Payload ID: 8349
  Gene Symbol: IRF2
  Gene Name: interferon regulatory factor 2
  ENST ID: ENST00000505067
  CDS Start-End: 1-586
aaataatgccttcagggtctaccgaatgctgcccctatcagaacggccttctaagaaaggaaagaaaccaaagacagaaaaagaagacaaagttaagcacatcaagcaagaaccagttgagtcatctctggggcttagtaatggagtaagtgatctttctcctgagtatgcggtcctgacttcaactataaaaaatgaagtggatagtacggtgaacatcatagcattgaatttttgttgtgtgtatggtgacttctgtttttgggaaacggaagaagccagcagcatgctgaattgtcctgacaggcctccgctggcctcttgccgagttgtaggacagtcccatctggacagcaacattgagaatcaagagattgtcaccaatccgccagacatttgccaagttgtagaggtgaccactgagagcgacgagcagccggtcagcatgagcgagctctaccctctgcagatctcccccgtgtcttcctatgcagaaagcgaaacgactgatagtgtgcccagcgatgaagagagtgccgaggggcggccacactggcggaagaggaatattgaaggcaaacagtac

SEQ ID NO: 143503 - DNA, 498 bp, Homo sapiens
  Payload ID: 8349
  Gene Symbol: IRF2
  Gene Name: interferon regulatory factor 2
  ENST ID: ENST00000506230
  CDS Start-End: 88-498
gattttaggggaagcaggttctgctgctgttgctgctgctactggggctgctgaggctgcgaggaggaggaggaggaggagggcaccatgccggtggaaaggatgcgcatgcgcccgtggctggaggagcagataaactccaacacgatcccggggctcaagtggcttaacaaggaaaagaagatttttcagatcccctggatgcatgcggctagacatgggtgggatgtggaaaaagatgcaccactctttagaaactgggcaatccatacaggaaagcatcaaccaggagtagataaacctgatcccaaaacatggaaggcgaatttcagatgcgccatgaattccttgcctgatattgaagaagtcaaggataaaagcataaagaaaggaaataatgccttcagggtctaccgaatgctgcccctatcagaacggccttctaagaaaggaaagaaaccaaagacagaaaaagaagacaaagttaagcacatcaag

SEQ ID NO: 143504 - DNA, 339 bp, Homo sapiens
  Payload ID: 8349
  Gene Symbol: IRF2
  Gene Name: interferon regulatory factor 2
  ENST ID: ENST00000502750
  CDS Start-End: 1-339
cctgatattgaagaagtcaaggataaaagcataaagaaaggaaataatgccttcagggtctaccgaatgctgcccctatcagaacggccttctaagaaagttgtaggacagtcccatctggacagcaacattgagaatcaagagattgtcaccaatccgccagacatttgccaagttgtagaggtgaccactgagagcgacgagcagccggtcagcatgagcgagctctaccctctgcagatctcccccgtgtcttcctatgcagaaagcgaaacgactgatagtgtgcccagcgatgaagagagtgccgaggggcggccacactggcggaagaggaat

SEQ ID NO: 143505 - DNA, 568 bp, Homo sapiens
  Payload ID: 8349
  Gene Symbol: IRF2
  Gene Name: interferon regulatory factor 2
  ENST ID: ENST00000510814
  CDS Start-End: 87-568
cagatgcggagaggtggctccatggacacagacctgctgtgtgtgcttctgcgccccaggtgttgtgtgtgggggtgcagggcaccatgccggtggaaaggatgcgcatgcgcccgtggctggaggagcagataaactccaacacgatcccggggctcaagtggcttaacaaggaaaagaagatttttcagatcccctggatgcatgcggctagacatgggtgggatgtggaaaaagatgcaccactctttagaaactgggcaatccatacaggaaagcatcaaccaggagtagataaacctgatcccaaaacatggaaggcgaatttcagatgcgccatgaattccttgcctgatattgaagaagtcaaggataaaagcataaagaaaggaaataatgccttcagggtctaccgaatgctgcccctatcagaacggccttctaagaaaggaaagaaaccaaagacagaaaaagaagacaaagttaagcacatcaagcaagaaccagttgagtcatctctggggcttagtaatggagtaagtgatctttctcctgagtatgcggtcct

SEQ ID NO: 143506 - DNA, 591 bp, Homo sapiens
  Payload ID: 8349
  Gene Symbol: IRF2
  Gene Name: interferon regulatory factor 2
  ENST ID: ENST00000509274
  CDS Start-End: 65-316
agatgcggagaggtggctccatggacacagacctgctgtgtgtgcttctgcgccccagggcaccatgccggtggaaaggatgcgcatgcgcccgtggctggaggagcagataaactccaacacgatcccggggctcaagtggcttaacaagagacagggtctcactatatggcccacgctggagtgcagtggtgcagtcataactcactgcagcctcgacctcttgggttcaagtgatcctcccacctcagcctccagagtagctggaactacaggaaaagaagatttttcagatcccctggatgcatgcggctagacatgggtgggatgtggaaaaagatgcaccactctttagaaactgggcaatccatacaggaaagcatcaaccaggagtagataaacctgatcccaaaacatggaaggcgaatttcagatgcgccatgaattccttgcctgatattgaagaagtcaaggataaaagcataaagaaaggaaataatgccttcagggtctaccgaatgctgcccctatcagaacggccttctaagaaaggaaagaaaccaaagacagaaaaagaagacaaagttaagc

SEQ ID NO: 143507 - DNA, 595 bp, Homo sapiens
  Payload ID: 8349
  Gene Symbol: IRF2
  Gene Name: interferon regulatory factor 2
  ENST ID: ENST00000507523
  CDS Start-End: 67-595
gcagatgcggagaggtggctccatggacacagacctgctgtgtgtgcttctgcgccccagggcaccatgccggtggaaaggatgcgcatgcgcccgtggctggaggagcagataaactccaacacgatcccggggctcaagtggcttaacaaggaaaagaagatttttcagatcccctggatgcatgcggctagacatgggtgggatgtggaaaaagatgcaccactctttagaaactgggcaatccatacaggaaagcatcaaccaggagtagataaacctgatcccaaaacatggaaggcgaatttcagatgcgccatgaattccttgcctgatattgaagaagtcaaggataaaagcataaagaaaggaaataatgccttcagggtctaccgaatgctgcccctatcagaacggccttctaagaaaggaaagaaaccaaagacagaaaaagaagacaaagttaagcacatcaagcaagaaccagttgagtcatctctggggcttagtaatggagtaagtgatctttctcctgagtatgcggtcctgacttcaactataaaaaatgaagtggatagtacggtgaacatcatag

SEQ ID NO: 143508 - DNA, 2564 bp, Homo sapiens
  Payload ID: 8350
  Gene Symbol: IRF2BP1
  Gene Name: interferon regulatory factor 2 binding protein 1
  Uniprot ID: Q8IU81
  ENST ID: ENST00000302165
  CDS Start-End: 397-2151
gtaactttccctgcgaagcggcctctggggcagaagaaggaggtggaggcggcggcggccgttgcagcggcggcggcgagagcggcgggagcccgaggcggcggcgctcgcggcccatcgtggggcccgagctgtgcgcctcggctcggagcccggaccgggcgggggcgccgacgtgcctcagcctgccttcgcgagggaggcgggagtgagcagaaaggcttagggcccagggggcggggaaggggggccgggcctggatccggcggggaggccgagccggaggccggaccgtggctcgcgctgtccccgggacgcggatcgaacgttggcggcgcggatcgcacgtcggcggccggtggaacgcgggagctgggcggcgcgcggactggggccatggcgtctgtgcaggcgtcccgccgccagtggtgctacctgtgcgacctgcccaagatgccgtgggccatggtgtgggacttcagcgaggccgtgtgtcgcggctgcgtgaacttcgagggcgcggaccgcatcgaactgctcatcgatgccgcccgccagctcaagcgcagccacgtgctccccgagggccgctcgcccgggcccccggcccttaagcacccggccaccaaggacctggcggcggcagccgcacaggggccccagctgccgcccccgcaggcccagccccagccgtcagggaccggcggcggcgtgtcgggccaggaccgctatgacagggccacatcatcaggccgcctccccctgccctcgcccgccctggagtacactctggggtcccgcctggccaatgggctgggccgtgaggaggccgtggctgagggggcgcgaagggccttgcttggctccatgcctggcttgatgccccctgggctgctggcagctgcagtgtctggcctgggaagccgaggcctgacgctggcacccggcttgagtcctgcccgtcccctcttcggctccgatttcgagaaagagaagcagcagaggaatgcggactgtctggcagaactgaacgaggccatgcgaggccgggcagaggaatggcacgggcgccccaaagcagtgcgggaacagctactggcgctgtccgcctgcgccccgttcaatgtgcgcttcaagaaggatcacgggctggtggggcgagtgttcgccttcgatgctactgcccgtcctccaggatacgagttcgagctgaagctcttcaccgaatacccctgtggttccggcaatgtgtacgccggcgtcctggcagtggctcgccagatgttccacgatgctctgcgggagccgggcaaggcactggcttcttcgggcttcaagtacctcgaatatgaacgccggcatggatcaggagaatggcggcagctgggcgagctgcttaccgacggcgtccgcagcttccgcgagccagctcccgcggaggccctgccccagcagtacccagagccggcccctgcggctctctgtggcccacccccgcgagccccatcccggaacctggcgcccacgccgcgccgtcgcaaggcatcccccgagccggagggcgaggcggctgggaagatgaccaccgaggagcagcagcaacggcactgggtggcacccggcggcccgtactccgctgagacccctggtgtgccctcgcccattgccgccctgaagaatgtggccgaagccctgggccactcacccaaggaccctggcggaggcggggggcctgtgcgtgcagggggcgccagccctgcagcctcctccacggcccagccgccaacccagcatcgccttgtggcccgcaacggcgaagcagaagtcagtcccacagcgggggccgaagctgtcagcgggggtggcagcggcactggggcgacccctggggcccccctgtgctgtaccctgtgcagggagcggctagaagacacccacttcgtccagtgcccctcggtgcccggacacaagttctgctttccctgctcccgggagttcatcaaggcgcagggcccggccggggaggtgtactgcccgagcggagacaagtgcccgctggtcggctcctccgtgccctgggccttcatgcagggcgagatcgccaccatccttgctggagacatcaaagttaagaaagaacgggacccctaggctaccactgcctccaggctactgccctctgcccctttgccacccaccgctgccgcggataaattattccctccccgacccagcccagtgccacctctatctgtgtacatactcccttcttccacccagatgggtcccctggggtagatgcattgtgggtggggggagaaagcttgtggctcctgtccgagggggtgtttggggtcccttggcccctccagtttccctctgtcctccttggcttggctttgctgctgcttgtagttgggggagaggtgcccccctcctccttgagaagggacctcctgaaaactcgctctttataaacgaggcaaaagcatttaattcccacccccccaccccccgctcccttctgctccttcaataaaccgaaagatgggttttttttttcc

SEQ ID NO: 143509 - DNA, 4663 bp, Homo sapiens
  Payload ID: 8351
  Gene Symbol: IRF2BP2
  Gene Name: interferon regulatory factor 2 binding protein 2
  Uniprot ID: Q7Z5L9
  ENST ID: ENST00000366609
  CDS Start-End: 32-1795
ctcctcctccggcgtcgcgggctcctcggacatggccgcggcggtggcggtggcggccgcgtcccggcggcagtcgtgctacctgtgtgacctgccccgcatgccctgggccatgatctgggacttcaccgaacccgtctgccgcggctgcgtcaactacgagggcgccgaccgcgtcgagttcgtcatcgagacggcgcggcagctcaagcgggcgcacggctgcttcccggagggtcgctccccacccggcgccgcggcctcggccgccgccaagccgccgccgctctccgccaaggacatccttttgcagcagcagcagcagcttggccacggcggccccgaggcggccccgcgcgcgccgcaggccttggagcgctacccgttggcggccgcggccgagaggcccccgcgcctcggctctgacttcggcagcagccgcccggcagcgagcctggcccagccgccgacgccgcagccgccgcccgtgaacggcatcctggtgcccaacggcttctccaagctagaggagccgcccgagctgaatcgccagagcccgaacccgcggcgcggccacgcggtgccgcccaccctggtgccgctcatgaacggctcggccacgccgctgcccaccgcgctcggcctcggcggccgcgctgccgcctccttagccgcggtgtccggaaccgcggccgccagcctgggctccgcgcagcccaccgatctgggcgcccacaagcggccggcatccgtgtcgagcagcgctgccgtggagcacgagcagcgtgaggcggcagccaaggagaaacaaccgccgccgcctgcgcaccggggcccggccgacagcctgtccaccgcggccggggccgccgagctgagcgcggaaggtgcgggcaagagccgcgggtctggagagcaggactgggtcaacaggcccaagaccgtgcgcgacacgctgctggcgctgcaccagcacggccactcggggcccttcgagagcaagtttaagaaggagccggccctgactgcaggcaggttgttgggtttcgaggccaacggggccaacgggtctaaagcagttgcaagaacagcaaggaaaaggaagccctctccagaaccagaaggtgaagtcgggccccctaagatcaacggagaggcccagccgtggctgtccacatccacagaggggctcaagatccccatgactcctacatcctcttttgtgtctccgccaccacccactgcctcacctcattccaaccggaccacaccgcctgaagcggcccagaatggccagtcccccatggcagccctgatcttagtagcagacaatgcagggggcagtcatgcctcaaaagatgccaaccaggttcactccactaccaggaggaatagcaacagtccgccctctccgtcctctatgaaccaaagaaggctgggccccagagaggtggggggccagggagcaggcaacacaggaggactggagccagtgcaccctgccagcctcccggactcctctctggcaaccagtgccccgctgtgctgcaccctctgccacgagcggctggaggacacccattttgtgcagtgcccgtccgtcccttcgcacaagttctgcttcccttgctccagacaaagcatcaaacagcagggagctagtggagaggtctattgtcccagtggggaaaaatgccctcttgtgggctccaatgtcccctgggcctttatgcaaggggaaattgcaaccatccttgctggagatgtgaaagtgaaaaaagagagagactcgtgacttttccggtttcagaaaaacccaatgattacccttaattaaaactgcttgaattgtatatatatctccatatatatatatatccaagacaagggaaatgtagacttcataaacatggctgtataattttgattttttttgaatacattgtgtttctatattttttttgacgacaaaaggtatgtacttataaagacatttttttcttttgttaacgttattagcatatctttgtgctttattatcctggtgacagttaccgttctatgtaggctgtgacttgcgctgcttttttagagcacttggcaaatcagaaatgcttctagctgtatttgtatgcacttattttaaaaagaaaaaaaaagccaaatacattttctgacattgtaagattgccttactgtctgtcattccttattgctggcccctttctcaggccggaggccaagtggtggagaaggaaaggaaatgatcgaacgggcatgttgtcaagtgggcatgccactgggaaataccaccagtttaccctgaaacattgtcctcagaggagtaggaaagtggattttgaatctctattttgctcaaaagttcagttcctgagatactgatgactgagagtgctgctgggaaattttcaggattgtgtggtcttttggggttttttgtttttttttttttaagacaaagttgaccgctgttcactgtccacgtgatcagttgtaagattacaatgctgcatgctagttggttacataagatacaattccagtgatggaaggcggttataatggatggtggtgtgtacaagatggcactgccatctttgagcagagcccagctctgcagcgccacttcatctttttaaacaccctagaggtctgtttgttgttgctgttgtcctttattttgaaagagttgcaagagaagttacagtccaggtgaacttggagattgtgggattggttttgtttctgttttgttttgtttatcatttacctgtagtgctattgctgttgatactatcacctataccctgtttctagtgagtgctgaatacagtatggtacaatgacagtaacagccgcgtggtgctgccaggactgcccttgggcatatcagtgacagcccaaatgtgggtggaggaaacctgtaatttccttcttaacatgtgtttgaaataccaagtgaataatactgttctggaaaaaaatgataaactagtggaaattaaagaaattaagggttttatataatagacaggccccacctctcaaaatatttttagaagtctttttgtaaactaatttcttttgatcactattttgcatcagtaaaatgatttttttaaaaccaataaatcatcaattattagaaatagttgtctcacagtgatactggtttttcttttgtgctgttatgatttaacattgacaggaacactattttaaatccttacgttcaggtgtttgtaacttggccttataattaggctgaattatggcttcaaggtctacaatttatgtgtatggttcacagcctagcttctatttacatttgaaaatacagatttttaccaactttggattcttttttagttatatgtttgtctttcctttttaaattgttcaaaactattttttaatggtcaagttactaacacttgaaaatcagatactgcaccaaatacagtgtttttccgtagtgtttttaatgagtgcacctattactactgtgcgagaattcatgttttaccagtcattgttatattacaaacagacttgcatgattaaccagttgttacacttactttttcaagttggagtatatatgactcagtgcagactggtctctcttatgtgaatgcacacatgcagaaatgcagagtcaattttacatgcccataaagacatttgtaaagaattcagctcttatggtctgttgtataaatgtgtatctaggcactttggaatttgacctcacagatgttacaacttgatcagtcgtttgacctaatttgtggtagctatctgtatgttttgcaatcttaatacagacatgctttccaaaaagattaatacagaaccatcctgccgttttggataagtctatccagctgtggaaagggcaacctgtggtttctctgtactggtgtttaatgggggaagaatatgaacagctttaaagagctgtgtattgtggttactactattaaaaaataagatctgcacgagtctgactggcctttgggtggcctttgtggacggctcgtagctggaaagtgttgatctgggttttctggcattcttttaagttaaaaagttaacatcgggacatgggtttgatcttttgttgtacctgatgacagtgcagagattctccacagctggataaaaatgtcacaaagctacttactgtacatgggcagtatcagatttcaaatcctaatatttcagctgtgcttttaatactcaaaatattaggggatggggtgttgaagctttcccttttttgcttttaacaatttatagaatttaacagatgtactgtctttcatgtggcctcacatttaaagttatgagaacatacacatggtttacaacttttactatatacctttccttggccaccaagtattttaaaagtgtgccaccttttaacctttactttttttaagttgaaggtgatactttttctatatatgatgaaactcatgtcaactgaagtgagtgtaatctcagataccaacattattatattttaaaatcacgctatggaaatatcacctgaattctgtcatttgtcagatttacagtacctttttttctttaacttttagcattaaataaaaataaaattgggagcactgaa

SEQ ID NO: 143510 - DNA, 4615 bp, Homo sapiens
  Payload ID: 8351
  Gene Symbol: IRF2BP2
  Gene Name: interferon regulatory factor 2 binding protein 2
  Uniprot ID: Q7Z5L9
  ENST ID: ENST00000366610
  CDS Start-End: 32-1747
ctcctcctccggcgtcgcgggctcctcggacatggccgcggcggtggcggtggcggccgcgtcccggcggcagtcgtgctacctgtgtgacctgccccgcatgccctgggccatgatctgggacttcaccgaacccgtctgccgcggctgcgtcaactacgagggcgccgaccgcgtcgagttcgtcatcgagacggcgcggcagctcaagcgggcgcacggctgcttcccggagggtcgctccccacccggcgccgcggcctcggccgccgccaagccgccgccgctctccgccaaggacatccttttgcagcagcagcagcagcttggccacggcggccccgaggcggccccgcgcgcgccgcaggccttggagcgctacccgttggcggccgcggccgagaggcccccgcgcctcggctctgacttcggcagcagccgcccggcagcgagcctggcccagccgccgacgccgcagccgccgcccgtgaacggcatcctggtgcccaacggcttctccaagctagaggagccgcccgagctgaatcgccagagcccgaacccgcggcgcggccacgcggtgccgcccaccctggtgccgctcatgaacggctcggccacgccgctgcccaccgcgctcggcctcggcggccgcgctgccgcctccttagccgcggtgtccggaaccgcggccgccagcctgggctccgcgcagcccaccgatctgggcgcccacaagcggccggcatccgtgtcgagcagcgctgccgtggagcacgagcagcgtgaggcggcagccaaggagaaacaaccgccgccgcctgcgcaccggggcccggccgacagcctgtccaccgcggccggggccgccgagctgagcgcggaaggtgcgggcaagagccgcgggtctggagagcaggactgggtcaacaggcccaagaccgtgcgcgacacgctgctggcgctgcaccagcacggccactcggggcccttcgagagcaagtttaagaaggagccggccctgactgcagttgcaagaacagcaaggaaaaggaagccctctccagaaccagaaggtgaagtcgggccccctaagatcaacggagaggcccagccgtggctgtccacatccacagaggggctcaagatccccatgactcctacatcctcttttgtgtctccgccaccacccactgcctcacctcattccaaccggaccacaccgcctgaagcggcccagaatggccagtcccccatggcagccctgatcttagtagcagacaatgcagggggcagtcatgcctcaaaagatgccaaccaggttcactccactaccaggaggaatagcaacagtccgccctctccgtcctctatgaaccaaagaaggctgggccccagagaggtggggggccagggagcaggcaacacaggaggactggagccagtgcaccctgccagcctcccggactcctctctggcaaccagtgccccgctgtgctgcaccctctgccacgagcggctggaggacacccattttgtgcagtgcccgtccgtcccttcgcacaagttctgcttcccttgctccagacaaagcatcaaacagcagggagctagtggagaggtctattgtcccagtggggaaaaatgccctcttgtgggctccaatgtcccctgggcctttatgcaaggggaaattgcaaccatccttgctggagatgtgaaagtgaaaaaagagagagactcgtgacttttccggtttcagaaaaacccaatgattacccttaattaaaactgcttgaattgtatatatatctccatatatatatatatccaagacaagggaaatgtagacttcataaacatggctgtataattttgattttttttgaatacattgtgtttctatattttttttgacgacaaaaggtatgtacttataaagacatttttttcttttgttaacgttattagcatatctttgtgctttattatcctggtgacagttaccgttctatgtaggctgtgacttgcgctgcttttttagagcacttggcaaatcagaaatgcttctagctgtatttgtatgcacttattttaaaaagaaaaaaaaagccaaatacattttctgacattgtaagattgccttactgtctgtcattccttattgctggcccctttctcaggccggaggccaagtggtggagaaggaaaggaaatgatcgaacgggcatgttgtcaagtgggcatgccactgggaaataccaccagtttaccctgaaacattgtcctcagaggagtaggaaagtggattttgaatctctattttgctcaaaagttcagttcctgagatactgatgactgagagtgctgctgggaaattttcaggattgtgtggtcttttggggttttttgtttttttttttttaagacaaagttgaccgctgttcactgtccacgtgatcagttgtaagattacaatgctgcatgctagttggttacataagatacaattccagtgatggaaggcggttataatggatggtggtgtgtacaagatggcactgccatctttgagcagagcccagctctgcagcgccacttcatctttttaaacaccctagaggtctgtttgttgttgctgttgtcctttattttgaaagagttgcaagagaagttacagtccaggtgaacttggagattgtgggattggttttgtttctgttttgttttgtttatcatttacctgtagtgctattgctgttgatactatcacctataccctgtttctagtgagtgctgaatacagtatggtacaatgacagtaacagccgcgtggtgctgccaggactgcccttgggcatatcagtgacagcccaaatgtgggtggaggaaacctgtaatttccttcttaacatgtgtttgaaataccaagtgaataatactgttctggaaaaaaatgataaactagtggaaattaaagaaattaagggttttatataatagacaggccccacctctcaaaatatttttagaagtctttttgtaaactaatttcttttgatcactattttgcatcagtaaaatgatttttttaaaaccaataaatcatcaattattagaaatagttgtctcacagtgatactggtttttcttttgtgctgttatgatttaacattgacaggaacactattttaaatccttacgttcaggtgtttgtaacttggccttataattaggctgaattatggcttcaaggtctacaatttatgtgtatggttcacagcctagcttctatttacatttgaaaatacagatttttaccaactttggattcttttttagttatatgtttgtctttcctttttaaattgttcaaaactattttttaatggtcaagttactaacacttgaaaatcagatactgcaccaaatacagtgtttttccgtagtgtttttaatgagtgcacctattactactgtgcgagaattcatgttttaccagtcattgttatattacaaacagacttgcatgattaaccagttgttacacttactttttcaagttggagtatatatgactcagtgcagactggtctctcttatgtgaatgcacacatgcagaaatgcagagtcaattttacatgcccataaagacatttgtaaagaattcagctcttatggtctgttgtataaatgtgtatctaggcactttggaatttgacctcacagatgttacaacttgatcagtcgtttgacctaatttgtggtagctatctgtatgttttgcaatcttaatacagacatgctttccaaaaagattaatacagaaccatcctgccgttttggataagtctatccagctgtggaaagggcaacctgtggtttctctgtactggtgtttaatgggggaagaatatgaacagctttaaagagctgtgtattgtggttactactattaaaaaataagatctgcacgagtctgactggcctttgggtggcctttgtggacggctcgtagctggaaagtgttgatctgggttttctggcattcttttaagttaaaaagttaacatcgggacatgggtttgatcttttgttgtacctgatgacagtgcagagattctccacagctggataaaaatgtcacaaagctacttactgtacatgggcagtatcagatttcaaatcctaatatttcagctgtgcttttaatactcaaaatattaggggatggggtgttgaagctttcccttttttgcttttaacaatttatagaatttaacagatgtactgtctttcatgtggcctcacatttaaagttatgagaacatacacatggtttacaacttttactatatacctttccttggccaccaagtattttaaaagtgtgccaccttttaacctttactttttttaagttgaaggtgatactttttctatatatgatgaaactcatgtcaactgaagtgagtgtaatctcagataccaacattattatattttaaaatcacgctatggaaatatcacctgaattctgtcatttgtcagatttacagtacctttttttctttaacttttagcattaaataaaaataaaattgggagcactgaa

SEQ ID NO: 143511 - DNA, 4157 bp, Homo sapiens
  Payload ID: 8352
  Gene Symbol: IRF2BPL
  Gene Name: interferon regulatory factor 2 binding protein-like
  Uniprot ID: Q9H1B7
  ENST ID: ENST00000238647
  CDS Start-End: 908-3298
gcgagccgcagccggagcaggagcgccgagacgcgcctccggaacgtagagtaacaatcacaaccccacattccgggcgagcgtgagcacgagcgggaagggatgcgacccgggccgaggcgccgcgcgagcgccctgcagccaacgtgagcgccgccagccgcggcggcccgggcgccggccaggcctgggggcggcgggagcctgcgtgcgtgcactcctctcctctgctctcgtgcgtcctggaagcagtggccgcggcggctccctccggggtgcaaacccagtcgccgccagcagaacggccgacgctgcggaggggagaaggtcctttctcggctgccaccccctcccccggtcctccggggaagcagcggcttcagcaagattggacccgggcaccgggtggcactgaaccctctggccctcgccccagggggcccgtcggggagaggacgcagctcgtaggggggtccccggggagaggaagagacagcccctttcgagcttccacgcaccagccactccggggagggggccaagaggcaacggcggccaccaccgggcaccctcgccccctcccctcgggccgggagcttccagcccaagtctgcagcaccaggaagaaggcgcctgagctcccctcgcgacgagtcaaccgcagtaggaggtgggggcgaagagagggctgaacccgtccgctgcccgggcggtggagcccccacggcgaggcgctgcgccggcggtggagactcgcgttccctccagcccctggggcagaactttctcgccccccctcctccctcccccgcagtcggactccctccccagccggccagtcctcccggaggagaaggcgccgcggagacagcccgggcgggggcctaccttccccagggcaggcatcatgtcggcggcgcaggtgtcctcgtcccggagacaatcttgctacctgtgcgacctgccccgcatgccctgggccatgatctgggacttctcggaacccgtatgccgcggttgcgtcaactacgagggcgctgatcgcatcgaattcgtgatcgagacagcgcgccagctgaagcgggcgcacggctgcttccaggacggccgctcccccgggccgccgccgcccgtcggggtcaagacagtggccctgtcggctaaggaagcggcggcggcggcggcagcagcggcggccgccgccgccgccgcgcaacagcaacagcaacagcagcagcagcagcagcaacagcagcagcagcagcagcagcagcagcagcaacaacagctcaaccacgttgatggttccagcaagcctgcggtgctggcggccccgtctggcctggagcgctacggcctaagcgctgccgccgccgccgccgccgccgccgccgctgcggtggaacagcgcagccgcttcgagtacccgccaccgccggtgagcctgggaagcagcagccacaccgcgcgactgcccaacggcctggggggcccaaacggcttccccaaaccaacaccagaggagggacccccagagctgaaccgtcagagccccaattcttcttcagcggcggcgtcggtggcgtctcggcgtggaacgcacggtgggctggttacggggctgcccaacccggggggtggcggaggcccccagctcaccgtgccccccaacctgctaccgcagacgctgcttaacggcccggccagcgctgcggtactccccccaccccctccccacgccctgggcagccgtgggcccccgacgcctgctcccccaggggctcctgggggccccgcttgtctcgggggtaccccgggtgtatcggccacgtcgtcctccgcgtcgtcttcgacctcttcgtcggtggcagaggtgggcgtgggtgctggtggtaagaggcccggctcggtgtcgagcacagaccaggagcgcgagttgaaggagaagcagcgcaacgccgaggccctggccgagctgagcgagagcctgcgcaaccgcgccgaggagtgggccagcaagcccaagatggtccgcgacacgctgctcacgctggcaggctgcacgccctacgaggttcgcttcaagaaggaccactcgctgctgggccgcgttttcgccttcgacgccgtctccaagcccggcatggactacgaattgaagctgttcattgagtaccccacgggctcgggcaacgtgtactccagtgcatctggtgtggccaagcagatgtatcaggactgcatgaaggacttcggccggggcctatcctcgggtttcaagtacctggagtacgaaaagaagcacggctccggggactggcgcctgcttggagacctgctccccgaagccgtgcgcttcttcaaggagggcgtgcccggcgccgacatgctgccccagccctacctggacgccagctgtcccatgctgcccactgctctggtgagtctgagccgcgcccccagcgcacccccggggaccggggccttgccgcccgccgcgccgtcgggccggggcgcagccgccagcctgcgcaagagaaaggcctctccggagcccccggactcagccgagggcgcgctgaagctgggcgaggaacagcagaggcagcagtggatggcgaaccagagcgaggcgctgaagctcaccatgtccgccgggggcttcgcggcgccggggcacgcggcggggggtccgcctccgccgcccccacctctgggaccccattccaaccggaccaccccacctgagtcagccccccagaacggtccgtcccctatggccgctctcatgtcggtggcagatactctgggcacagcgcactcgcccaaggatggcagttccgtgcactctaccactgcgtcggcgcggcgaaacagcagcagcccagtctcgccggcctccgtgccggggcagcgccgcttggcatcacgtaacggggacctgaatttacaggtggcgcccccgccgcctagcgcccacccgggcatggaccaagtgcacccccaaaacattccggattcccccatggccaacagcggacccctctgctgcaccatttgccacgaacgtttggaggatacgcatttcgttcagtgcccttccgtccccagccacaaattttgcttcccttgctctagagagagtatcaaggcccagggggccaccggcgaggtgtattgccccagcggagagaaatgccccctagtcgggtcgaatgtaccttgggccttcatgcagggcgaaatcgcgactatcttagctggggatgttaaagtgaaaaaggagagagacccttgaaccactgggcagccacctcctttgccctagaccagctcctctccaatcctgagggcccctcccccaacccaactcgaccctccctcccctcacccccaaggtgtagaattgtgaatataacgaaactgcaaaaagttagtcttatgtatagacattattttcgtcgtatgtttctatattttgaaacaaaggtatgtaacttcttcatttgaaggataagctggtttgtgttaagcagtatagtattggttgggtcatttgcatcatatcgttagcatttatttggtggcagaatgtttgcctaggtacagaattaatagcccttagcaacgactgctgctggtgtgtatttttgtaaatgttatgcactctctgaaaggaaaaacacacacaaaagaaaaagacttttttttttttttttttttttttgccaaggccagtgttgctgcctaaaaaaaaaaaaaaaaaaaaaaaaaaaaaaaaaaaatgctataaaatggtgaaagcttccttctaaactgccccaagtgttgaagtcttcactttattttgttgttttgttttgtttttctgttttgtttgcaaaatggtaagggggtgtcgggggggatggggtgtattttgttgcaagtttgtgaggggaaaatgttttggtttgtttctactgacctgaatgtgttggatctacacgtgttgttttgtttttgctttattgatgcacggatgcttttgaacagtagagcgaaatgctagacatggagaatctgctctgtttgtcctttatacatttctgtagttaacagaacactgtaatgtgccttggagcttagtaacttgtaataaattcaattgatattaa

SEQ ID NO: 143512 - DNA, 1691 bp, Homo sapiens
  Payload ID: 8353
  Gene Symbol: IRF3
  Gene Name: interferon regulatory factor 3
  Uniprot ID: Q14653
  ENST ID: ENST00000309877
  CDS Start-End: 332-1615
gctaccctgaaagtggggatacttactttcgatgatgtgggggagggaggaggtctatactggcggaattgagggagtggagggtctgcactgaagacgctggggaaggatgtgccatggatatgggaaggaaccctagctgattagagagcctctcgggaggatgggaggatgggaagaggaggtttcctgtttgtacccccgaaaatatgggtgaaggacctgtgccgtggcccgtgagaaggaggtctgggtgcggaaactccaggccaggtgggtccgggggaggccggtcgcgcccaggaaatgccctatacgcgcaggccggaccatgggaaccccaaagccacggatcctgccctggctggtgtcgcagctggacctggggcaactggagggcgtggcctgggtgaacaagagccgcacgcgcttccgcatcccttggaagcacggcctacggcaggatgcacagcaggaggatttcggaatcttccaggcctgggccgaggccactggtgcatatgttcccgggagggataagccagacctgccaacctggaagaggaatttccgctctgccctcaaccgcaaagaagggttgcgtttagcagaggaccggagcaaggaccctcacgacccacataaaatctacgagtttgtgaactcaggagttggggacttttcccagccagacacctctccggacaccaatggtggaggcagtacttctgatacccaggaagacattctggatgagttactgggtaacatggtgttggccccactcccagatccgggacccccaagcctggctgtagcccctgagccctgccctcagcccctgcggagccccagcttggacaatcccactcccttcccaaacctggggccctctgagaacccactgaagcggctgttggtgccgggggaagagtgggagttcgaggtgacagccttctaccggggccgccaagtcttccagcagaccatctcctgcccggagggcctgcggctggtggggtccgaagtgggagacaggacgctgcctggatggccagtcacactgccagaccctggcatgtccctgacagacaggggagtgatgagctacgtgaggcatgtgctgagctgcctgggtgggggactggctctctggcgggccgggcagtggctctgggcccagcggctggggcactgccacacatactgggcagtgagcgaggagctgctccccaacagcgggcatgggcctgatggcgaggtccccaaggacaaggaaggaggcgtgtttgacctggggcccttcattgtagatctgattaccttcacggaaggaagcggacgctcaccacgctatgccctctggttctgtgtgggggagtcatggccccaggaccagccgtggaccaagaggctcgtgatggtcaaggttgtgcccacgtgcctcagggccttggtagaaatggcccgggtagggggtgcctcctccctggagaatactgtggacctgcacatttccaacagccacccactctccctcacctccgaccagtacaaggcctacctgcaggacttggtggagggcatggatttccagggccctggggagagctgagccctcgctcctcatggtgtgcctccaacccccctgttccccaccacctcaaccaataaactggttcctgctatga

SEQ ID NO: 143513 - DNA, 1442 bp, Homo sapiens
  Payload ID: 8353
  Gene Symbol: IRF3
  Gene Name: interferon regulatory factor 3
  ENST ID: ENST00000377135
  CDS Start-End: 519-1364
ggaaacccaaaaaagggcataggggcgggaacagcccagcgggccgtcccatcggcttttgggtctgttacccaaagaatgataaagttggttttatttcaagaagtcgatcaaaaagaaagccccagcgctctagagctcagctgacgggaaagggggtgcgcagcctcgagtttgagagctacccggagctccaagacaggggtgggttccagctgcccgcacgccccgaccttccatcgtaggcctgggccgaggccactggtgcatatgttcccgggagggataagccagacctgccaacctggaagaggaatttccgctctgccctcaaccgcaaagaagggttgcgtttagcagaggaccggagcaaggaccctcacgacccacataaaatctacgagtttgtgaactcaggagttggggacttttcccagccagacacctctccggacaccaatggtggaggcagtacttctgatacccaggaagacattctggatgagttactgggtaacatggtgttggccccactcccagatccgggacccccaagcctggctgtagcccctgagccctgccctcagcccctgcggagccccagcttggacaatcccactcccttcccaaacctggggccctctgagaacccactgaagcggctgttggtgccgggggaagagtgggagttcgaggtgacagccttctaccggggccgccaagtcttccagcagaccatctcctgcccggagggcctgcggctggtggggtccgaagtgggagacaggacgctgcctggatggccagtcacactgccagaccctggcatgtccctgacagacaggggagtgatgagctacgtgaggcatgtgctgagctgcctgggtgggggactggctctctggcgggccgggcagtggctctgggcccagcggctggggcactgccacacatactgggcagtgagcgaggagctgctccccaacagcgggcatgggcctgatggcgaggtccccaaggacaaggaaggaggcgtgtttgacctggggcccttcattgtagatctgattaccttcacggaaggaagcggacgctcaccacgctatgccctctggttctgtgtgggggagtcatggccccaggaccagccgtggaccaagaggctcgtgatggtcaaggttgtgcccacgtgcctcagggccttggtagaaatggcccgggtagggggtgcctcctccctggagaatactgtggacctgcacatttccaacagccacccactctccctcacctccgaccagtacaaggcctacctgcaggacttggtggagggcatggatttccagggccctggggagagctgagccctcgctcctcatggtgtgcctccaacccccctgttccccaccacctcaaccaataaactggttcctgctatgatc

SEQ ID NO: 143514 - DNA, 1613 bp, Homo sapiens
  Payload ID: 8353
  Gene Symbol: IRF3
  Gene Name: interferon regulatory factor 3
  Uniprot ID: Q14653
  ENST ID: ENST00000377139
  CDS Start-End: 254-1537
ggaaacccaaaaaagggcataggggcgggaacagcccagcgggccgtcccatcggcttttgggtctgttacccaaagaatgataaagttggttttatttcaagaagtcgatcaaaaagaaagccccagcgctctagagctcagctgacgggaaagggggtgcgcagcctcgagtttgagagctacccggagctccaagacaggggtgggttccagctgcccgcacgccccgaccttccatcgtaggccggaccatgggaaccccaaagccacggatcctgccctggctggtgtcgcagctggacctggggcaactggagggcgtggcctgggtgaacaagagccgcacgcgcttccgcatcccttggaagcacggcctacggcaggatgcacagcaggaggatttcggaatcttccaggcctgggccgaggccactggtgcatatgttcccgggagggataagccagacctgccaacctggaagaggaatttccgctctgccctcaaccgcaaagaagggttgcgtttagcagaggaccggagcaaggaccctcacgacccacataaaatctacgagtttgtgaactcaggagttggggacttttcccagccagacacctctccggacaccaatggtggaggcagtacttctgatacccaggaagacattctggatgagttactgggtaacatggtgttggccccactcccagatccgggacccccaagcctggctgtagcccctgagccctgccctcagcccctgcggagccccagcttggacaatcccactcccttcccaaacctggggccctctgagaacccactgaagcggctgttggtgccgggggaagagtgggagttcgaggtgacagccttctaccggggccgccaagtcttccagcagaccatctcctgcccggagggcctgcggctggtggggtccgaagtgggagacaggacgctgcctggatggccagtcacactgccagaccctggcatgtccctgacagacaggggagtgatgagctacgtgaggcatgtgctgagctgcctgggtgggggactggctctctggcgggccgggcagtggctctgggcccagcggctggggcactgccacacatactgggcagtgagcgaggagctgctccccaacagcgggcatgggcctgatggcgaggtccccaaggacaaggaaggaggcgtgtttgacctggggcccttcattgtagatctgattaccttcacggaaggaagcggacgctcaccacgctatgccctctggttctgtgtgggggagtcatggccccaggaccagccgtggaccaagaggctcgtgatggtcaaggttgtgcccacgtgcctcagggccttggtagaaatggcccgggtagggggtgcctcctccctggagaatactgtggacctgcacatttccaacagccacccactctccctcacctccgaccagtacaaggcctacctgcaggacttggtggagggcatggatttccagggccctggggagagctgagccctcgctcctcatggtgtgcctccaacccccctgttccccaccacctcaaccaataaactggttcctgctatga

SEQ ID NO: 143515 - DNA, 315 bp, Homo sapiens
  Payload ID: 8353
  Gene Symbol: IRF3
  Gene Name: interferon regulatory factor 3
  Uniprot ID: Q14653
  ENST ID: ENST00000442265
  CDS Start-End: 1-315
atgggaaccccaaagccacggatcctgccctggctggtgtcgcagctggacctggggcaactggagggcgtggcctgggtgaacaagagccgcacgcgcttccgcatcccttggaagcacggcctacggcaggatgcacagcaggaggatttcggaatcttccaggagttggggacttttcccagccagacacctctccggacaccaatggtggaggcagtacttctgatacccaggaagacattctggatgagttactgggtaacatggtgttggccccactcccagatccgggacccccaagcctggctgtag

SEQ ID NO: 143516 - DNA, 823 bp, Homo sapiens
  Payload ID: 8353
  Gene Symbol: IRF3
  Gene Name: interferon regulatory factor 3
  ENST ID: ENST00000596822
  CDS Start-End: 399-806
agccccagcgctctagagctcagctgacgggaaagggggtgcgcagcctcgagtttgagagctacccggagctccaagacaggggtgggttccagctgcccgcacgccccgaccttccatcgtaggcctgggccgaggccactggtgcatatgttcccgggagggataagccagacctgccaacctggaagaggaatttccgctctgccctcaaccgcaaagaagggttgcgtttagcagaggaccggagcaaggaccctcacgacccacataaaatctacgagtttgtgaactcaggagttggggacttttcccagccagacacctctccggacaccaatggtggaggcagtacttctgatacccaggaagacattctggatgagttactgggtaacatggtgttggccccactcccagatccgggacccccaagcctggctgtagcccctgagccctgccctcagcccctgcggagccccagcttggacaatcccactcccttcccaaacctggggccctctgagaacccactgaagcggctgttggtgccgggggaaggttgtgcccacgtgcctcagggccttggtagaaatggcccgggtagggggtgcctcctccctggagaatactgtggacctgcacatttccaacagccacccactctccctcacctccgaccagtacaaggcctacctgcaggacttggtggagggcatggatttccagggccctggggagagctgagccctcgctcctcatggtgtgcctccaacccccctgttccccaccacctcaaccaataaactggttcctgctatga

SEQ ID NO: 143517 - DNA, 739 bp, Homo sapiens
  Payload ID: 8353
  Gene Symbol: IRF3
  Gene Name: interferon regulatory factor 3
  ENST ID: ENST00000595034
  CDS Start-End: 381-739
ttggttttatttcaagaagtcgatcaaaaagaaagccccagcgctctagagctcagctgacgggaaagggggtgcgcagcctcgagtttgagagctacccggagctccaagacaggggtgggttccagctgcccgcacgccccgaccttccatcgtaggtgcgtgcgacgacctgggacgctggaaacccggagctgcgcgctgggcggaaaggactcctagtgggcccggctgagaaggcggaggtggcgcgcgaggggcgggctcgtgccaacgctggagttggggacttttcccagccagacacctctccggacaccaatggtggaggcagtacttctgatacccaggaagacattctggatgagttactgggtaacatggtgttggccccactcccagatccgggacccccaagcctggctgtagcccctgagccctgccctcagcccctgcggagccccagcttggacaatcccactcccttcccaaacctggggccctctgagaacccactgaagcggctgttggtgccgggggaagagtgggagttcgaggtgacagccttctaccggggccgccaagtcttccagcagaccatctcctgcccggagggcctgcggctggtggggtccgaagtgggagacaggacgctgcctggatggccagtcacactgccagaccctggcatgtccctgacagacaggggagtgatgagctacgtgaggcatgtgctgag

SEQ ID NO: 143518 - DNA, 1741 bp, Homo sapiens
  Payload ID: 8353
  Gene Symbol: IRF3
  Gene Name: interferon regulatory factor 3
  Uniprot ID: Q14653
  ENST ID: ENST00000597198
  CDS Start-End: 383-1666
ataggggcgggaacagcccagcgggccgtcccatcggcttttgggtctgttacccaaagaatgataaagttggttttatttcaagaagtcgatcaaaaagaaagccccagcgctctagagctcagctgacgggaaagggggtgcgcagcctcgagtttgagagctacccggagctccaagacaggggtgggttccagctgcccgcacgccccgaccttccatcgtaggtaacgcggaagagcccgggagagcgttggtggcgtccgagagcgaggagcgggaaagaggatgggtctgcacggagagtggaaaggcaggctgtgtactctggggaaagtggagcaaggaaggagctacagtggccgacgctggaggccggaccatgggaaccccaaagccacggatcctgccctggctggtgtcgcagctggacctggggcaactggagggcgtggcctgggtgaacaagagccgcacgcgcttccgcatcccttggaagcacggcctacggcaggatgcacagcaggaggatttcggaatcttccaggcctgggccgaggccactggtgcatatgttcccgggagggataagccagacctgccaacctggaagaggaatttccgctctgccctcaaccgcaaagaagggttgcgtttagcagaggaccggagcaaggaccctcacgacccacataaaatctacgagtttgtgaactcaggagttggggacttttcccagccagacacctctccggacaccaatggtggaggcagtacttctgatacccaggaagacattctggatgagttactgggtaacatggtgttggccccactcccagatccgggacccccaagcctggctgtagcccctgagccctgccctcagcccctgcggagccccagcttggacaatcccactcccttcccaaacctggggccctctgagaacccactgaagcggctgttggtgccgggggaagagtgggagttcgaggtgacagccttctaccggggccgccaagtcttccagcagaccatctcctgcccggagggcctgcggctggtggggtccgaagtgggagacaggacgctgcctggatggccagtcacactgccagaccctggcatgtccctgacagacaggggagtgatgagctacgtgaggcatgtgctgagctgcctgggtgggggactggctctctggcgggccgggcagtggctctgggcccagcggctggggcactgccacacatactgggcagtgagcgaggagctgctccccaacagcgggcatgggcctgatggcgaggtccccaaggacaaggaaggaggcgtgtttgacctggggcccttcattgtagatctgattaccttcacggaaggaagcggacgctcaccacgctatgccctctggttctgtgtgggggagtcatggccccaggaccagccgtggaccaagaggctcgtgatggtcaaggttgtgcccacgtgcctcagggccttggtagaaatggcccgggtagggggtgcctcctccctggagaatactgtggacctgcacatttccaacagccacccactctccctcacctccgaccagtacaaggcctacctgcaggacttggtggagggcatggatttccagggccctggggagagctgagccctcgctcctcatggtgtgcctccaacccccctgttccccaccacctcaaccaataaactggttcctgctatg

SEQ ID NO: 143519 - DNA, 1117 bp, Homo sapiens
  Payload ID: 8353
  Gene Symbol: IRF3
  Gene Name: interferon regulatory factor 3
  ENST ID: ENST00000599144
  CDS Start-End: 203-1048
tgacgggaaagggggtgcgcagcctcgagtttgagagctacccggagctccaagacaggggtgggttccagctgcccgcacgccccgaccttccatcgtaggagttggggacttttcccagccagacacctctccggacaccaatggtggaggcagtacttctgatacccaggaagacattctggatgagttactgggtaacatggtgttggccccactcccagatccgggacccccaagcctggctgtagcccctgagccctgccctcagcccctgcggagccccagcttggacaatcccactcccttcccaaacctggggccctctgagaacccactgaagcggctgttggtgccgggggaagagtgggagttcgaggtgacagccttctaccggggccgccaagtcttccagcagaccatctcctgcccggagggcctgcggctggtggggtccgaagtgggagacaggacgctgcctggatggccagtcacactgccagaccctggcatgtccctgacagacaggggagtgatgagctacgtgaggcatgtgctgagctgcctgggtgggggactggctctctggcgggccgggcagtggctctgggcccagcggctggggcactgccacacatactgggcagtgagcgaggagctgctccccaacagcgggcatgggcctgatggcgaggtccccaaggacaaggaaggaggcgtgtttgacctggggcccttcattgtagatctgattaccttcacggaaggaagcggacgctcaccacgctatgccctctggttctgtgtgggggagtcatggccccaggaccagccgtggaccaagaggctcgtgatggtcaaggttgtgcccacgtgcctcagggccttggtagaaatggcccgggtagggggtgcctcctccctggagaatactgtggacctgcacatttccaacagccacccactctccctcacctccgaccagtacaaggcctacctgcaggacttggtggagggcatggatttccagggccctggggagagctgagccctcgctcctcatggtgtgcctccaacccccctgttccccaccacctcaaccaataaactggttcct

SEQ ID NO: 143520 - DNA, 768 bp, Homo sapiens
  Payload ID: 8353
  Gene Symbol: IRF3
  Gene Name: interferon regulatory factor 3
  ENST ID: ENST00000601809
  CDS Start-End: 197-768
gcataggggcgggaacagcccagcgggccgtcccatcggcttttgggtctgttacccaaagaatgataaagttggttttatttcaagaagtcgatcaaaaagaaagccccagcgctctagagctcagctgacgggaaagggggtgcgcagcctcgagtttgagagctacccggagctccaagacaggggccggaccatgggaaccccaaagccacggatcctgccctggctggtgtcgcagctggacctggggcaactggagggcgtggcctgggtgaacaagagccgcacgcgcttccgcatcccttggaagcacggcctacggcaggatgcacagcaggaggatttcggaatcttccaggcctgggccgaggccactggtgcatatgttcccgggagggataagccagacctgccaacctggaagaggaatttccgctctgccctcaaccgcaaagaagggttgcgtttagcagaggaccggagcaaggaccctcacgacccacataaaatctacgagtttgtgaactcaggagttggggacttttcccagccagacacctctccggacaccaatggtggaggcagtacttctgatacccaggaagacattctggatgagttactgggtaacatggtgttggccccactcccagatccgggacccccaagcctggctgtagcccctgagccctgccctcagcccctgcggagccccagcttggacaatcccactcccttcccaaacctggggccctctgagaaccc

SEQ ID NO: 143521 - DNA, 1637 bp, Homo sapiens
  Payload ID: 8353
  Gene Symbol: IRF3
  Gene Name: interferon regulatory factor 3
  ENST ID: ENST00000600911
  CDS Start-End: 394-1620
tgcaggaggtagaggcttacacgtgaatcgattctgcactgaaataactagggaaagaggatgctaccctgaaagtggggatacttactttcgatgatgtgggggagggaggaggtctatactggcggaattgagggagtggagggtctgcactgaagacgctggggaaggatgtgccatggatatgggaaggaaccctagctgattagagagcctctcgggaggatgggaggatgggaagaggaggtttcctgtttgtacccccgaaaatatgggtgaaggacctgtgccgtggcccgtgagaaggaggtctgggtgcggaaactccaggccaggtgggtccgggggaggccggtcgcgcccaggaaatgccctatacgcgcaggccggaccatgggaaccccaaagccacggatcctgccctggctggtgtcgcagctggacctggggcaactggagggcgtggcctgggtgaacaagagccgcacgcgcttccgcatcccttggaagcacggcctacggcaggatgcacagcaggaggatttcggaatcttccaggcctgggccgaggccactggtgcatatgttcccgggagggataagccagacctgccaacctggaagaggaatttccgctctgccctcaaccgcaaagaagggttgcgtttagcagaggaccggagcaaggaccctcacgacccacataaaatctacgagtttgtgaactcaggagttggggacttttcccagccagacacctctccggacaccaatggtggaggcagtacttctgatacccaggaagacattctggatgagttactgggtaacatggtgttggccccactcccagatccgggacccccaagcctggctgtagcccctgagccctgccctcagcccctgcggagccccagcttggacaatcccactcccttcccaaacctggggccctctgagaacccactgaagcggctgttggtgccgggggaagagtgggagttcgaggtgacagccttctaccggggccgccaagtcttccagcagaccatctcctgcccggagggcctgcggctggtggggtccgaagtgggagacaggacgctgcctggatggccagtcacactgccagaccctggcatgtccctgacagacaggggagtgatgagctacgtgaggcatgtgctgagctgcctgggtgggggactggctctctggcgggccgggcagtggctctgggcccagcggctggggcactgccacacatactgggcagtgagcgaggagctgctccccaacagcgggcatgggcctgatggcgaggtccccaaggacaaggaaggaggcgtgtttgacctggggcccttcattgtaggttgtgcccacgtgcctcagggccttggtagaaatggcccgggtagggggtgcctcctccctggagaatactgtggacctgcacatttccaacagccacccactctccctcacctccgaccagtacaaggcctacctgcaggacttggtggagggcatggatttccagggccctggggagagctgagccctcgctcctcatggtgtgcctccaacccccctgttccccaccacctcaaccaataaactggttcctgctatga

SEQ ID NO: 143522 - DNA, 2874 bp, Homo sapiens
  Payload ID: 8353
  Gene Symbol: IRF3
  Gene Name: interferon regulatory factor 3
  ENST ID: ENST00000597636
  CDS Start-End: 1020-2009
ataggggcgggaacagcccagcgggccgtcccatcggcttttgggtctgttacccaaagaatgataaagttggttttatttcaagaagtcgatcaaaaagaaagccccagcgctctagagctcagctgacgggaaagggggtgcgcagcctcgagtttgagagctacccggagctccaagacaggggtgggttccagctgcccgcacgccccgaccttccatcgtaggtaacgcggaagagcccgggagagcgttggtggcgtccgagagcgaggagcgggaaagaggatgggtctgcacggagagtggaaaggcaggctgtgtactctggggaaagtggagcaaggaaggagctacagtggccgacgctggaggtcggctgcagaaaaactagaaaaagtagggaggaaagaggaaaagaggaggcgtctacactgagggggttctagagagggaggggtggactccgtagatgggggtagttcagtctcgaaacctggggcgtgctctgtcctggaggagggaggcgggcagtcggaggggaattgaatggaagttctgtgttggaaatgttttgggagatcttctgtagggggactgtggaagggggtctacattggggtaagtgcaggaggtagaggcttacacgtgaatcgattctgcactgaaataactagggaaagaggatgctaccctgaaagtggggatacttactttcgatgatgtgggggagggaggaggtctatactggcggaattgagggagtggagggtctgcactgaagacgctggggaaggatgtgccatggatatgggaaggaaccctagctgattagagagcctctcgggaggatgggaggatgggaagaggaggtttcctgtttgtacccccgaaaatatgggtgaaggacctgtgccgtggcccgtgagaaggaggtctgggtgcggaaactccaggccaggtgggtccgggggaggccggtcgcgcccaggaaatgccctatacgcgcaggccggaccatgggaaccccaaagccacggatcctgccctggctggtgtcgcagctggacctggggcaactggagggcgtggcctgggtgaacaagagccgcacgcgcttccgcatcccttggaagcacggcctacggcaggatgcacagcaggaggatttcggaatcttccaggcctgggccgaggccactggtgcatatgttcccgggagggataagccagacctgccaacctggaagaggaatttccgctctgccctcaaccgcaaagaagggttgcgtttagcagaggaccggagcaaggaccctcacgacccacataaaatctacgagtttgtgaactcaggagttggggacttttcccagccagacacctctccggacaccaatggtggaggcagtacttctgatacccaggaagacattctggatgagttactgggtaacatggtgttggccccactcccagatccgggacccccaagcctggctgtagcccctgagccctgccctcagcccctgcggagccccagcttggacaatcccactcccttcccaaacctggggccctctgagaacccactgaagcggctgttggtgccgggggaagagtgggagttcgaggtgacagccttctaccggggccgccaagtcttccagcagaccatctcctgcccggagggcctgcggctggtggggtccgaagtgggagacaggacgctgcctggatggccagtcacactgccagaccctggcatgtccctgacagacaggggagtgatgagctacgtgaggcatgtgctgagctgcctgggtgggggactggctctctggcgggccgggcagtggctctgggcccagcggctggggcactgccacacatactgggcagtgagcgaggagctgctccccaacagcgggcatgggcctgatggcgaggtccccaaggacaaggaaggaggcgtgtttgacctggggcccttcattgtaggtgagtgagacaggggcttcgacctggccagtacaaagcagcctgcacagtggttaacaactcaggattggccgggcacggtggctcacgcctgtagtcccagcactttgggaggctgaggtgggcagatgacaagttcaggagttcgagaccagcctggtcaacatagtgaaaccccatctctactaaagatacaaaaaaatagtcgggcgtggtggcacgtgcctgtaatcccagctactcgggaggctgaggcaggagaattgcttgaacccaggaggcggagattgcagtgagctgagatcgcaccactgcactctagcctggtgacagagtaagactccatctcgaacaacaaaaaaaaaagaactcatgattaggactgaattcagacgctggctgcccttggcccgctgtataaccgaggcaaaggactttgccctgagcccgtggaatccaaggatggtctcctctctctacctgcctgccagcgctgggatctgattaccttcacggaaggaagcggacgctcaccacgctatgccctctggttctgtgtgggggagtcatggccccaggaccagccgtggaccaagaggctcgtgatggtcaaggttgtgcccacgtgcctcagggccttggtagaaatggcccgggtagggggtgcctcctccctggagaatactgtggacctgcacatttccaacagccacccactctccctcacctccgaccagtacaaggcctacctgcaggacttggtggagggcatggatttccagggccctggggagagctgagccctcgctcctcatggtgtgcctccaacccccctgttccccaccacctcaaccaataaactggttcctgcta

SEQ ID NO: 143523 - DNA, 710 bp, Homo sapiens
  Payload ID: 8353
  Gene Symbol: IRF3
  Gene Name: interferon regulatory factor 3
  Uniprot ID: Q14653
  ENST ID: ENST00000596765
  CDS Start-End: 177-641
gagtttgagagctacccggagctccaagacaggggtgggttccagctgcccgcacgccccgaccttccatcgtaggagttggggacttttcccagccagacacctctccggacaccaatggtggaggcagtacttctgatacccaggaagacattctggatgagttactgggtaacatggtgttggccccactcccagatccgggacccccaagcctggctgtagcccctgagccctgccctcagcccctgcggagccccagcttggacaatcccactcccttcccaaacctggggccctctgagaacccactgaagcggctgttggtgccgggggaagatctgattaccttcacggaaggaagcggacgctcaccacgctatgccctctggttctgtgtgggggagtcatggccccaggaccagccgtggaccaagaggctcgtgatggtcaaggttgtgcccacgtgcctcagggccttggtagaaatggcccgggtagggggtgcctcctccctggagaatactgtggacctgcacatttccaacagccacccactctccctcacctccgaccagtacaaggcctacctgcaggacttggtggagggcatggatttccagggccctggggagagctgagccctcgctcctcatggtgtgcctccaacccccctgttccccaccacctcaaccaataaactggttcct

SEQ ID NO: 143524 - DNA, 700 bp, Homo sapiens
  Payload ID: 8353
  Gene Symbol: IRF3
  Gene Name: interferon regulatory factor 3
  ENST ID: ENST00000600453
  CDS Start-End: 394-700
agcccagcgggccgtcccatcggcttttgggtctgttacccaaagaatgataaagttggttttatttcaagaagtcgatcaaaaagaaagccccagcgctctagagctcagctgacgggaaagggggtgcgcagcctcgagtttgagagctacccggagctccaagacaggggtgggttccagctgcccgcacgccccgaccttccatcgtaggtaacgcggaagagcccgggagagcgttggtggcgtccgagagcgaggagcgggaaagaggatgggtctgcacggagagtggaaaggcaggctgtgtactctggggaaagtggagcaaggaaggagctacagtggccgacgctggaggtcggctgcagaaaaactagaaaaagccggaccatgggaaccccaaagccacggatcctgccctggctggtgtcgcagctggacctggggcaactggagggcgtggcctgggtgaacaagagccgcacgcgcttccgcatcccttggaagcacggcctacggcaggatgcacagcaggaggatttcggaatcttccaggcctgggccgaggccactggtgcatatgttcccgggagggataagccagacctgccaacctggaagaggaatttccgctctgccctcaaccgcaaagaagggttgcgtttagcagaggaccggagcaaggaccctcacgacc

SEQ ID NO: 143525 - DNA, 1055 bp, Homo sapiens
  Payload ID: 8353
  Gene Symbol: IRF3
  Gene Name: interferon regulatory factor 3
  Uniprot ID: Q14653
  ENST ID: ENST00000599223
  CDS Start-End: 84-986
gagtttgagagctacccggagctccaagacaggggtgggttccagctgcccgcacgccccgaccttccatcgtaggccggaccatgggaaccccaaagccacggatcctgccctggctggtgtcgcagctggacctggggcaactggagggcgtggcctgggtgaacaagagccgcacgcgcttccgcatcccttggaagcacggcctacggcaggatgcacagcaggaggatttcggaatcttccaggcctgggccgaggccactggtgcatatgttcccgggagggataagccagacctgccaacctggaagaggaatttccgctctgccctcaaccgcaaagaagggttgcgtttagcagaggaccggagcaaggaccctcacgacccacataaaatctacgagtttgtgaactcaggagttggggacttttcccagccagacacctctccggacaccaatggtggaggcagtacttctgatacccaggaagacattctggatgagttactgggtaacatggtgttggccccactcccagatccgggacccccaagcctggctgtagcccctgagccctgccctcagcccctgcggagccccagcttggacaatcccactcccttcccaaacctggggccctctgagaacccactgaagcggctgttggtgccgggggaagatctgattaccttcacggaaggaagcggacgctcaccacgctatgccctctggttctgtgtgggggagtcatggccccaggaccagccgtggaccaagaggctcgtgatggtcaaggttgtgcccacgtgcctcagggccttggtagaaatggcccgggtagggggtgcctcctccctggagaatactgtggacctgcacatttccaacagccacccactctccctcacctccgaccagtacaaggcctacctgcaggacttggtggagggcatggatttccagggccctggggagagctgagccctcgctcctcatggtgtgcctccaacccccctgttccccaccacctcaaccaataaactggttcct

SEQ ID NO: 143526 - DNA, 680 bp, Homo sapiens
  Payload ID: 8353
  Gene Symbol: IRF3
  Gene Name: interferon regulatory factor 3
  ENST ID: ENST00000601373
  CDS Start-End: 428-680
ttttatttcaagaagtcgatcaaaaagaaagccccagcgctctagagctcagctgacgggaaagggggtgcgcagcctcgagtttgagagctacccggagctccaagacaggggtgggttccagctgcccgcacgccccgaccttccatcgtaggcctgggccgaggccactggtgcatatgttcccgggagggataagccagacctgccaacctggaagaggaatttccgctctgccctcaaccgcaaagaagggttgcgtttagcagaggaccggagcaaggaccctcacgacccacataaaatctacgagtttgtgaactcaggagttggggacttttcccagccagacacctctccggacaccaatggtggaggcagtacttctgatacccaggaagacattctggatgagttactgggtaacatggtgttggccccactcccagatccgggacccccaagcctggctgtagcccctgagccctgccctcagcccctgcggagccccagcttggacaatcccactcccttcccaaacctggggccctctgagaacccactgaagcggctgttggtgccgggggaagagtgggagttcgaggtgacagccttctaccggggccgccaagtcttccagcagaccatctcctgcccggagggcctgcggctggtggggt

SEQ ID NO: 143527 - DNA, 924 bp, Homo sapiens
  Payload ID: 8353
  Gene Symbol: IRF3
  Gene Name: interferon regulatory factor 3
  ENST ID: ENST00000593818
  CDS Start-End: 608-924
gaacagcccagcgggccgtcccatcggcttttgggtctgttacccaaagaatgataaagttggttttatttcaagaagtcgatcaaaaagaaagccccagcgctctagagctcagctgacgggaaagggggtgcgcagcctcgagtttgagagctacccggagctccaagacaggggtgggttccagctgcccgcacgccccgaccttccatcgtgcgtgcgacgacctgggacgctggaaacccggagctgcgcgctgggcggaaaggactcctagtgggcccggctgagaaggcggaggtggcgcgcgaggggcgggctcgtgccaacgctggcctgggccgaggccactggtgcatatgttcccgggagggataagccagacctgccaacctggaagaggaatttccgctctgccctcaaccgcaaagaagggttgcgtttagcagaggaccggagcaaggaccctcacgacccacataaaatctacgagtttgtgaactcaggagttggggacttttcccagccagacacctctccggacaccaatggtggaggcagtacttctgatacccaggaagacattctggatgagttactgggtaacatggtgttggccccactcccagatccgggacccccaagcctggctgtagcccctgagccctgccctcagcccctgcggagccccagcttggacaatcccactcccttcccaaacctggggccctctgagaacccactgaagcggctgttggtgccgggggaagagtgggagttcgaggtgacagccttctaccggggccgccaagtcttccagcagaccatctcctgcccggagggcctgcggctggtggggtccgaagtgggagacaggacgctgcctggatggccagtcacactgccagaccctggcatgtccct

SEQ ID NO: 143528 - DNA, 1556 bp, Homo sapiens
  Payload ID: 8353
  Gene Symbol: IRF3
  Gene Name: interferon regulatory factor 3
  Uniprot ID: Q14653
  ENST ID: ENST00000601291
  CDS Start-End: 181-1539
aaagaatgataaagttggttttatttcaagaagtcgatcaaaaagaaagccccagcgctctagagctcagctgacgggaaagggggtgcgcagcctcgagtttgagagctacccggagctccaagacaggggtgggttccagctgcccgcacgccccgaccttccatcgtaggccggaccatgggaaccccaaagccacggatcctgccctggctggtgtcgcagctggacctggggcaactggagggcgtggcctgggtgaacaagagccgcacgcgcttccgcatcccttggaagcacggcctacggcaggatgcacagcaggaggatttcggaatcttccaggcctgggccgaggccactggtgcatatgttcccgggagggataagccagacctgccaacctggaagaggaatttccgctctgccctcaaccgcaaagaagggttgcgtttagcagaggaccggagcaaggaccctcacgacccacataaaatctacgagtttgtgaactcaggagttggggacttttcccagccagacacctctccggacaccaatggtggaggcagtacttctgatacccaggaagacattctggatgagttactgggtaacatggtgttggccccactcccagatccgggacccccaagcctggctgtagcccctgagccctgccctcagcccctgcggagccccagcttggacaatcccactcccttcccaaacctggggccctctgagaacccactgaagcggctgttggtgccgggggaagagtgggagttcgaggtgacagccttctaccggggccgccaagtcttccagcagaccatctcctgcccggagggcctgcggctggtggggtccgaagtgggagacaggacgctgcctggatggccagtcacactgccagaccctggcatgtccctgacagacaggggagtgatgagctacgtgaggcatgtgctgagctgcctgggtgggggactggctctctggcgggccgggcagtggctctgggcccagcggctggggcactgccacacatactgggcagtgagcgaggagctgctccccaacagcgggcatgggcctgatggcgaggtccccaaggacaaggaaggaggcgtgtttgacctggggcccttcattgtaggctcctgggcccccagatctgattaccttcacggaaggaagcggacgctcaccacgctatgccctctggttctgtgtgggggagtcatggccccaggaccagccgtggaccaagaggctcgtgatggtcaaggttgtgcccacgtgcctcagggccttggtagaaatggcccgggtagggggtgcctcctccctggagaatactgtggacctgcacatttccaacagccacccactctccctcacctccgaccagtacaaggcctacctgcaggacttggtggagggcatggatttccagggccctggggagagctgagccctcgctcctcatggtgtgcctccaacccccctgttccccaccacctcaaccaataaactggttcctgctatga

SEQ ID NO: 143529 - DNA, 1118 bp, Homo sapiens
  Payload ID: 8353
  Gene Symbol: IRF3
  Gene Name: interferon regulatory factor 3
  ENST ID: ENST00000598108
  CDS Start-End: 258-1118
tttcaagaagtcgatcaaaaagaaagccccagcgctctagagctcagctgacgggaaagggggtgcgcagcctcgagtttgagagctacccggagctccaagacaggggtgggttccagctgcccgcacgccccgaccttccatcgacctgtgccgtggcccgtgagaaggaggtctgggtgcggaaactccaggccaggtgggtccgggggaggccggtcgcgcccaggaaatgccctatacgcgcaggccggaccatgggaaccccaaagccacggatcctgccctggctggtgtcgcagctggacctggggcaactggagggcgtggcctgggtgaacaagagccgcacgcgcttccgcatcccttggaagcacggcctacggcaggatgcacagcaggaggatttcggaatcttccaggcctgggccgaggccactggtgcatatgttcccgggagggataagccagacctgccaacctggaagaggaatttccgctctgccctcaaccgcaaagaagggttgcgtttagcagaggaccggagcaaggaccctcacgacccacataaaatctacgagtttgtgaactcaggagttggggacttttcccagccagacacctctccggacaccaatggtggaggcagtacttctgatacccaggaagacattctggatgagttactgggtaacatggtgttggccccactcccagatccgggacccccaagcctggctgtagcccctgagccctgccctcagcccctgcggagccccagcttggacaatcccactcccttcccaaacctggggccctctgagaacccactgaagcggctgttggtgccgggggaagagtgggagttcgaggtgacagccttctaccggggccgccaagtcttccagcagaccatctcctgcccggagggcctgcggctggtggggtccgaagtgggagacaggacgctgcctggatggccagtcacactgccagaccctggcatgtccctgacagacaggggagtgatgagctacgtgaggcatgtgctgagctgcctgggtgggggactggctctctggcgggccgggcagtggctctgggcccagcggctgggg

SEQ ID NO: 143530 - DNA, 1468 bp, Homo sapiens
  Payload ID: 8353
  Gene Symbol: IRF3
  Gene Name: interferon regulatory factor 3
  ENST ID: ENST00000598808
  CDS Start-End: 607-1452
gcccagcgggccgtcccatcggcttttgggtctgttacccaaagaatgataaagttggttttatttcaagaagtcgatcaaaaagaaagccccagcgctctagagctcagctgacgggaaagggggtgcgcagcctcgagtttgagagctacccggagctccaagacaggggtgggttccagctgcccgcacgccccgaccttccatcgtaggtgcgtgcgacgacctgggacgctggaaacccggagctgcgcgctgggcggaaaggactcctagtgggcccggctgagaaggcggaggtggcgcgcgaggggcgggctcgtgccaacgctggcctgggccgaggccactggtgcatatgttcccgggagggataagccagacctgccaacctggaagaggaatttccgctctgccctcaaccgcaaagaagggttgcgtttagcagaggaccggagcaaggaccctcacgacccacataaaatctacgagtttgtgaactcaggagttggggacttttcccagccagacacctctccggacaccaatggtggaggcagtacttctgatacccaggaagacattctggatgagttactgggtaacatggtgttggccccactcccagatccgggacccccaagcctggctgtagcccctgagccctgccctcagcccctgcggagccccagcttggacaatcccactcccttcccaaacctggggccctctgagaacccactgaagcggctgttggtgccgggggaagagtgggagttcgaggtgacagccttctaccggggccgccaagtcttccagcagaccatctcctgcccggagggcctgcggctggtggggtccgaagtgggagacaggacgctgcctggatggccagtcacactgccagaccctggcatgtccctgacagacaggggagtgatgagctacgtgaggcatgtgctgagctgcctgggtgggggactggctctctggcgggccgggcagtggctctgggcccagcggctggggcactgccacacatactgggcagtgagcgaggagctgctccccaacagcgggcatgggcctgatggcgaggtccccaaggacaaggaaggaggcgtgtttgacctggggcccttcattgtagatctgattaccttcacggaaggaagcggacgctcaccacgctatgccctctggttctgtgtgggggagtcatggccccaggaccagccgtggaccaagaggctcgtgatggtcaaggttgtgcccacgtgcctcagggccttggtagaaatggcccgggtagggggtgcctcctccctggagaatactgtggacctgcacatttccaacagccacccactctccctcacctccgaccagtacaaggcctacctgcaggacttggtggagggcatggatttccagggccctggggagagctgagccctcgctcctcatg

SEQ ID NO: 143531 - DNA, 1494 bp, Homo sapiens
  Payload ID: 8353
  Gene Symbol: IRF3
  Gene Name: interferon regulatory factor 3
  ENST ID: ENST00000593922
  CDS Start-End: 580-1425
gagtttgagagctacccggagctccaagacaggggtgggttccagctgcccgcacgccccgaccttccatcgtaggtgcgtgcgacgacctgggacgctggaaacccggagctgcgcgctgggcggaaaggactcctagtgggcccggctgagaaggcggaggtggcgcgcgaggggcgggctcgtgccaacgctggtgggtggggctagaacgggaggggcggggctagccggatccgctgactgatggtggggcgcaagcagggttggagctgcagggttacgggaataaaaccgggaaagccggcctgggccgaggccactggtgcatatgttcccgggagggataagccagacctgccaacctggaagaggaatttccgctctgccctcaaccgcaaagaagggttgcgtttagcagaggaccggagcaaggaccctcacgacccacataaaatctacgagtttgtgaactcaggagttggggacttttcccagccagacacctctccggacaccaatggtggaggcagtacttctgatacccaggaagacattctggatgagttactgggtaacatggtgttggccccactcccagatccgggacccccaagcctggctgtagcccctgagccctgccctcagcccctgcggagccccagcttggacaatcccactcccttcccaaacctggggccctctgagaacccactgaagcggctgttggtgccgggggaagagtgggagttcgaggtgacagccttctaccggggccgccaagtcttccagcagaccatctcctgcccggagggcctgcggctggtggggtccgaagtgggagacaggacgctgcctggatggccagtcacactgccagaccctggcatgtccctgacagacaggggagtgatgagctacgtgaggcatgtgctgagctgcctgggtgggggactggctctctggcgggccgggcagtggctctgggcccagcggctggggcactgccacacatactgggcagtgagcgaggagctgctccccaacagcgggcatgggcctgatggcgaggtccccaaggacaaggaaggaggcgtgtttgacctggggcccttcattgtagatctgattaccttcacggaaggaagcggacgctcaccacgctatgccctctggttctgtgtgggggagtcatggccccaggaccagccgtggaccaagaggctcgtgatggtcaaggttgtgcccacgtgcctcagggccttggtagaaatggcccgggtagggggtgcctcctccctggagaatactgtggacctgcacatttccaacagccacccactctccctcacctccgaccagtacaaggcctacctgcaggacttggtggagggcatggatttccagggccctggggagagctgagccctcgctcctcatggtgtgcctccaacccccctgttccccaccacctcaaccaataaactggttcct

SEQ ID NO: 143532 - DNA, 882 bp, Homo sapiens
  Payload ID: 8353
  Gene Symbol: IRF3
  Gene Name: interferon regulatory factor 3
  Uniprot ID: Q14653
  ENST ID: ENST00000600022
  CDS Start-End: 349-813
gagtttgagagctacccggagctccaagacaggggtgggttccagctgcccgcacgccccgaccttccatcgtaggcctgggccgaggccactggtgcatatgttcccgggagggataagccagacctgccaacctggaagaggaatttccgctctgccctcaaccgcaaagaagggttgcgtttagcagaggaccggagcaaggaccctcacgacccacataaaatctacgagtttgtgaactcaggagttggggacttttcccagccagacacctctccggacaccaatggtggaggcagtacttctgatacccaggaagacattctggatgagttactgggtaacatggtgttggccccactcccagatccgggacccccaagcctggctgtagcccctgagccctgccctcagcccctgcggagccccagcttggacaatcccactcccttcccaaacctggggccctctgagaacccactgaagcggctgttggtgccgggggaagatctgattaccttcacggaaggaagcggacgctcaccacgctatgccctctggttctgtgtgggggagtcatggccccaggaccagccgtggaccaagaggctcgtgatggtcaaggttgtgcccacgtgcctcagggccttggtagaaatggcccgggtagggggtgcctcctccctggagaatactgtggacctgcacatttccaacagccacccactctccctcacctccgaccagtacaaggcctacctgcaggacttggtggagggcatggatttccagggccctggggagagctgagccctcgctcctcatggtgtgcctccaacccccctgttccccaccacctcaaccaataaactggttcct

SEQ ID NO: 143533 - DNA, 931 bp, Homo sapiens
  Payload ID: 8353
  Gene Symbol: IRF3
  Gene Name: interferon regulatory factor 3
  ENST ID: ENST00000596756
  CDS Start-End: 139-931
gggagagcgttggtggcgtccgagagcgaggagcgggaaagaggatgggtctgcacggagagtggaaaggcaggctgtgtactctggggaaagtggagcaaggaaggagctacagtggccgacgctggaggccggaccatgggaaccccaaagccacggatcctgccctggctggtgtcgcagctggacctggggcaactggagggcgtggcctgggtgaacaagagccgcacgcgcttccgcatcccttggaagcacggcctacggcaggatgcacagcaggaggatttcggaatcttccaggcctgggccgaggccactggtgcatatgttcccgggagggataagccagacctgccaacctggaagaggaatttccgctctgccctcaaccgcaaagaagggttgcgtttagcagaggaccggagcaaggaccctcacgacccacataaaatctacgagtttgtgaactcaggagttggggacttttcccagccagacacctctccggacaccaatggtggaggcagtacttctgatacccaggaagacattctggatgagttactgggtaacatggtgttggccccactcccagatccgggacccccaagcctggctgtagcccctgagccctgccctcagcccctgcggagccccagcttggacaatcccactcccttcccaaacctggggccctctgagaacccactgaagcggctgttggtgccgggggaagatctgattaccttcacggaaggaagcggacgctcaccacgctatgccctctggttctgtgtgggggagtcatggccccaggaccagccgtggaccaagaggctcgtgatggtcaaggttgtgcccacgtgcctcagggccttggtagaaatggcccgggtagggggtgcctcctccctggagaatactgtgg

SEQ ID NO: 143534 - DNA, 633 bp, Homo sapiens
  Payload ID: 8353
  Gene Symbol: IRF3
  Gene Name: interferon regulatory factor 3
  ENST ID: ENST00000593337
  CDS Start-End: 173-633
gggccgtcccatcggcttttgggtctgttacccaaagaatgataaagttggttttatttcaagaagtcgatcaaaaagaaagccccagcgctctagagctcagctgacgggaaagggggtgcgcagcctcgagtttgagagctacccggagctccaagacaggggccggaccatgggaaccccaaagccacggatcctgccctggctggtgtcgcagctggacctggggcaactggagggcgtggcctgggtgaacaagagccgcacgcgcttccgcatcccttggaagcacggcctacggcaggatgcacagcaggaggatttcggaatcttccaggcctgggccgaggccactggtgcatatgttcccgggagggataagccagacctgccaacctggaagaggaatttccgctctgccctcaaccgcaaagaagggttgcgtttagcagaggaccggagcaaggaccctcacgacccacataaaatctacgagtttgtgaactcaggagttggggacttttcccagccagacacctctccggacaccaatggtggaggcagtacttctgatacccaggaagacattctggatgagttactggagtgggagttcgaggtgacagccttcta

SEQ ID NO: 143535 - DNA, 447 bp, Homo sapiens
  Payload ID: 8353
  Gene Symbol: IRF3
  Gene Name: interferon regulatory factor 3
  ENST ID: ENST00000596788
  CDS Start-End: 1-215
agcacggcctacggcaggatgcacagcaggaggatttcggaatcttccaggtgcgtgcgacgacctgggacgctggaaacccggagctgcgcgctgggcggaaaggactcctagtgggcccggctgagaaggcggaggtggcgcgcgaggggcgggctcgtgccaacgctggcctgggccgaggccactggtgcatatgttcccgggagggataagccagacctgccaacctggaagaggaatttccgctctgccctcaaccgcaaagaagggttgcgtttagcagaggaccggagcaaggaccctcacgacccacataaaatctacgagtttgtgaactcaggagttggggacttttcccagccagacacctctccggacaccaatggtggaggcagtacttctgatacccaggaagacattctggatgagttactgggtaacatg

SEQ ID NO: 143536 - DNA, 5331 bp, Homo sapiens
  Payload ID: 8354
  Gene Symbol: IRF4
  Gene Name: interferon regulatory factor 4
  Uniprot ID: Q15306
  ENST ID: ENST00000380956
  CDS Start-End: 127-1482
acctcgcactctcagtttcaccgctcgatcttgggacccaccgctgccctcagctccgagtccagggcgagtgcagagcagagcgggcggaggaccccgggcgcgggcgcggacggcacgcggggcatgaacctggagggcggcggccgaggcggagagttcggcatgagcgcggtgagctgcggcaacgggaagctccgccagtggctgatcgaccagatcgacagcggcaagtaccccgggctggtgtgggagaacgaggagaagagcatcttccgcatcccctggaagcacgcgggcaagcaggactacaaccgcgaggaggacgccgcgctcttcaaggcttgggcactgtttaaaggaaagttccgagaaggcatcgacaagccggaccctcccacctggaagacgcgcctgcggtgcgctttgaacaagagcaatgactttgaggaactggttgagcggagccagctggacatctcagacccgtacaaagtgtacaggattgttcctgagggagccaaaaaaggagccaagcagctcaccctggaggacccgcagatgtccatgagccacccctacaccatgacaacgccttacccttcgctcccagcccagcaggttcacaactacatgatgccacccctcgaccgaagctggagggactacgtcccggatcagccacacccggaaatcccgtaccaatgtcccatgacgtttggaccccgcggccaccactggcaaggcccagcttgtgaaaatggttgccaggtgacaggaaccttttatgcttgtgccccacctgagtcccaggctcccggagtccccacagagccaagcataaggtctgccgaagccttggcgttctcagactgccggctgcacatctgcctgtactaccgggaaatcctcgtgaaggagctgaccacgtccagccccgagggctgccggatctcccatggacatacgtatgacgccagcaacctggaccaggtcctgttcccctacccagaggacaatggccagaggaaaaacattgagaagctgctgagccacctggagaggggcgtggtcctctggatggcccccgacgggctctatgcgaaaagactgtgccagagcaggatctactgggacgggcccctggcgctgtgcaacgaccggcccaacaaactggagagagaccagacctgcaagctctttgacacacagcagttcttgtcagagctgcaagcgtttgctcaccacggccgctccctgccaagattccaggtgactctatgctttggagaggagtttccagaccctcagaggcaaagaaagctcatcacagctcacgtagaacctctgctagccagacaactatattattttgctcaacaaaacagtggacatttcctgaggggctacgatttaccagaacacatcagcaatccagaagattaccacagatctatccgccattcctctattcaagaatgaaaaatgtcaagatgagtggttttctttttcctttttttttttttttttttgatacggggatacggggtcttgctctgtctcccaggctggagtgcagtgacacaatctcagctcactgtgacctccgcctcctgggttcaagagactctcctgcctcagcctccctggtagctgggattacaggtgtgagccactgcacccacccaagacaagtgattttcattgtaaatatttgactttagtgaaagcgtccaattgactgccctcttactgttttgaggaattcagaagtggagatttcagttcagcggttgaggagaattgcggcgagacaagcatggaaaatcagtgacatctgattggcagatgagcttatttcaaaaggaagggtggctttgcatttcttgtgttctgtagactgccatcattgatgatcactgtgaaaattgaccaagtgatgtgtttacatttactgaaatgcgctctttaatttgttgtagattaggtcttgctggaagacagagaaaacttgcctttcagtattgacactgactagagtgatgactgcttgtaggtatgtctgtgccatttctcagggaagtaagatgtaaattgaagaagcctcacacgtaaaagaaatgtattaatgtatgtaggagctgcagttcttgtggaagacacttgctgagtgaaggaaatgaatctttgactgaagccgtgcctgtagccttggggaggcccatcccccacctgccagcggtttcctggtgtgggtccctctgccccgccctccttcccattggctttctctccttggcctttcctggaagccagttagtaaacttcctattttcttgagtcaaaaaacatgagcgctactcttggatgggacatttttgtctgtcctacaatctagtaatgtctaagtaatggttaagttttcttgtttctgcatctttttgaccctcattctttagagatgctaaaattcttcgcataaagaagaagaaattaaggaacataaatcttaatacttgaactgttgcccttctgtccaagtacttaactatctgttcccttcctctgtgccacgctcctctgtttgtttggctgtccagcgatcagccatggcgacactaaaggaggaggagccggggactcccaggctggagagcactgccaggacccaccactggaagcaggatggagctgactacggaactgcacactcagtgggctgtttctgcttatttcatctgttctatgcttcctcgtgccaattatagtttgacagggccttaaaattacttggctttttccaaatgcttctatttatagaatcccaaagacctccacttgcttaagtatacctatcacttacatttttgtggttttgagaaagtacagcagtagactggggcgtcacctccaggccgtttctcatactacaggatatttactattactcccaggatcagcagaagattgcgtagctctcaaatgtgtgttcctgcttttctaatggatattttaaattcattcaacaagcacctagtaagtgcctgctgtatccctacattacacagttcagcctttatcaagcttagtgagcagtgagcactgaaacattattttttaatgtttaaaaagtttctaatattaaagtcagaatattaatacaattaatattaatattaactacagaaaagacaaacagtagagaacagcaaaaaaataaaaaggatctccttttttcccagcccaaattctcctctctaaaagtgtccacaagaaggggtgtttattcttccaacacatttcacttttctgtaaatatacataaacttaaaaagaaaacctcatggagtcatcttgcacacactttcatgcagtgctctttgtagctaacagtgaagatttacctcgttctgctcagaggccttgctgtggagctccactgccatgtacccagtagggtttgacatttcattagccatgcaacatggatatgtattgggcagcagactgtgtttcgtgaactgcagtgatgtatacatcttatagatgcaaagtattttggggtatattatcctaagggaagataaagatgatattaagaactgctgtttcacggggcccttacctgtgaccctctttgctgaagaatatttaaccccacacagcacttcaaagaagctgtcttggaagtctgtctcaggagcaccctgtcttcttaattctccaagcggatgctccatttcaattgctttgtgacttcttcttctttgtttttttaaatattatgctgctttaacagtggagctgaattttctggaaaatgcttcttggctggggccactacctcctttcctatctttacatctatgtgtatgttgactttttaaaattctgagtgatccagggtatgacctagggaatgaactagctatgaaatactcagggttaggaatcctagcacttgtctcaggactctgaaaaggaacggcttcctcattccttgtcttgataaagtggaattggcaaactagaatttagtttgtactcagtggacagtgctgttgaagatttgaggacttgttaaagagcactgggtcatatggaaaaaatgtatgtgtctcccaggtgcatttcttggtttatgtcttgttcttgagattttgtatatttaggaaaacctcaagcagtaattaatatctcctggaacactatagagaaccaagtgaccgactcatttacaactgaaacctaggaagcccctgagtcctgagcgaaaacaggagagttagtcgccctacagaaaacccagctagactattgggtatgaactaaaaagagactgtgccatggtgagaaaaatgtaaaatcctacagtgaaatgagcagcccttacagtattgttaccaccaagggcaggtaggtattagtgtttgaaaaagctggtctttgagcgagggcataaatacagctagccccaggggtggaacaactctgggagtcttgggtactcgcacctcttggctttgttgatgctccgccaggaaggccacttgtgtgtgcgtgtcagttacttttttagtaacaattcagatccagtgtaaacttccgttcattgctctccagtcacatgcccccacttccccacaggtgaaagtttttctgaaagtgttgggattggttaaggtctttatttgtattacgtatctccccaagtcctctgtggccagctgcatctgtctgaatggtgcgtgaaggctctcagaccttacacaccattttgtaagttatgttttacatgccccgtttttgagactgatctcgatgcaggtggatctccttgagatcctgatagcctgttacaggaatgaagtaaaggtcagtttttttttgtattgattttcacagctttgaggaacatgcataagaaatgtagctgaagtagaggggacgtgagagaagggccaggccggcaggccaaccctcctccaatggaaattcccgtgttgcttcaaactgagacagatgggacttaacaggcaatggggtccacttccccctcttcagcatcccccgtaccccactttctgctgaaagaactgccagcaggtaggaccccagaggcccccaaatgaaagcttgaatttcccctactggctctgcgttttgctgagatctgtaggaaaggatgcttcacaaactgaggtagataatgctatgctgtcgttggtatacatcatgaatttttatgtaaattgctctgcaaagcaaattgatatgtttgataaatttatgtttttaggtaaataaaaacttttaaaaatttgttatgga

SEQ ID NO: 143537 - DNA, 1607 bp, Homo sapiens
  Payload ID: 8354
  Gene Symbol: IRF4
  Gene Name: interferon regulatory factor 4
  ENST ID: ENST00000493114
  CDS Start-End: 98-1330
cttgggacccaccgctgccctcagctccgagtccagggcgagtgcagagcagagcgggcggaggaccccgggcgcgggcgcggacggcacgcggggcatgaacctggagggcggcggccgaggcggagagttcggcatgagcgcggtgagctgcggcaacgggaagctccgccagtggctgatcgaccagatcgacagcggcaagtaccccgggctggtgtgggagaacgaggagaagagcatcttccgcatcccctggaagcacgcgggcaagcaggactacaaccgcgaggaggacgccgcgctcttcaaggcttgggcactgtttaaaggaaagttccgagaaggcatcgacaagccggaccctcccacctggaagacgcgcctgcggtgcgctttgaacaagagcaatgactttgaggaactggttgagcggagccagctggacatctcagacccgtacaaagtgtacaggattgttcctgagggagccaaaaaaggagccaagcagctcaccctggaggacccgcagatgtccatgagccacccctacaccatgacaacgccttacccttcgctcccagcccagcaggttcacaactacatgatgccacccctcgaccgaagctggagggactacgtcccggatcagccacacccggaaatcccgtaccaatgtcccatgacgtttggaccccgcggccaccactggcaaggcccagcttgtgaaaatggttgccaggtgacaggaaccttttatgcttgtgccccacctgagtcccaggctcccggagtccccacagagccaagcataaggtctgccgaagccttggcgttctcagactgccggctgcacatctgcctgtactaccgggaaatcctcgtgaaggagctgaccacgtccagccccgagggctgccggatctcccatggacatacgtatgacgccagcaacctggaccaggtcctgttcccctacccagaggacaatggccagaggaaaaacattgagaagctgctgagccacctggagaggggcgtggtcctctggatggcccccgacgggctctatgcgaaaagactgtgccagagcaggatctactgggacgggcccctggcgctgtgcaacgaccggcccaacaaactggagagagaccagacctgcaagctctttgacacacagcagttcttgtcagagctgcaagcgtttgctcaccacggccgctccctgccaagattccaggtgactctatgctttggagaggagtttccagaccctcagaggcaaagaaagctcatcacagctcacgtacttaggagtttagcttaagtcgtcatatataaaatacagtctctaatatcatgattgatggagagcattcagcttgccttagatgctgtaaattcaggaaaagctgaacattaaggcgtttttgttttttggtagaacctctgctagccagacaactatattattttgctcaacaaaacagtggacatttcctgaggggctacgatttaccagaacacatcagcaatccagaagattaccacagatctatccgccattcctctattcaagaatgaaaaatgtcaagatgagtggt

SEQ ID NO: 143538 - DNA, 2749 bp, Homo sapiens
  Payload ID: 8355
  Gene Symbol: IRF5
  Gene Name: interferon regulatory factor 5
  Uniprot ID: Q13568
  ENST ID: ENST00000249375
  CDS Start-End: 41-1537
gtccagctgcgcctggaaagcgagctcggacccctctgccatgaaccagtccatcccagtggctcccaccccaccccgccgcgtgcggctgaagccctggctggtggcccaggtgaacagctgccagtacccagggcttcaatgggtcaacggggaaaagaaattattctgcatcccctggaggcatgccacaaggcatggtcccagccaggacggagataacaccatcttcaaggcctgggccaaggagacagggaaatacaccgaaggcgtggatgaagccgatccggccaagtggaaggccaacctgcgctgtgcccttaacaagagccgggacttccgcctcatctacgacgggccccgggacatgccacctcagccctacaagatctacgaggtctgctccaatggccctgctcccacagactcccagccccctgaggattactcttttggtgcaggagaggaggaggaagaagaggaagagctgcagaggatgttgccaagcctgagcctcacagaggatgtcaagtggccgcccactctgcagccgcccactctgcggccgcctactctgcagccgcccactctgcagccgcccgtggtgctgggtccccctgctccagaccccagccccctggctcctccccctggcaaccctgctggcttcagggagcttctctctgaggtcctggagcctgggcccctgcctgccagcctgccccctgcaggcgaacagctcctgccagacctgctgatcagcccccacatgctgcctctgaccgacctggagatcaagtttcagtaccgggggcggccaccccgggccctcaccatcagcaacccccatggctgccggctcttctacagccagctggaggccacccaggagcaggtggaactcttcggccccataagcctggagcaagtgcgcttccccagccctgaggacatccccagtgacaagcagcgcttctacacgaaccagctgctggatgtcctggaccgcgggctcatcctccagctacagggccaggacctttatgccatccgcctgtgtcagtgcaaggtgttctggagcgggccttgtgcctcagcccatgactcatgccccaaccccatccagcgggaggtcaagaccaagcttttcagcctggagcattttctcaatgagctcatcctgttccaaaagggccagaccaacaccccaccacccttcgagatcttcttctgctttggggaagaatggcctgaccgcaaaccccgagagaagaagctcattactgtacaggtggtgcctgtagcagctcgactgctgctggagatgttctcaggggagctatcttggtcagctgatagtatccggctacagatctcaaacccagacctcaaagaccgcatggtggagcaattcaaggagctccatcacatctggcagtcccagcagcggttgcagcctgtggcccaggcccctcctggagcaggccttggtgttggccaggggccctggcctatgcacccagctggcatgcaataacaaggctgcagacggtgactggccctggcttcctgggtggcggtgcggactgatgtggagatgtgacagccccgatgagcacctggctggctgcagggtcctacctctgggtttcctggaagtggatttgggccaagaaggagagggagaaaggcccgagcccctgccttcccgggcctttctctcctgggctgtctctggtctggtcagcctggctctcgggaaattcagccatgagcagggaaagaactctcccaaccctggggcctagctgtataggaggaattgcctaagggtggcccactcttgtgattgccccatttcctctggcaacaaaagccagagtgttgtgggccaagtccccccacagggcctctgcagggcatggccctgatttccctggtttgagactcacttcctcatctccctgtcctctgagataatatgagtgagcacttaggtatcatatcagatgctcaaggctggcagctacccccttcttgagagtccaagaacctggagcagaaataatttttatgtatttttggattaatgaatgttaaaaacagactcagctgtttctttccttttactactaccagttgctcccatgctgctccaccaggccctgtttcggatgccaactggcccactccccaagcacttgcccccagcttgcgaccattggcactgggagggcctggcttctgggctgatgggtcagttgggccttcataaacactcacctggctggctttgccttccaggaggaagctggctgaagcaagggtgtggaattttaaatgtgtgcacagtctggaaaactgtcagaatcagttttcccataaaagggtgggctagcattgcagctgcatttgggaccattcaaatctgtcactctcttgtgtatattcctgtgctattaaatatatcagggcagtgcatgtaaatcatcctgatatatttaatatatttattatattgtcccccgaggtggggacagtgagtgagttctcttagtccccccagagctggttgttaaagagcctggcacctacccgctctcacttcatctgtgtcatctctgcacactccagcccactttctgccttcagccattgagtggaagctgccccaggcccttaccaggtgcagatgcccaatcttgatgcccagccatcagaactgtgagccaaataaacctttttctgt

SEQ ID NO: 143539 - DNA, 1680 bp, Homo sapiens
  Payload ID: 8355
  Gene Symbol: IRF5
  Gene Name: interferon regulatory factor 5
  Uniprot ID: Q13568
  ENST ID: ENST00000357234
  CDS Start-End: 122-1666
gcccggcaggttggcggaccggcgggaggcgcagcctgggcagagctcagcttggtcccgccgcccggccggtgctccctggcgcagccacgcaggcgcaccgcagacagacccctctgccatgaaccagtccatcccagtggctcccaccccaccccgccgcgtgcggctgaagccctggctggtggcccaggtgaacagctgccagtacccagggcttcaatgggtcaacggggaaaagaaattattctgcatcccctggaggcatgccacaaggcatggtcccagccaggacggagataacaccatcttcaaggcctgggccaaggagacagggaaatacaccgaaggcgtggatgaagccgatccggccaagtggaaggccaacctgcgctgtgcccttaacaagagccgggacttccgcctcatctacgacgggccccgggacatgccacctcagccctacaagatctacgaggtctgctccaatggccctgctcccacagactcccagccccctgaggattactcttttggtgcaggagaggaggaggaagaagaggaagagctgcagaggatgttgccaagcctgagcctcacagatgcagtgcagtctggcccccacatgacaccctattctttactcaaagaggatgtcaagtggccgcccactctgcagccgcccactctgcggccgcctactctgcagccgcccactctgcagccgcccgtggtgctgggtccccctgctccagaccccagccccctggctcctccccctggcaaccctgctggcttcagggagcttctctctgaggtcctggagcctgggcccctgcctgccagcctgccccctgcaggcgaacagctcctgccagacctgctgatcagcccccacatgctgcctctgaccgacctggagatcaagtttcagtaccgggggcggccaccccgggccctcaccatcagcaacccccatggctgccggctcttctacagccagctggaggccacccaggagcaggtggaactcttcggccccataagcctggagcaagtgcgcttccccagccctgaggacatccccagtgacaagcagcgcttctacacgaaccagctgctggatgtcctggaccgcgggctcatcctccagctacagggccaggacctttatgccatccgcctgtgtcagtgcaaggtgttctggagcgggccttgtgcctcagcccatgactcatgccccaaccccatccagcgggaggtcaagaccaagcttttcagcctggagcattttctcaatgagctcatcctgttccaaaagggccagaccaacaccccaccacccttcgagatcttcttctgctttggggaagaatggcctgaccgcaaaccccgagagaagaagctcattactgtacaggtggtgcctgtagcagctcgactgctgctggagatgttctcaggggagctatcttggtcagctgatagtatccggctacagatctcaaacccagacctcaaagaccgcatggtggagcaattcaaggagctccatcacatctggcagtcccagcagcggttgcagcctgtggcccaggcccctcctggagcaggccttggtgttggccaggggccctggcctatgcacccagctggcatgcaataacaaggctgcagacg

SEQ ID NO: 143540 - DNA, 2786 bp, Homo sapiens
  Payload ID: 8355
  Gene Symbol: IRF5
  Gene Name: interferon regulatory factor 5
  Uniprot ID: Q13568
  ENST ID: ENST00000402030
  CDS Start-End: 73-1569
gcttggtcccgccgcccggccggtgctccctggcgcagccacgcaggcgcaccgcagacagacccctctgccatgaaccagtccatcccagtggctcccaccccaccccgccgcgtgcggctgaagccctggctggtggcccaggtgaacagctgccagtacccagggcttcaatgggtcaacggggaaaagaaattattctgcatcccctggaggcatgccacaaggcatggtcccagccaggacggagataacaccatcttcaaggcctgggccaaggagacagggaaatacaccgaaggcgtggatgaagccgatccggccaagtggaaggccaacctgcgctgtgcccttaacaagagccgggacttccgcctcatctacgacgggccccgggacatgccacctcagccctacaagatctacgaggtctgctccaatggccctgctcccacagactcccagccccctgaggattactcttttggtgcaggagaggaggaggaagaagaggaagagctgcagaggatgttgccaagcctgagcctcacagaggatgtcaagtggccgcccactctgcagccgcccactctgcggccgcctactctgcagccgcccactctgcagccgcccgtggtgctgggtccccctgctccagaccccagccccctggctcctccccctggcaaccctgctggcttcagggagcttctctctgaggtcctggagcctgggcccctgcctgccagcctgccccctgcaggcgaacagctcctgccagacctgctgatcagcccccacatgctgcctctgaccgacctggagatcaagtttcagtaccgggggcggccaccccgggccctcaccatcagcaacccccatggctgccggctcttctacagccagctggaggccacccaggagcaggtggaactcttcggccccataagcctggagcaagtgcgcttccccagccctgaggacatccccagtgacaagcagcgcttctacacgaaccagctgctggatgtcctggaccgcgggctcatcctccagctacagggccaggacctttatgccatccgcctgtgtcagtgcaaggtgttctggagcgggccttgtgcctcagcccatgactcatgccccaaccccatccagcgggaggtcaagaccaagcttttcagcctggagcattttctcaatgagctcatcctgttccaaaagggccagaccaacaccccaccacccttcgagatcttcttctgctttggggaagaatggcctgaccgcaaaccccgagagaagaagctcattactgtacaggtggtgcctgtagcagctcgactgctgctggagatgttctcaggggagctatcttggtcagctgatagtatccggctacagatctcaaacccagacctcaaagaccgcatggtggagcaattcaaggagctccatcacatctggcagtcccagcagcggttgcagcctgtggcccaggcccctcctggagcaggccttggtgttggccaggggccctggcctatgcacccagctggcatgcaataacaaggctgcagacggtgactggccctggcttcctgggtggcggtgcggactgatgtggagatgtgacagccccgatgagcacctggctggctgcagggtcctacctctgggtttcctggaagtggatttgggccaagaaggagagggagaaaggcccgagcccctgccttcccgggcctttctctcctgggctgtctctggtctggtcagcctggctctcgggaaattcagccatgagcagggaaagaactctcccaaccctggggcctagctgtataggaggaattgcctaagggtggcccactcttgtgattgccccatttcctctggcaacaaaagccagagtgttgtgggccaagtccccccacagggcctctgcagggcatggccctgatttccctggtttgagactcacttcctcatctccctgtcctctgagataatatgagtgagcacttaggtatcatatcagatgctcaaggctggcagctacccccttcttgagagtccaagaacctggagcagaaataatttttatgtatttttggattaatgaatgttaaaaacagactcagctgtttctttccttttactactaccagttgctcccatgctgctccaccaggccctgtttcggatgccaactggcccactccccaagcacttgcccccagcttgcgaccattggcactgggagggcctggcttctgggctgatgggtcagttgggccttcataaacactcacctggctggctttgccttccaggaggaagctggctgaagcaagggtgtggaattttaaatgtgtgcacagtctggaaaactgtcagaatcagttttcccataaaagggtgggctagcattgcagctgcatttgggaccattcaaatctgtcactctcttgtgtatattcctgtgctattaaatatatcagggcagtgcatgtaaatcatcctgatatatttaatatatttattatattgtcccccgaggtggggacagtgagtgagttctcttagtccccccagagctggttgttaaagagcctggcacctacccgctctcacttcatctgtgtcatctctgcacactccagcccactttctgccttcagccattgagtggaagctgccccaggcccttaccaggtgcagatgcccaatcttgatgcccagccatcagaactgtgagccaaataaacctttttctgtataaa

SEQ ID NO: 143541 - DNA, 560 bp, Homo sapiens
  Payload ID: 8355
  Gene Symbol: IRF5
  Gene Name: interferon regulatory factor 5
  ENST ID: ENST00000467002
  CDS Start-End: 383-560
attaaacagccgtgttgggcagggccagactgctggactgacagtagggggcaggcagccggaccctctgagctccccaacggcaccagcgcctgcacggcctcagcccagggggtcattagggaagctctccccgattctgtgcagacagagcttcctctgtccacccttgctcggccagaattgtgtgccgctggtgactggcacccctctattctagggccaaggcctctcaggggtctacagatacaactatggccttcctaacaggctccggcaggcgttagggccttcctaagtgctacccgaatgcgtgtccagtgggaggagaagggggaggaccaagaacctagatgaatggccctagagagacccctctgccatgaaccagtccatcccagtggctcccaccccaccccgccgcgtgcggctgaagccctggctggtggcccaggtgaacagctgccagtacccagggcttcaatgggtcaacggggaaaagaaattattctgcatcccctggaggcatgccacaaggcatggtcccagccaggacggag

SEQ ID NO: 143542 - DNA, 637 bp, Homo sapiens
  Payload ID: 8355
  Gene Symbol: IRF5
  Gene Name: interferon regulatory factor 5
  ENST ID: ENST00000479582
  CDS Start-End: 213-637
cgggaggcgcagcctgggcagagctcagcttggtcccgccgcccggccggtgctccctggcgcagccacgcaggcgcaccgcagacagccttcctaacaggctccggcaggcgttagggccttcctaagtgctacccgaatgcgtgtccagtgggaggagaagggggaggaccaagaacctagatgaatggccctagagagacccctctgccatgaaccagtccatcccagtggctcccaccccaccccgccgcgtgcggctgaagccctggctggtggcccaggtgaacagctgccagtacccagggcttcaatgggtcaacggggaaaagaaattattctgcatcccctggaggcatgccacaaggcatggtcccagccaggacggagataacaccatcttcaaggcctgggccaaggagacagggaaatacaccgaaggcgtggatgaagccgatccggccaagtggaaggccaacctgcgctgtgcccttaacaagagccgggacttccgcctcatctacgacgggccccgggacatgccacctcagccctacaagatctacgaggtctgctccaatggccctgctcccacagactcccagccccctgaggattactcttttggtgcaggaga

SEQ ID NO: 143543 - DNA, 689 bp, Homo sapiens
  Payload ID: 8355
  Gene Symbol: IRF5
  Gene Name: interferon regulatory factor 5
  ENST ID: ENST00000489702
  CDS Start-End: 235-689
ctcatttgtgtgcagccccggaggaccagagtggggaagcaccccaccctctcccagggcccaactgagcactgcagcgggaggtacggggttgtcaaatgacagttttgccattccagattgccaaaagagccagtggccagtctagggcaccgcgccgtctggcatctccctggaggccctgggcctggcccgaggctcagcccggatctgcagttgccagacccctctgccatgaaccagtccatcccagtggctcccaccccaccccgccgcgtgcggctgaagccctggctggtggcccaggtgaacagctgccagtacccagggcttcaatgggtcaacggggaaaagaaattattctgcatcccctggaggcatgccacaaggcatggtcccagccaggacggagataacaccatcttcaaggcctgggccaaggagacagggaaatacaccgaaggcgtggatgaagccgatccggccaagtggaaggccaacctgcgctgtgcccttaacaagagccgggacttccgcctcatctacgacgggccccgggacatgccacctcagccctacaagatctacgaggtctgctccaatggccctgctcccacagactcccagccccctgaggattactcttttggtgcaggagaggaggaggaagaagaggaagaggtgagtgt

SEQ ID NO: 143544 - DNA, 2088 bp, Homo sapiens
  Payload ID: 8355
  Gene Symbol: IRF5
  Gene Name: interferon regulatory factor 5
  Uniprot ID: Q13568
  ENST ID: ENST00000465603
  CDS Start-End: 50-493
agctcagaggcggcactaggcaggtgcaaccccaaaagacccctctgccatgaaccagtccatcccagtggctcccaccccaccccgccgcgtgcggctgaagccctggctggtggcccaggtgaacagctgccagtacccagggcttcaatgggtcaacggggaaaagaaattattctgcatcccctggaggcatgccacaaggcatggtcccagccaggacggagataacaccatcttcaaggcctgggccaaggagacagggaaatacaccgaaggcgtggatgaagccgatccggccaagtggaaggccaacctgcgctgtgcccttaacaagagccgggacttccgcctcatctacgacgggccccgggacatgccacctcagccctacaagatctacgagactcccagccccctgaggattactcttttggtgcaggagaggaggaggaagaagaggaagagctgcagaggatgttgccaagcctgagcctcacagaggatgtcaagtggccgcccactctgcagccgcccactctgcggccgcctactctgcagccgcccactctgcagccgcccgtggtgctgggtccccctgctccagaccccagccccctggctcctccccctggcaaccctgctggcttcagggagcttctctctgaggtcctggagcctgggcccctgcctgccagcctgccccctgcaggcgaacagctcctgccagacctgctgatcagcccccacatgctgcctctgaccgacctggagatcaagtttcagtaccgggggcggccaccccgggccctcaccatcagcaacccccatggctgccggctcttctacagccagctggaggccacccaggagcaggtggaactcttcggccccataagcctggagcaagtgcgcttccccagccctgaggacatccccagtgacaagcagcgcttctacacgaaccagctgctggatgtcctggaccgcgggctcatcctccagctacagggccaggacctttatgccatccgcctgtgtcagtgcaaggtgttctggagcgggccttgtgcctcagcccatgactcatgccccaaccccatccagcgggaggtcaagaccaagcttttcagcctggagcattttctcaatgagctcatcctgttccaaaagggccagaccaacaccccaccacccttcgagatcttcttctgctttggggaagaatggcctgaccgcaaaccccgagagaagaagctcattactgtacaggtggtgcctgtagcagctcgactgctgctggagatgttctcaggggagctatcttggtcagctgatagtatccggctacagatctcaaacccagacctcaaagaccgcatggtggagcaattcaaggagctccatcacatctggcagtcccagcagcggttgcagcctgtggcccaggcccctcctggagcaggccttggtgttggccaggggccctggcctatgcacccagctggcatgcaataacaaggctgcagacggtgactggccctggcttcctgggtggcggtgcggactgatgtggagatgtgacagccccgatgagcacctggctggctgcagggtcctacctctgggtttcctggaagtggatttgggccaagaaggagagggagaaaggcccgagcccctgccttcccgggcctttctctcctgggctgtctctggtctggtcagcctggctctcgggaaattcagccatgagcagggaaagaactctcccaaccctggggcctagctgtataggaggaattgcctaagggtggcccactcttgtgattgccccatttcctctggcaacaaaagccagagtgttgtgggccaagtccccccacagggcctctgcagggcatggccctgatttccctggtttgagactcacttcctcatctccctgtcctctgagataatatgagtgagcacttaggtatcatatcagatgctcaaggctggcagctacccccttcttgagagtccaagaacctggagcagaaataatttttatgtatttttggattaatgaatgttaaaaacaga

SEQ ID NO: 143545 - DNA, 553 bp, Homo sapiens
  Payload ID: 8355
  Gene Symbol: IRF5
  Gene Name: interferon regulatory factor 5
  ENST ID: ENST00000464557
  CDS Start-End: 236-553
agcctgggcagagctcagcttggtcccgccgcccggccggtgctccctggcgcagccacgcaggcgcaccgcagacagccttcctaacaggctccggcaggcgttagggccttcctaagtgctacccgaatgcgtgtccagtgggaggagaagggggaggaccaagaacctagatgaatggccctagagaggtaacatctgtttggtgcctgctgtcattggagacccctctgccatgaaccagtccatcccagtggctcccaccccaccccgccgcgtgcggctgaagccctggctggtggcccaggtgaacagctgccagtacccagggcttcaatgggtcaacggggaaaagaaattattctgcatcccctggaggcatgccacaaggcatggtcccagccaggacggagataacaccatcttcaaggcctgggccaaggagacagggaaatacaccgaaggcgtggatgaagccgatccggccaagtggaaggccaacctgcgctgtgcccttaacaagagccgggacttccgcctcatctacgacggg

SEQ ID NO: 143546 - DNA, 2282 bp, Homo sapiens
  Payload ID: 8355
  Gene Symbol: IRF5
  Gene Name: interferon regulatory factor 5
  Uniprot ID: Q13568
  ENST ID: ENST00000473745
  CDS Start-End: 216-1712
agaaagcggaactgagcccgcgtgttctgaggccagggcagggctggagcgttctgaacacctccccgtcccagcccctgggccaggcaagggccggccttacctctcctgggttggtggcagcagagctgggctctgagggaggcctgcaatgtgagacagtagcagctcagaggcggcactaggcaggtgcaaccccaaaagacccctctgccatgaaccagtccatcccagtggctcccaccccaccccgccgcgtgcggctgaagccctggctggtggcccaggtgaacagctgccagtacccagggcttcaatgggtcaacggggaaaagaaattattctgcatcccctggaggcatgccacaaggcatggtcccagccaggacggagataacaccatcttcaaggcctgggccaaggagacagggaaatacaccgaaggcgtggatgaagccgatccggccaagtggaaggccaacctgcgctgtgcccttaacaagagccgggacttccgcctcatctacgacgggccccgggacatgccacctcagccctacaagatctacgaggtctgctccaatggccctgctcccacagactcccagccccctgaggattactcttttggtgcaggagaggaggaggaagaagaggaagagctgcagaggatgttgccaagcctgagcctcacagaggatgtcaagtggccgcccactctgcagccgcccactctgcggccgcctactctgcagccgcccactctgcagccgcccgtggtgctgggtccccctgctccagaccccagccccctggctcctccccctggcaaccctgctggcttcagggagcttctctctgaggtcctggagcctgggcccctgcctgccagcctgccccctgcaggcgaacagctcctgccagacctgctgatcagcccccacatgctgcctctgaccgacctggagatcaagtttcagtaccgggggcggccaccccgggccctcaccatcagcaacccccatggctgccggctcttctacagccagctggaggccacccaggagcaggtggaactcttcggccccataagcctggagcaagtgcgcttccccagccctgaggacatccccagtgacaagcagcgcttctacacgaaccagctgctggatgtcctggaccgcgggctcatcctccagctacagggccaggacctttatgccatccgcctgtgtcagtgcaaggtgttctggagcgggccttgtgcctcagcccatgactcatgccccaaccccatccagcgggaggtcaagaccaagcttttcagcctggagcattttctcaatgagctcatcctgttccaaaagggccagaccaacaccccaccacccttcgagatcttcttctgctttggggaagaatggcctgaccgcaaaccccgagagaagaagctcattactgtacaggtggtgcctgtagcagctcgactgctgctggagatgttctcaggggagctatcttggtcagctgatagtatccggctacagatctcaaacccagacctcaaagaccgcatggtggagcaattcaaggagctccatcacatctggcagtcccagcagcggttgcagcctgtggcccaggcccctcctggagcaggccttggtgttggccaggggccctggcctatgcacccagctggcatgcaataacaaggctgcagacggtgactggccctggcttcctgggtggcggtgcggactgatgtggagatgtgacagccccgatgagcacctggctggctgcagggtcctacctctgggtttcctggaagtggatttgggccaagaaggagagggagaaaggcccgagcccctgccttcccgggcctttctctcctgggctgtctctggtctggtcagcctggctctcgggaaattcagccatgagcagggaaagaactctcccaaccctggggcctagctgtataggaggaattgcctaagggtggcccactcttgtgattgccccatttcctctggcaacaaaagccagagtgttgtgggccaagtccccccacagggcctctgcagggcatggccctgatttccctggtttgagactcacttcctcatctccctgtcctctgagataatatgagtgagcacttaggtatcatatcagatgctcaaggctggcagctacccccttcttgagagtccaagaacctggagcagaaataatttttatgtatttttggattaatgaatgttaaaaacaga

SEQ ID NO: 143547 - DNA, 1374 bp, Homo sapiens
  Payload ID: 8355
  Gene Symbol: IRF5
  Gene Name: interferon regulatory factor 5
  Uniprot ID: Q13568
  ENST ID: ENST00000477535
  CDS Start-End: 122-1360
gcccggcaggttggcggaccggcgggaggcgcagcctgggcagagctcagcttggtcccgccgcccggccggtgctccctggcgcagccacgcaggcgcaccgcagacagacccctctgccatgaaccagtccatcccagtggctcccaccccaccccgccgcgtgcggctgaagccctggctggtggcccaggtgaacagctgccagtacccagggcttcaatgggtcaacggggaaaagaaattattctgcatcccctggaggcatgccacaaggcatggtcccagccaggacggagataacaccatcttcaaggcctgggccaaggagacagggaaatacaccgaaggcgtggatgaagccgatccggccaagtggaaggccaacctgcgctgtgcccttaacaagagccgggacttccgcctcatctacgacgggccccgggacatgccacctcagccctacaagatctacgaggtctgctccaatggccctgctcccacagactcccagccccctgaggattactcttttggtgcaggagaggaggaggaagaagaggaagagctgcagaggatgttgccaagcctgagcctcacagtgaccgacctggagatcaagtttcagtaccgggggcggccaccccgggccctcaccatcagcaacccccatggctgccggctcttctacagccagctggaggccacccaggagcaggtggaactcttcggccccataagcctggagcaagtgcgcttccccagccctgaggacatccccagtgacaagcagcgcttctacacgaaccagctgctggatgtcctggaccgcgggctcatcctccagctacagggccaggacctttatgccatccgcctgtgtcagtgcaaggtgttctggagcgggccttgtgcctcagcccatgactcatgccccaaccccatccagcgggaggtcaagaccaagcttttcagcctggagcattttctcaatgagctcatcctgttccaaaagggccagaccaacaccccaccacccttcgagatcttcttctgctttggggaagaatggcctgaccgcaaaccccgagagaagaagctcattactgtacaggtggtgcctgtagcagctcgactgctgctggagatgttctcaggggagctatcttggtcagctgatagtatccggctacagatctcaaacccagacctcaaagaccgcatggtggagcaattcaaggagctccatcacatctggcagtcccagcagcggttgcagcctgtggcccaggcccctcctggagcaggccttggtgttggccaggggccctggcctatgcacccagctggcatgcaataacaaggctgcagacg

SEQ ID NO: 143548 - DNA, 587 bp, Homo sapiens
  Payload ID: 8355
  Gene Symbol: IRF5
  Gene Name: interferon regulatory factor 5
  ENST ID: ENST00000473787
  CDS Start-End: 71-385
ttggtcccgccgcccggccggtgctccctggcgcagccacgcaggcgcaccgcagacagacccctctgccatgaaccagtccatcccagtggctcccaccccaccccgccgcgtgcggctgaagccctggctggtggcccaggtgaacagctgccagtacccagggcttcaatgggtcaacggggaaaagaaattattctgcatcccctggaggcatgccacaaggcatggtcccagccaggacggagataacaccatcttcaagggtctcactctgtcacccaggctggagtgcagtggcttgatctcagctcactgcagcctcgacctcccaggctcaggcctgggccaaggagacagggaaatacaccgaaggcgtggatgaagccgatccggccaagtggaaggccaacctgcgctgtgcccttaacaagagccgggacttccgcctcatctacgacgggccccgggacatgccacctcagccctacaagatctacgaggtctgctccaatggccctgctcccacagactcccagccccctgaggattactcttttggtgcaggagaggaggaggaagaagag

SEQ ID NO: 143549 - DNA, 595 bp, Homo sapiens
  Payload ID: 8355
  Gene Symbol: IRF5
  Gene Name: interferon regulatory factor 5
  ENST ID: ENST00000613821
  CDS Start-End: 122-595
gcccggcaggttggcggaccggcgggaggcgcagcctgggcagagctcagcttggtcccgccgcccggccggtgctccctggcgcagccacgcaggcgcaccgcagacagacccctctgccatgaaccagtccatcccagtggctcccaccccaccccgccgcgtgcggctgaagccctggctggtggcccaggtgaacagctgccagtacccagggcttcaatgggtcaacggggaaaagaaattattctgcatcccctggaggcatgccacaaggcatggtcccagccaggacggagataacaccatcttcaaggcctgggccaaggagacagggaaatacaccgaaggcgtggatgaagccgatccggccaagtggaaggccaacctgcgctgtgcccttaacaagagccgggacttccgcctcatctacgacgggccccgggacatgccacctcagccctacaagatctacgaggtctgctccaatggccctgctcccacagactcccagccccctgaggattactcttttggtgcaggagaggaggaggaagaagaggaagagatgcagtgcagtctggcccccacatga

SEQ ID NO: 143550 - DNA, 1652 bp, Homo sapiens
  Payload ID: 8355
  Gene Symbol: IRF5
  Gene Name: interferon regulatory factor 5
  Uniprot ID: Q13568
  ENST ID: ENST00000619830
  CDS Start-End: 50-493
agctcagaggcggcactaggcaggtgcaaccccaaaagacccctctgccatgaaccagtccatcccagtggctcccaccccaccccgccgcgtgcggctgaagccctggctggtggcccaggtgaacagctgccagtacccagggcttcaatgggtcaacggggaaaagaaattattctgcatcccctggaggcatgccacaaggcatggtcccagccaggacggagataacaccatcttcaaggcctgggccaaggagacagggaaatacaccgaaggcgtggatgaagccgatccggccaagtggaaggccaacctgcgctgtgcccttaacaagagccgggacttccgcctcatctacgacgggccccgggacatgccacctcagccctacaagatctacgagactcccagccccctgaggattactcttttggtgcaggagaggaggaggaagaagaggaagagctgcagaggatgttgccaagcctgagcctcacagaggatgtcaagtggccgcccactctgcagccgcccactctgcagccgcccgtggtgctgggtccccctgctccagaccccagccccctggctcctccccctggcaaccctgctggcttcagggagcttctctctgaggtcctggagcctgggcccctgcctgccagcctgccccctgcaggcgaacagctcctgccagacctgctgatcagcccccacatgctgcctctgaccgacctggagatcaagtttcagtaccgggggcggccaccccgggccctcaccatcagcaacccccatggctgccggctcttctacagccagctggaggccacccaggagcaggtggaactcttcggccccataagcctggagcaagtgcgcttccccagccctgaggacatccccagtgacaagcagcgcttctacacgaaccagctgctggatgtcctggaccgcgggctcatcctccagctacagggccaggacctttatgccatccgcctgtgtcagtgcaaggtgttctggagcgggccttgtgcctcagcccatgactcatgccccaaccccatccagcgggaggtcaagaccaagcttttcagcctggagcattttctcaatgagctcatcctgttccaaaagggccagaccaacaccccaccacccttcgagatcttcttctgctttggggaagaatggcctgaccgcaaaccccgagagaagaagctcattactgtacaggtggtgcctgtagcagctcgactgctgctggagatgttctcaggggagctatcttggtcagctgatagtatccggctacagatctcaaacccagacctcaaagaccgcatggtggagcaattcaaggagctccatcacatctggcagtcccagcagcggttgcagcctgtggcccaggcccctcctggagcaggccttggtgttggccaggggccctggcctatgcacccagctggcatgcaataacaaggctgcagacggtgactggccctggcttcctgggtggcggtgcggactgatgtggagatgtgacagccccgatgagcacctggctggctgcagggtcctacctctgggtttcctggaagtggatttgggccaagaaggagagggagaaaggcccgagcccc

SEQ ID NO: 143551 - DNA, 4306 bp, Homo sapiens
  Payload ID: 8356
  Gene Symbol: IRF6
  Gene Name: interferon regulatory factor 6
  Uniprot ID: O14896
  ENST ID: ENST00000367021
  CDS Start-End: 174-1577
cttggctaagacgtcgaggagcgtggtagcgacgggtgatcttcgctgcggacttggttcggagggacgtccgcttctggtggacagattgagcaaagaatctttgagcggtcaagggaaagacaagccgactcttcagatccctgtggacacactgcctgctcttccatatcatggccctccacccccgcagagtccggctaaagccctggctggtggcccaggtggatagtggcctctaccctgggctcatctggctacacagggactctaaacgcttccagattccctggaaacatgccacccggcatagccctcaacaagaagaggaaaataccatttttaaggcctgggctgtagagacagggaagtaccaggaaggggtggatgaccctgacccagctaaatggaaggcccagctgcgctgtgctctcaataagagcagagaattcaacctgatgtatgatggcaccaaggaggtgcccatgaacccagtgaagatatatcaagtgtgtgacatccctcagccccagggctcgatcattaacccaggatccacagggtctgctccctgggatgagaaggataatgatgtggatgaagaagatgaggaagatgagctggatcagtcgcagcaccatgttcccatccaggacaccttccccttcctgaacatcaatggttctcccatggcgccagccagtgtgggcaattgcagtgtgggcaactgcagcccggaggcagtgtggcccaaaactgaacccctggagatggaagtaccccaggcacctatacagcccttctatagctctccagaactgtggatcagctctctcccaatgactgacctggacatcaagtttcagtaccgtgggaaggagtacgggcagaccatgaccgtgagcaaccctcagggctgccgactcttctatggggacctgggtcccatgcctgaccaggaggagctctttggtcccgtcagcctggagcaggtcaaattcccaggtcctgagcatattaccaatgagaagcagaagctgttcactagcaagctgctggacgtcatggacagaggactgatcctggaggtcagcggtcatgccatttatgccatcaggctgtgccagtgcaaggtgtactggtctgggccatgtgccccatcacttgttgctcccaacctgattgagagacaaaagaaggtcaagctattttgtctggaaacattccttagcgatctcattgcccaccagaaaggacagatagagaagcagccaccgtttgagatctacttatgctttggggaagaatggccagatgggaaaccattggaaaggaaactcatcttggttcaggtcattccagtagtggctcggatgatctacgagatgttttctggtgatttcacacgatcctttgatagtggcagtgtccgcctgcagatctcaaccccagacatcaaggataacatcgttgctcagctgaagcagctgtaccgcatccttcaaacccaggagagctggcagcccatgcagcccacccccagcatgcaactgccccctgccctgcctccccagtaattgtgaatgccatcttcttccttctcttttttataatattgtacatatggatttttttattgtttagatttaaccagcttttaaatctctcttttctctaacagtgttagaagtttgtgattctccaaatatgcctagatttaaagctgatttaatttatggaaaaatcacccttcagactttgcttttctttttcaaatctcctaatggtagtatgatatagcatagtagaaggagatttggcctgggagtttggacaccaaagttctagctgcagctttgcttccaatgtgaccttgaacaagtcctttaacctctgggcttcagatttattgcttataaagtgaagagattggagtagtgcctgaaattgcatccagctttagaacggactcaatgaccttcttctacttgtacaaggctaaactgcctggaacagaatccttctgcattgttcttgtaccacatttttccttggttttgttaaagtttcctcaagcactgatttgtccaggatcgagctctgtttgacctgttctgctagtatagtaagctggctccctgatgggggaagtgagagggagaggagctggctggctggttgcttagaaactatgcttgatatctaaatagaaatgggtgccaaagtctgaaagtcacccagcctgtggagtgaaagctcacaaatttggcttctaaagggaagctgttgacacagaaagcctagggattctgtggaagaataggttgtcaggcatttaccttattaccactcaaataccagtgtgtgtgtgttgggggggcggcagggagagggggtaggtgacagtatgtgactcaggtgttagctttaagaggaaagagctctatttttcttgttttcttctctgagctagactgagctggggatctaagatgtacttctctgactacaaaagggacagtatcatttagattttttgcagttggaagaaatgggttgttgagtgtgttaaggctgggatgaagaagggctgggcagtactcttctggaaaggctcacctagcacgaacctgcttgtctcccttactagtggaggtatctgagtgtgaacagtgaaggtaaagagtggtatagaacaatgcagctgtatctgtcacaaactggtcttatctagaaacatctgctgagtctctaaccctttcagctttctcttcttttttgagacagagtcttgctttgttgcccaggctggagtgcagtggcaagtcaccacttactgcagctttaagctcctgggctcaagcaatcgtcctgccccagcctcctgagtagttgggacaacagtcgtgcactatgatgcttggctaattttttttttatttttgtagagatgaggtcttgctatgttgcccaggctggtcttgaactcctgggctcaagcaatctgggacctaaatggcaaataagatgctaatctgtggttgcaagccccagtcctcttgaatagtgatgcctatctgtctgtgtcgggacatagtaaggaagcccatgtctagtctggtacctttaaaccaggccatctccaacttttcaaaatgactcaaaagttgagctagccttattttaaaaactaaaagttcaaaatcagtggtgacatgaggacttatttatttaaagtgcttaagccttggttttagagtttctaagagacctagtggaatttgctattatgaaaagcatgaaaagattaagaaacctggctaaaggtcaggtgcccagcttcgaggaaaagttgggcttttagggaccgggaagcattaaaggcacagaaactttacattttgggggtcattttgttgagtaggtgaagtgagggatttgggcttgatatttggctgccccatctctacgtgggaactcaaagttaaaaacccactgtaggtaaattagaagggcagctcttgaatctgggccagtctatatcccttctgtgaagtgctaacagccaggctatctgtagcctgggtgggagcccagataatgtgagctggtaaagggtattggaaaagtgccaagaaatgccaagcttttggttcgtaaccactataaaaagtttatgaacatgtcagaggaatggatgagtgatttgtgaggtcttaactagataccccggtttcttccttgttttggcttcttttcagaatgccgggagagtacatgcagggattccatctaatcaccctcagcactctttctctggtcctgctggatagatttagatttcctttctttttttagggcctcagtctgctatctcctttggtggctaccaccactcactcccttgatatcttctactcccttgccttcaccttgcttaagactgagaagggagttagattttgtcactagctcttctttttcctcactgtgtaccccaccaaacaagattagttcaagttaaaaagaacctactggaggtaaactgggagagcaagtgttggatctgggctggtccctttcccataaaattaggtccctggttgtatgttcccatagcaccccatacttcctctctcagaataatcatttcccttgtaatgctcagcatccgcatcctgcttgactgcaaacttgctgaaggtagggactgtttgtcttggacttcgctgccagtccttagaacagtgtctgggacacagtgtgttctcaaatatttgttgctggaataaatgaatgaactaaa

SEQ ID NO: 143552 - DNA, 1027 bp, Homo sapiens
  Payload ID: 8356
  Gene Symbol: IRF6
  Gene Name: interferon regulatory factor 6
  ENST ID: ENST00000456314
  CDS Start-End: 199-1027
ctttaccagactcagtagtggagacgtgttctcagcctttgtcgccagtgttcccaagccttctcccagacactggattgttgtatggatagccagctgagacccctccttttctccatacagaatctttgagcggtcaagggaaagacaagccgactcttcagatccctgtggacacactgcctgctcttccatatcatggccctccacccccgcagagtccggctaaagccctggctggtggcccaggtggatagtggcctctaccctgggctcatctggctacacagggactctaaacgcttccagattccctggaaacatgccacccggcatagccctcaacaagaagaggaaaataccatttttaaggcctgggctgtagagacagggaagtaccaggaaggggtggatgaccctgacccagctaaatggaaggcccagctgcgctgtgctctcaataagagcagagaattcaacctgatgtatgatggcaccaaggaggtgcccatgaacccagtgaagatatatcaagtgtgtgacatccctcagccccagggctcgatcattaacccaggatccacagggtctgctccctgggatgagaaggataatgatgtggatgaagaagatgaggaagatgagctggatcagtcgcagcaccatgttcccatccaggacaccttccccttcctgaacatcaatggttctcccatggcgccagccagtgtgggcaattgcagtgtgggcaactgcagcccggaggcagtgtggcccaaaactgaacccctggagatggaagtaccccaggcacctatacagcccttctatagctctccagaactgtggatcagctctctcccaatgactgacctggacatcaagtttcagtaccgtgggaaggagtacgggcagaccatgaccgtgagcaaccctcagggctgccgactcttctatggggacctgggtcccatgcctgaccaggaggagctctttggtcccgtcagcctggagcaggtcaaattcc

SEQ ID NO: 143553 - DNA, 4256 bp, Homo sapiens
  Payload ID: 8356
  Gene Symbol: IRF6
  Gene Name: interferon regulatory factor 6
  Uniprot ID: O14896
  ENST ID: ENST00000542854
  CDS Start-End: 341-1459
ggatgcgaaggctgcggcgtcctggggcgaggcgctgacgtgagctcggcgcacctgggctgggcaggtaagggctggtgcgggacggggagaggaacctgcagtccctacttgggtagagccaggcgccccttggctaagacgtcgaggagcgtggtagcgacgggtgatcttcgctgcggacttggttcggagggacgtccgcttctggtggacagattgagcaaaggcctgggctgtagagacagggaagtaccaggaaggggtggatgaccctgacccagctaaatggaaggcccagctgcgctgtgctctcaataagagcagagaattcaacctgatgtatgatggcaccaaggaggtgcccatgaacccagtgaagatatatcaagtgtgtgacatccctcagccccagggctcgatcattaacccaggatccacagggtctgctccctgggatgagaaggataatgatgtggatgaagaagatgaggaagatgagctggatcagtcgcagcaccatgttcccatccaggacaccttccccttcctgaacatcaatggttctcccatggcgccagccagtgtgggcaattgcagtgtgggcaactgcagcccggaggcagtgtggcccaaaactgaacccctggagatggaagtaccccaggcacctatacagcccttctatagctctccagaactgtggatcagctctctcccaatgactgacctggacatcaagtttcagtaccgtgggaaggagtacgggcagaccatgaccgtgagcaaccctcagggctgccgactcttctatggggacctgggtcccatgcctgaccaggaggagctctttggtcccgtcagcctggagcaggtcaaattcccaggtcctgagcatattaccaatgagaagcagaagctgttcactagcaagctgctggacgtcatggacagaggactgatcctggaggtcagcggtcatgccatttatgccatcaggctgtgccagtgcaaggtgtactggtctgggccatgtgccccatcacttgttgctcccaacctgattgagagacaaaagaaggtcaagctattttgtctggaaacattccttagcgatctcattgcccaccagaaaggacagatagagaagcagccaccgtttgagatctacttatgctttggggaagaatggccagatgggaaaccattggaaaggaaactcatcttggttcaggtcattccagtagtggctcggatgatctacgagatgttttctggtgatttcacacgatcctttgatagtggcagtgtccgcctgcagatctcaaccccagacatcaaggataacatcgttgctcagctgaagcagctgtaccgcatccttcaaacccaggagagctggcagcccatgcagcccacccccagcatgcaactgccccctgccctgcctccccagtaattgtgaatgccatcttcttccttctcttttttataatattgtacatatggatttttttattgtttagatttaaccagcttttaaatctctcttttctctaacagtgttagaagtttgtgattctccaaatatgcctagatttaaagctgatttaatttatggaaaaatcacccttcagactttgcttttctttttcaaatctcctaatggtagtatgatatagcatagtagaaggagatttggcctgggagtttggacaccaaagttctagctgcagctttgcttccaatgtgaccttgaacaagtcctttaacctctgggcttcagatttattgcttataaagtgaagagattggagtagtgcctgaaattgcatccagctttagaacggactcaatgaccttcttctacttgtacaaggctaaactgcctggaacagaatccttctgcattgttcttgtaccacatttttccttggttttgttaaagtttcctcaagcactgatttgtccaggatcgagctctgtttgacctgttctgctagtatagtaagctggctccctgatgggggaagtgagagggagaggagctggctggctggttgcttagaaactatgcttgatatctaaatagaaatgggtgccaaagtctgaaagtcacccagcctgtggagtgaaagctcacaaatttggcttctaaagggaagctgttgacacagaaagcctagggattctgtggaagaataggttgtcaggcatttaccttattaccactcaaataccagtgtgtgtgtgttgggggggcggcagggagagggggtaggtgacagtatgtgactcaggtgttagctttaagaggaaagagctctatttttcttgttttcttctctgagctagactgagctggggatctaagatgtacttctctgactacaaaagggacagtatcatttagattttttgcagttggaagaaatgggttgttgagtgtgttaaggctgggatgaagaagggctgggcagtactcttctggaaaggctcacctagcacgaacctgcttgtctcccttactagtggaggtatctgagtgtgaacagtgaaggtaaagagtggtatagaacaatgcagctgtatctgtcacaaactggtcttatctagaaacatctgctgagtctctaaccctttcagctttctcttcttttttgagacagagtcttgctttgttgcccaggctggagtgcagtggcaagtcaccacttactgcagctttaagctcctgggctcaagcaatcgtcctgccccagcctcctgagtagttgggacaacagtcgtgcactatgatgcttggctaattttttttttatttttgtagagatgaggtcttgctatgttgcccaggctggtcttgaactcctgggctcaagcaatctgggacctaaatggcaaataagatgctaatctgtggttgcaagccccagtcctcttgaatagtgatgcctatctgtctgtgtcgggacatagtaaggaagcccatgtctagtctggtacctttaaaccaggccatctccaacttttcaaaatgactcaaaagttgagctagccttattttaaaaactaaaagttcaaaatcagtggtgacatgaggacttatttatttaaagtgcttaagccttggttttagagtttctaagagacctagtggaatttgctattatgaaaagcatgaaaagattaagaaacctggctaaaggtcaggtgcccagcttcgaggaaaagttgggcttttagggaccgggaagcattaaaggcacagaaactttacattttgggggtcattttgttgagtaggtgaagtgagggatttgggcttgatatttggctgccccatctctacgtgggaactcaaagttaaaaacccactgtaggtaaattagaagggcagctcttgaatctgggccagtctatatcccttctgtgaagtgctaacagccaggctatctgtagcctgggtgggagcccagataatgtgagctggtaaagggtattggaaaagtgccaagaaatgccaagcttttggttcgtaaccactataaaaagtttatgaacatgtcagaggaatggatgagtgatttgtgaggtcttaactagataccccggtttcttccttgttttggcttcttttcagaatgccgggagagtacatgcagggattccatctaatcaccctcagcactctttctctggtcctgctggatagatttagatttcctttctttttttagggcctcagtctgctatctcctttggtggctaccaccactcactcccttgatatcttctactcccttgccttcaccttgcttaagactgagaagggagttagattttgtcactagctcttctttttcctcactgtgtaccccaccaaacaagattagttcaagttaaaaagaacctactggaggtaaactgggagagcaagtgttggatctgggctggtccctttcccataaaattaggtccctggttgtatgttcccatagcaccccatacttcctctctcagaataatcatttcccttgtaatgctcagcatccgcatcctgcttgactgcaaacttgctgaaggtagggactgtttgtcttggacttcgctgccagtccttagaacagtgtctgggacacagtgtgttctcaaatatttgttgctggaataaatgaatgaactaaatcagtcttttagggatttactgttaaccaccatgggaaaattaaataaatgcggggaaggaaaacgtt

SEQ ID NO: 143554 - DNA, 1992 bp, Homo sapiens
  Payload ID: 8357
  Gene Symbol: IRF7
  Gene Name: interferon regulatory factor 7
  Uniprot ID: Q92985
  ENST ID: ENST00000330243
  CDS Start-End: 388-1938
ccggccctccgcttccccgcgagacgaaacttcccgtcccggcggctctggcacccagggtccggcctgcgccttcccgccaggcctggacactggttcaacacctgtgacttcatgtgtgcgcgccggccacacctgcagtcacacctgtagccccctctgccaagagatccataccgaggcagcgtcggtggctacaagccctcagtccacacctgtggacacctgtgacacctggccacacgacctgtggccgcggcctggcgtctgctgcgacaggagcccttacctcccctgttataacacctgaccgccacctaactgcccctgcagaaggagcaatggccttggctcctgagaggtaagagcccggcccaccctctccagatgccagtccccgagcgccctgcagccggccctgactctccgcggccgggcacccgcagggcagccccacgcgtgctgttcggagagtggctccttggagagatcagcagcggctgctatgaggggctgcagtggctggacgaggcccgcacctgtttccgcgtgccctggaagcacttcgcgcgcaaggacctgagcgaggccgacgcgcgcatcttcaaggcctgggctgtggcccgcggcaggtggccgcctagcagcaggggaggtggcccgccccccgaggctgagactgcggagcgcgccggctggaaaaccaacttccgctgcgcactgcgcagcacgcgtcgcttcgtgatgctgcgggataactcgggggacccggccgacccgcacaaggtgtacgcgctcagccgggagctgtgctggcgagaaggcccaggcacggaccagactgaggcagaggcccccgcagctgtcccaccaccacagggtgggcccccagggccattcctggcacacacacatgctggactccaagccccaggccccctccctgccccagctggtgacaagggggacctcctgctccaggcagtgcaacagagctgcctggcagaccatctgctgacagcgtcatggggggcagatccagtcccaaccaaggctcctggagagggacaagaagggcttcccctgactggggcctgtgctggaggcccagggctccctgctggggagctgtacgggtgggcagtagagacgacccccagccccgggccccagcccgcggcactaacgacaggcgaggccgcggccccagagtccccgcaccaggcagagccgtacctgtcaccctccccaagcgcctgcaccgcggtgcaagagcccagcccaggggcgctggacgtgaccatcatgtacaagggccgcacggtgctgcagaaggtggtgggacacccgagctgcacgttcctatacggccccccagacccagctgtccgggccacagacccccagcaggtagcattccccagccctgccgagctcccggaccagaagcagctgcgctacacggaggaactgctgcggcacgtggcccctgggttgcacctggagcttcgggggccacagctgtgggcccggcgcatgggcaagtgcaaggtgtactgggaggtgggcggacccccaggctccgccagcccctccaccccagcctgcctgctgcctcggaactgtgacacccccatcttcgacttcagagtcttcttccaagagctggtggaattccgggcacggcagcgccgtggctccccacgctataccatctacctgggcttcgggcaggacctgtcagctgggaggcccaaggagaagagcctggtcctggtgaagctggaaccctggctgtgccgagtgcacctagagggcacgcagcgtgagggtgtgtcttccctggatagcagcagcctcagcctctgcctgtccagcgccaacagcctctatgacgacatcgagtgcttccttatggagctggagcagcccgcctagaacccagtctaatgagaactccagaaagctggagcagcccacctagagctggcc

SEQ ID NO: 143555 - DNA, 1801 bp, Homo sapiens
  Payload ID: 8357
  Gene Symbol: IRF7
  Gene Name: interferon regulatory factor 7
  Uniprot ID: Q92985
  ENST ID: ENST00000348655
  CDS Start-End: 287-1711
cagggtccggcctgcgccttcccgccaggcctggacactggttcaacacctgtgacttcatgtgtgcgcgccggccacacctgcagtcacacctgtagccccctctgccaagagatccataccgaggcagcgtcggtggctacaagccctcagtccacacctgtggacacctgtgacacctggccacacgacctgtggccgcggcctggcgtctgctgcgacaggagcccttacctcccctgttataacacctgaccgccacctaactgcccctgcagaaggagcaatggccttggctcctgagagggcagccccacgcgtgctgttcggagagtggctccttggagagatcagcagcggctgctatgaggggctgcagtggctggacgaggcccgcacctgtttccgcgtgccctggaagcacttcgcgcgcaaggacctgagcgaggccgacgcgcgcatcttcaaggcctgggctgtggcccgcggcaggtggccgcctagcagcaggggaggtggcccgccccccgaggctgagactgcggagcgcgccggctggaaaaccaacttccgctgcgcactgcgcagcacgcgtcgcttcgtgatgctgcgggataactcgggggacccggccgacccgcacaaggtgtacgcgctcagccgggagctgtgctggcgagaaggcccaggcacggaccagactgaggcagaggcccccgcagctgtcccaccaccacagggtgggcccccagggccattcctggcacacacacatgctggactccaagccccaggccccctccctgccccagctggtgacaagggggacctcctgctccaggcagtgcaacagagctgcctggcagaccatctgctgacagcgtcatggggggcagatccagtcccaaccaaggctcctggagagggacaagaagggcttcccctgactggggcctgtgctggaggcgaggccgcggccccagagtccccgcaccaggcagagccgtacctgtcaccctccccaagcgcctgcaccgcggtgcaagagcccagcccaggggcgctggacgtgaccatcatgtacaagggccgcacggtgctgcagaaggtggtgggacacccgagctgcacgttcctatacggccccccagacccagctgtccgggccacagacccccagcaggtagcattccccagccctgccgagctcccggaccagaagcagctgcgctacacggaggaactgctgcggcacgtggcccctgggttgcacctggagcttcgggggccacagctgtgggcccggcgcatgggcaagtgcaaggtgtactgggaggtgggcggacccccaggctccgccagcccctccaccccagcctgcctgctgcctcggaactgtgacacccccatcttcgacttcagagtcttcttccaagagctggtggaattccgggcacggcagcgccgtggctccccacgctataccatctacctgggcttcgggcaggacctgtcagctgggaggcccaaggagaagagcctggtcctggtgaagctggaaccctggctgtgccgagtgcacctagagggcacgcagcgtgagggtgtgtcttccctggatagcagcagcctcagcctctgcctgtccagcgccaacagcctctatgacgacatcgagtgcttccttatggagctggagcagcccgcctagaacccagtctaatgagaactccagaaagctggagcagcccacctagagctggccgcggccgcccagtctaataaaaagaactccagaaca

SEQ ID NO: 143556 - DNA, 2051 bp, Homo sapiens
  Payload ID: 8357
  Gene Symbol: IRF7
  Gene Name: interferon regulatory factor 7
  Uniprot ID: Q92985
  ENST ID: ENST00000397566
  CDS Start-End: 411-1961
agggtgcgaagcgccactgtttaggtttcgctttcccgggagcctgacccgcccctgacgtcgcctttcccgtctccgcagggtccggcctgcgccttcccgccaggcctggacactggttcaacacctgtgacttcatgtgtgcgcgccggccacacctgcagtcacacctgtagccccctctgccaagagatccataccgaggcagcgtcggtggctacaagccctcagtccacacctgtggacacctgtgacacctggccacacgacctgtggccgcggcctggcgtctgctgcgacaggagcccttacctcccctgttataacacctgaccgccacctaactgcccctgcagaaggagcaatggccttggctcctgagaggtaagagcccggcccaccctctccagatgccagtccccgagcgccctgcagccggccctgactctccgcggccgggcacccgcagggcagccccacgcgtgctgttcggagagtggctccttggagagatcagcagcggctgctatgaggggctgcagtggctggacgaggcccgcacctgtttccgcgtgccctggaagcacttcgcgcgcaaggacctgagcgaggccgacgcgcgcatcttcaaggcctgggctgtggcccgcggcaggtggccgcctagcagcaggggaggtggcccgccccccgaggctgagactgcggagcgcgccggctggaaaaccaacttccgctgcgcactgcgcagcacgcgtcgcttcgtgatgctgcgggataactcgggggacccggccgacccgcacaaggtgtacgcgctcagccgggagctgtgctggcgagaaggcccaggcacggaccagactgaggcagaggcccccgcagctgtcccaccaccacagggtgggcccccagggccattcctggcacacacacatgctggactccaagccccaggccccctccctgccccagctggtgacaagggggacctcctgctccaggcagtgcaacagagctgcctggcagaccatctgctgacagcgtcatggggggcagatccagtcccaaccaaggctcctggagagggacaagaagggcttcccctgactggggcctgtgctggaggcccagggctccctgctggggagctgtacgggtgggcagtagagacgacccccagccccgggccccagcccgcggcactaacgacaggcgaggccgcggccccagagtccccgcaccaggcagagccgtacctgtcaccctccccaagcgcctgcaccgcggtgcaagagcccagcccaggggcgctggacgtgaccatcatgtacaagggccgcacggtgctgcagaaggtggtgggacacccgagctgcacgttcctatacggccccccagacccagctgtccgggccacagacccccagcaggtagcattccccagccctgccgagctcccggaccagaagcagctgcgctacacggaggaactgctgcggcacgtggcccctgggttgcacctggagcttcgggggccacagctgtgggcccggcgcatgggcaagtgcaaggtgtactgggaggtgggcggacccccaggctccgccagcccctccaccccagcctgcctgctgcctcggaactgtgacacccccatcttcgacttcagagtcttcttccaagagctggtggaattccgggcacggcagcgccgtggctccccacgctataccatctacctgggcttcgggcaggacctgtcagctgggaggcccaaggagaagagcctggtcctggtgaagctggaaccctggctgtgccgagtgcacctagagggcacgcagcgtgagggtgtgtcttccctggatagcagcagcctcagcctctgcctgtccagcgccaacagcctctatgacgacatcgagtgcttccttatggagctggagcagcccgcctagaacccagtctaatgagaactccagaaagctggagcagcccacctagagctggccgcggccgcccagtctaataaaaagaactccagaaca

SEQ ID NO: 143557 - DNA, 1943 bp, Homo sapiens
  Payload ID: 8357
  Gene Symbol: IRF7
  Gene Name: interferon regulatory factor 7
  ENST ID: ENST00000397570
  CDS Start-End: 411-1874
agggtgcgaagcgccactgtttaggtttcgctttcccgggagcctgacccgcccctgacgtcgcctttcccgtctccgcagggtccggcctgcgccttcccgccaggcctggacactggttcaacacctgtgacttcatgtgtgcgcgccggccacacctgcagtcacacctgtagccccctctgccaagagatccataccgaggcagcgtcggtggctacaagccctcagtccacacctgtggacacctgtgacacctggccacacgacctgtggccgcggcctggcgtctgctgcgacaggagcccttacctcccctgttataacacctgaccgccacctaactgcccctgcagaaggagcaatggccttggctcctgagaggtaagagcccggcccaccctctccagatgccagtccccgagcgccctgcagccggccctgactctccgcggccgggcacccgcagggcagccccacgcgtgctgttcggagagtggctccttggagagatcagcagcggctgctatgaggggctgcagtggctggacgaggcccgcacctgtttccgcgtgccctggaagcacttcgcgcgcaaggacctgagcgaggccgacgcgcgcatcttcaaggcctgggctgtggcccgcggcaggtggccgcctagcagcaggggaggtggcccgccccccgaggctgagactgcggagcgcgccggctggaaaaccaacttccgctgcgcactgcgcagcacgcgtcgcttcgtgatgctgcgggataactcgggggacccggccgacccgcacaaggtgtacgcgctcagccgggagctgtgctggcgagaaggcccaggcacggaccagactgaggcagaggcccccgcagctgtcccaccaccacagggtgggcccccagggccattcctggcacacacacatgctggactccaagccccaggccccctccctgccccagctggtgacaagggggacctcctgctccaggcagtgcaacagagctgcctggcagaccatctgctgacagcgtcatggggggcagatccagtcccaaccaaggctcctggagagggacaagaagggcttcccctgactggggcctgtgctggaggcgaggccgcggccccagagtccccgcaccaggcagagccgtacctgtcaccctccccaagcgcctgcaccgcggtgcaagagcccagcccaggggcgctggacgtgaccatcatgtacaagggccgcacggtgctgcagaaggtggtgggacacccgagctgcacgttcctatacggccccccagacccagctgtccgggccacagacccccagcaggtagcattccccagccctgccgagctcccggaccagaagcagctgcgctacacggaggaactgctgcggcacgtggcccctgggttgcacctggagcttcgggggccacagctgtgggcccggcgcatgggcaagtgcaaggtgtactgggaggtgggcggacccccaggctccgccagcccctccaccccagcctgcctgctgcctcggaactgtgacacccccatcttcgacttcagagtcttcttccaagagctggtggaattccgggcacggcagcgccgtggctccccacgctataccatctacctgggcttcgggcaggacctgtcagctgggaggcccaaggagaagagcctggtcctggtgaagctggaaccctggctgtgccgagtgcacctagagggcacgcagcgtgagggtgtgtcttccctggatagcagcagcctcagcctctgcctgtccagcgccaacagcctctatgacgacatcgagtgcttccttatggagctggagcagcccgcctagaacccagtctaatgagaactccagaaagctggagcagcccacctagagctggccgcggccgcccagtct

SEQ ID NO: 143558 - DNA, 1968 bp, Homo sapiens
  Payload ID: 8357
  Gene Symbol: IRF7
  Gene Name: interferon regulatory factor 7
  Uniprot ID: Q92985
  ENST ID: ENST00000397574
  CDS Start-End: 371-1882
gaaactcccgcctggccaccataaaagcgccggccctccgcttccccgcgagacgaaacttcccgtcccggcggctctggcacccagggtccggcctgcgccttcccgccaggcctggacactggttcaacacctgtgacttcatgtgtgcgcgccggccacacctgcagtcacacctgtagccccctctgccaagagatccataccgaggcagcgtcggtggctacaagccctcagtccacacctgtggacacctgtgacacctggccacacgacctgtggccgcggcctggcgtctgctgcgacaggagcccttacctcccctgttataacacctgaccgccacctaactgcccctgcagaaggagcaatggccttggctcctgagagggcagccccacgcgtgctgttcggagagtggctccttggagagatcagcagcggctgctatgaggggctgcagtggctggacgaggcccgcacctgtttccgcgtgccctggaagcacttcgcgcgcaaggacctgagcgaggccgacgcgcgcatcttcaaggcctgggctgtggcccgcggcaggtggccgcctagcagcaggggaggtggcccgccccccgaggctgagactgcggagcgcgccggctggaaaaccaacttccgctgcgcactgcgcagcacgcgtcgcttcgtgatgctgcgggataactcgggggacccggccgacccgcacaaggtgtacgcgctcagccgggagctgtgctggcgagaaggcccaggcacggaccagactgaggcagaggcccccgcagctgtcccaccaccacagggtgggcccccagggccattcctggcacacacacatgctggactccaagccccaggccccctccctgccccagctggtgacaagggggacctcctgctccaggcagtgcaacagagctgcctggcagaccatctgctgacagcgtcatggggggcagatccagtcccaaccaaggctcctggagagggacaagaagggcttcccctgactggggcctgtgctggaggcccagggctccctgctggggagctgtacgggtgggcagtagagacgacccccagccccgggccccagcccgcggcactaacgacaggcgaggccgcggccccagagtccccgcaccaggcagagccgtacctgtcaccctccccaagcgcctgcaccgcggtgcaagagcccagcccaggggcgctggacgtgaccatcatgtacaagggccgcacggtgctgcagaaggtggtgggacacccgagctgcacgttcctatacggccccccagacccagctgtccgggccacagacccccagcaggtagcattccccagccctgccgagctcccggaccagaagcagctgcgctacacggaggaactgctgcggcacgtggcccctgggttgcacctggagcttcgggggccacagctgtgggcccggcgcatgggcaagtgcaaggtgtactgggaggtgggcggacccccaggctccgccagcccctccaccccagcctgcctgctgcctcggaactgtgacacccccatcttcgacttcagagtcttcttccaagagctggtggaattccgggcacggcagcgccgtggctccccacgctataccatctacctgggcttcgggcaggacctgtcagctgggaggcccaaggagaagagcctggtcctggtgaagctggaaccctggctgtgccgagtgcacctagagggcacgcagcgtgagggtgtgtcttccctggatagcagcagcctcagcctctgcctgtccagcgccaacagcctctatgacgacatcgagtgcttccttatggagctggagcagcccgcctagaacccagtctaatgagaactccagaaagctggagcagcccacctagagctggccgcggccgcccagtctaataaaaagaactccag

SEQ ID NO: 143559 - DNA, 1019 bp, Homo sapiens
  Payload ID: 8357
  Gene Symbol: IRF7
  Gene Name: interferon regulatory factor 7
  ENST ID: ENST00000532788
  CDS Start-End: 397-930
ataaaagcgccggccctccgcttccccgcgagacgaaacttcccgtcccggcggctctggcacccagggtccggcctgcgccttcccgccaggcctggacactggttcaacacctgtgacttcatgtgtgcgcgccggccacacctgcagtcacacctgtagccccctctgccaagagatccataccgaggcagcgtcggtggctacaagccctcagtccacacctgtggacacctgtgacacctggccacacgacctgtggccgcggcctggcgtctgctgcgacaggagcccttacctcccctgttataacacctgaccgccacctaactgcccctgcagaaggagcaatggccttggctcctgagaggtaagagcccggcccaccctctccagatgccagtccccgagcgccctgcagccggccctgactctccgcggccgggcacccgcagggcagccccacgcgtgctgttcggagagtggctccttggagagatcagcagcggctgctatgaggggctgcagtggctggacgaggcccgcacctgtttccgcgtgccctggaagcacttcgcgcgcaaggacctgagcgaggccgacgcgcgcatcttcaaggcctgggctgtggcccgcggcaggtggccgcctagcagcaggggaggtggcccgccccccgaggctgagactgcggagcgcgccggctggaaaaccaacttccgctgcgcactgcgcagcacgcgtcgcttcgtgatgctgcgggataactcgggggacccggccgacccgcacaaggtgtacgcgctcagccgggagctgtgctggcgagaaggcccaggcacggaccagactgaggcagaggcccccgcagctgtcccaccaccacaggcccagggctccctgctggggagctgtacgggtgggcagtagagacgacccccagccccgggccccagcccgcggcactaacgacaggcgaggccgcggccccagagtccccgcaccaggcagagccgtac

SEQ ID NO: 143560 - DNA, 1776 bp, Homo sapiens
  Payload ID: 8357
  Gene Symbol: IRF7
  Gene Name: interferon regulatory factor 7
  Uniprot ID: Q92985
  ENST ID: ENST00000533182
  CDS Start-End: 322-816
gagacgaaacttcccgtcccggcggctctggcacccagggtccggcctgcgccttcccgccaggcctggacactggttcaacacctgtgacttcatgtgtgcgcgccggccacacctgcagtcacacctgtagccccctctgccaagagatccataccgaggcagcgtcggtggctacaagccctcagtccacacctgtggacacctgtgacacctggccacacgacctgtggccgcggcctggcgtctgctgcgacaggagcccttacctcccctgttataacacctgaccgccacctaactgcccctgcagaaggagcaatggccttggctcctgagagggcagccccacgcgtgctgttcggagagtggctccttggagagatcagcagcggctgctatgaggggctgcagtggctggacgaggcccgcacctgtttccgcgtgccctggaagcacttcgcgcgcaaggacctgagcgaggccgacgcgcgcatcttcaaggcctgggctgtggcccgcggcaggtggccgcctagcagcaggggaggtggcccgccccccgaggctgagactgcggagcgcgccggctggaaaaccaacttccgctgcgcactgcgcagcacgcgtcgcttcgtgatgctgcgggataactcgggggacccggccgacccgcacaaggtgtacgcgctcagccgggagctgtgctggcgagaaggcccaggcacggaccagactgaggcagaggcccccgcagctgtcccaccaccacaggcccagggctccctgctggggagctgtacgggtgggcagtagagacgacccccagccccgggccccagcccgcggcactaacgacaggtgagaggggtaggggttgggaggcctggggcacagggagaggctagggatgaggtgccagcacaggattcccttccggatgcaggcgaggccgcggccccagagtccccgcaccaggcagagccgtacctgtcaccctccccaagcgcctgcaccgcggtgcaagagcccagcccaggggcgctggacgtgaccatcatgtacaagggccgcacggtgctgcagaaggtggtgggacacccgagctgcacgttcctatacggccccccagacccagctgtccgggccacagacccccagcaggtagcattccccagccctgccgagctcccggaccagaagcagctgcgctacacggaggaactgctgcggcacgtggcccctgggttgcacctggagcttcgggggccacagctgtgggcccggcgcatgggcaagtgcaaggtgtactgggaggtgggcggacccccaggctccgccagcccctccaccccagcctgcctgctgcctcggaactgtgacacccccatcttcgacttcagagtcttcttccaagagctggtggaattccgggcacggcagcgccgtggctccccacgctataccatctacctgggcttcgggcaggacctgtcagctgggaggcccaaggagaagagcctggtcctggtgaagctggaaccctggctgtgccgagtgcacctagagggcacgcagcgtgagggtgtgtcttccctggatagcagcagcctcagcctctgcctgtccagcgccaacagcctctatgacgacatcgagtgcttccttatggagctggagcagcccgcctagaacccagtctaatgagaactccagaaagctggagcagcccacctagagctggccgcggccgcccagtctaataaaaagaactcc

SEQ ID NO: 143561 - DNA, 1588 bp, Homo sapiens
  Payload ID: 8357
  Gene Symbol: IRF7
  Gene Name: interferon regulatory factor 7
  ENST ID: ENST00000525445
  CDS Start-End: 303-1496
ccaggcctggacactggttcaacacctggcagccccacgcgtgctgttcggagagtggctccttggagagatcagcagcggctgctatgaggggctgcagtggctggacgaggcccgcacctgtttccgcgtgccctggaagcacttcgcgcgcaaggacctgagcgaggccgacgcgcgcatcttcaaggtggccgcctagcagcaggggaggtggcccgccccccgaggctgagactgcggagcgcgccggctggaaaaccaacttccgctgcgcactgcgcagcacgcgtcgcttcgtgatgctgcgggataactcgggggacccggccgacccgcacaaggtgtacgcgctcagccgggagctgtgctggcgagaaggcccaggcacggaccagactgaggcagaggcccccgcagctgtcccaccaccacagggtgggcccccagggccattcctggcacacacacatgctggactccaagccccaggccccctccctgccccagctggtgacaagggggacctcctgctccaggcagtgcaacagagctgcctggcagaccatctgctgacagcgtcatggggggcagatccagtcccaaccaaggctcctggagagggacaagaagggcttcccctgactggggcctgtgctggaggcccagggctccctgctggggagctgtacgggtgggcagtagagacgacccccagccccgggccccagcccgcggcactaacgacaggcgaggccgcggccccagagtccccgcaccaggcagagccgtacctgtcaccctccccaagcgcctgcaccgcggtgcaagagcccagcccaggggcgctggacgtgaccatcatgtacaagggccgcacggtgctgcagaaggtggtgggacacccgagctgcacgttcctatacggccccccagacccagctgtccgggccacagacccccagcaggtagcattccccagccctgccgagctcccggaccagaagcagctgcgctacacggaggaactgctgcggcacgtggcccctgggttgcacctggagcttcgggggccacagctgtgggcccggcgcatgggcaagtgcaaggtgtactgggaggtgggcggacccccaggctccgccagcccctccaccccagcctgcctgctgcctcggaactgtgacacccccatcttcgacttcagagtcttcttccaagagctggtggaattccgggcacggcagcgccgtggctccccacgctataccatctacctgggcttcgggcaggacctgtcagctgggaggcccaaggagaagagcctggtcctggtgaagctggaaccctggctgtgccgagtgcacctagagggcacgcagcgtgagggtgtgtcttccctggatagcagcagcctcagcctctgcctgtccagcgccaacagcctctatgacgacatcgagtgcttccttatggagctggagcagcccgcctagaacccagtctaatgagaactccagaaagctggagcagcccacctagagctggccgcggccgcccagtctaataaaaagaactccagaacacg

SEQ ID NO: 143562 - DNA, 806 bp, Homo sapiens
  Payload ID: 8357
  Gene Symbol: IRF7
  Gene Name: interferon regulatory factor 7
  ENST ID: ENST00000533190
  CDS Start-End: 310-717
cccgtcccggcggctctggcacccagggtccggcctgcgccttcccgccaggcctggacactggttcaacacctgtgacttcatgtgtgcgcgccggccacacctgcagtcacacctgtagccccctctgccaagagatccataccgaggcagcgtcggtggctacaagccctcagtccacacctgtggacacctgtgacacctggccacacgacctgtggccgcggcctggcgtctgctgcgacaggagcccttacctcccctgttataacacctgaccgccacctaactgcccctgcagaaggagcaatggccttggctcctgagagggcagccccacgcgtgctgttcggagagtggctccttggagagatcagcagcggctgctatgaggggctgcagtggctggacgaggcccgcacctgtttccgcgtgccctggaagcacttcgcgcgcaaggacctgagcgaggccgacgcgcgcatcttcaaggtggggaccccagccccgccccgccccgggtgggagagcccgcctaggaccccgcgggcccggcacacgtgttctgtccccctcttcaggcctgggctgtggcccgcggcaggtggccgcctagcagcaggggaggtggcccgccccccgaggctgagactgcggagcgcgccggctggaaaaccaacttccgctgcgcactgcgcagcacgcgtcgcttcgtgatgctgcgggataactcgggggacccggccgacccgcacaaggtgtacgcgctcagccgggagctgtgctggcgaggtgagcgacgccgg

SEQ ID NO: 143563 - DNA, 1634 bp, Homo sapiens
  Payload ID: 8357
  Gene Symbol: IRF7
  Gene Name: interferon regulatory factor 7
  Uniprot ID: Q92985
  ENST ID: ENST00000469048
  CDS Start-End: 287-781
cagggtccggcctgcgccttcccgccaggcctggacactggttcaacacctgtgacttcatgtgtgcgcgccggccacacctgcagtcacacctgtagccccctctgccaagagatccataccgaggcagcgtcggtggctacaagccctcagtccacacctgtggacacctgtgacacctggccacacgacctgtggccgcggcctggcgtctgctgcgacaggagcccttacctcccctgttataacacctgaccgccacctaactgcccctgcagaaggagcaatggccttggctcctgagagggcagccccacgcgtgctgttcggagagtggctccttggagagatcagcagcggctgctatgaggggctgcagtggctggacgaggcccgcacctgtttccgcgtgccctggaagcacttcgcgcgcaaggacctgagcgaggccgacgcgcgcatcttcaaggcctgggctgtggcccgcggcaggtggccgcctagcagcaggggaggtggcccgccccccgaggctgagactgcggagcgcgccggctggaaaaccaacttccgctgcgcactgcgcagcacgcgtcgcttcgtgatgctgcgggataactcgggggacccggccgacccgcacaaggtgtacgcgctcagccgggagctgtgctggcgagaaggcccaggcacggaccagactgaggcagaggcccccgcagctgtcccaccaccacaggcccagggctccctgctggggagctgtacgggtgggcagtagagacgacccccagccccgggccccagcccgcggcactaacgacaggcgaggccgcggccccagagtccccgcaccaggcagagccgtacctgtcaccctccccaagcgcctgcaccgcggtgcaagagcccagcccaggggcgctggacgtgaccatcatgtacaagggccgcacggtgctgcagaaggtggtgggacacccgagctgcacgttcctatacggccccccagacccagctgtccgggccacagacccccagcaggtagcattccccagccctgccgagctcccggaccagaagcagctgcgctacacggaggaactgctgcggcacgtggcccctgggttgcacctggagcttcgggggccacagctgtgggcccggcgcatgggcaagtgcaaggtgtactgggaggtgggcggacccccaggctccgccagcccctccaccccagcctgcctgctgcctcggaactgtgacacccccatcttcgacttcagagtcttcttccaagagctggtggaattccgggcacggcagcgccgtggctccccacgctataccatctacctgggcttcgggcaggacctgtcagctgggaggcccaaggagaagagcctggtcctggtgaagctggaaccctggctgtgccgagtgcacctagagggcacgcagcgtgagggtgtgtcttccctggatagcagcagcctcagcctctgcctgtccagcgccaacagcctctatgacgacatcgagtgcttccttatggagctggagcagcccgcctagaacccagtctaatgagaactccagaaagctggagcagcccacctagagctggccgcggccgc

SEQ ID NO: 143564 - DNA, 1604 bp, Homo sapiens
  Payload ID: 8357
  Gene Symbol: IRF7
  Gene Name: interferon regulatory factor 7
  ENST ID: ENST00000532326
  CDS Start-End: 355-912
caccataaaagcgccggccctccgcttccccgcgagacgaaacttcccgtcccggcggctctggcacccagggtccggcctgcgccttcccgccaggcctggacactggttcaacacctgtgacttcatgtgtgcgcgccggccacacctgcagtcacacctgtagccccctctgccaagagatccataccgaggcagcgtcggtggctacaagccctcagtccacacctgtggacacctgtgacacctggccacacgacctgtggccgcggcctggcgtctgctgcgacaggagcccttacctcccctgttataacacctgaccgccacctaactgcccctgcagaaggagcaatggccttggctcctgagagggcagccccacgcgtgctgttcggagagtggctccttggagagatcagcagcggctgctatgaggggctgcagtggctggacgaggcccgcacctgtttccgcgtgccctggaagcacttcgcgcgcaaggacctgagcgaggccgacgcgcgcatcttcaaggcctgggctgtggcccgcggcaggtggccgcctagcagcaggggaggtggcccgccccccgaggctgagactgcggagcgcgccggctggaaaaccaacttccgctgcgcactgcgcagcacgcgtcgcttcgtgatgctgcgggataactcgggggacccggccgacccgcacaaggtgtacgcgctcagccgggagctgtgctggcgaggcccaggcacggaccagactgaggcagaggcccccgcagctgtcccaccaccacaggcgaggccgcggccccagagtccccgcaccaggcagagccgtacctgtcaccctccccaagcgcctgcaccgcggtgcaagagcccagcccaggggcgctggacgtgaccatcatgtacaagggccgcacggtgctgcagaaggtggtgggacacccgagctgcacgttcctatacggccccccagacccagctgtccgggccacagacccccagcaggtagcattccccagccctgccgagctcccggaccagaagcagctgcgctacacggaggaactgctgcggcacgtggcccctgggttgcacctggagcttcgggggccacagctgtgggcccggcgcatgggcaagtgcaaggtgtactgggaggtgggcggacccccaggctccgccagcccctccaccccagcctgcctgctgcctcggaactgtgacacccccatcttcgacttcagagtcttcttccaagagctggtggaattccgggcacggcagcgccgtggctccccacgctataccatctacctgggcttcgggcaggacctgtcagctgggaggcccaaggagaagagcctggtcctggtgaagctggaaccctggctgtgccgagtgcacctagagggcacgcagcgtgagggtgtgtcttccctggatagcagcagcctcagcctctgcctgtccagcgccaacagcctctatgacgacatcgagtgcttccttatggagctggagcagcccgcctagaacccagtctaatgagaactccagaaagctggagcagcccacctagagctggcc

SEQ ID NO: 143565 - DNA, 1943 bp, Homo sapiens
  Payload ID: 8357
  Gene Symbol: IRF7
  Gene Name: interferon regulatory factor 7
  ENST ID: ENST00000617397
  CDS Start-End: 411-1874
agggtgcgaagcgccactgtttaggtttcgctttcccgggagcctgacccgcccctgacgtcgcctttcccgtctccgcagggtccggcctgcgccttcccgccaggcctggacactggttcaacacctgtgacttcatgtgtgcgcgccggccacacctgcagtcacacctgtagccccctctgccaagagatccataccgaggcagcgtcggtggctacaagccctcagtccacacctgtggacacctgtgacacctggccacacgacctgtggccgcggcctggcgtctgctgcgacaggagcccttacctcccctgttataacacctgaccgccacctaactgcccctgcagaaggagcaatggccttggctcctgagaggtaagagcccggcccaccctctccagatgccagtccccgagcgccctgcagccggccctgactctccgcggccgggcacccgcagggcagccccacgcgtgctgttcggagagtggctccttggagagatcagcagcggctgctatgaggggctgcagtggctggacgaggcccgcacctgtttccgcgtgccctggaagcacttcgcgcgcaaggacctgagcgaggccgacgcgcgcatcttcaaggcctgggctgtggcccgcggcaggtggccgcctagcagcaggggaggtggcccgccccccgaggctgagactgcggagcgcgccggctggaaaaccaacttccgctgcgcactgcgcagcacgcgtcgcttcgtgatgctgcgagataactcgggggacccggccgacccgcacaaggtgtacgcgctcagccgggagctgtgctggcgagaaggcccaggcacggaccagactgaggcagaggcccccgcagctgtcccaccaccacagggtgggcccccagggccattcctggcacacacacatgctggactccaagccccaggccccctccctgccccagctggtgacaagggggacctcctgctccaggcagtgcaacagagctgcctggcagaccatctgctgacagcgtcatggggggcagatccagtcccaaccaaggctcctggagagggacaagaagggcttcccctgactggggcctgtgctggaggcgaggccgcggccccagagtccccgcaccaggcagagccgtacctgtcaccctccccaagcgcctgcaccgcggtgcaagagcccagcccaggggcgctggacgtgaccatcatgtacaagggccgcacggtgctgcagaaggtggtgggacacccgagctgcacgttcctatacggccccccagacccagctgtccgggccacagacccccagcaggtagcattccccagccctgccgagctcccggaccagaagcagctgcgctacacggaggaactgctgcggcacgtggcccctgggttgcacctggagcttcgggggccacagctgtgggcccggcgcatgggcaagtgcaaggtgtactgggaggtgggcggacccccaggctccgccagcccctccaccccagcctgcctgctgcctcggaactgtgacacccccatcttcgacttcagagtcttcttccaagagctggtggaattccgggcacggcagcgccgtggctccccacgctataccatctacctgggcttcgggcaggacctgtcagctgggaggcccaaggagaagagcctggtcctggtgaagctggaaccctggctgtgccgagtgcacctagagggcacgcagcgtgagggtgtgtcttccctggatagcagcagcctcagcctctgcctgtccagcgccaacagcctctatgacgacatcgagtgcttccttatggagctggagcagcccgcctagaacccagtctaatgagaactccagaaagctggagcagcccacctagagctggccgcggccgcccagtct

SEQ ID NO: 143566 - DNA, 2051 bp, Homo sapiens
  Payload ID: 8357
  Gene Symbol: IRF7
  Gene Name: interferon regulatory factor 7
  Uniprot ID: Q92985
  ENST ID: ENST00000612534
  CDS Start-End: 411-1961
agggtgcgaagcgccactgtttaggtttcgctttcccgggagcctgacccgcccctgacgtcgcctttcccgtctccgcagggtccggcctgcgccttcccgccaggcctggacactggttcaacacctgtgacttcatgtgtgcgcgccggccacacctgcagtcacacctgtagccccctctgccaagagatccataccgaggcagcgtcggtggctacaagccctcagtccacacctgtggacacctgtgacacctggccacacgacctgtggccgcggcctggcgtctgctgcgacaggagcccttacctcccctgttataacacctgaccgccacctaactgcccctgcagaaggagcaatggccttggctcctgagaggtaagagcccggcccaccctctccagatgccagtccccgagcgccctgcagccggccctgactctccgcggccgggcacccgcagggcagccccacgcgtgctgttcggagagtggctccttggagagatcagcagcggctgctatgaggggctgcagtggctggacgaggcccgcacctgtttccgcgtgccctggaagcacttcgcgcgcaaggacctgagcgaggccgacgcgcgcatcttcaaggcctgggctgtggcccgcggcaggtggccgcctagcagcaggggaggtggcccgccccccgaggctgagactgcggagcgcgccggctggaaaaccaacttccgctgcgcactgcgcagcacgcgtcgcttcgtgatgctgcgagataactcgggggacccggccgacccgcacaaggtgtacgcgctcagccgggagctgtgctggcgagaaggcccaggcacggaccagactgaggcagaggcccccgcagctgtcccaccaccacagggtgggcccccagggccattcctggcacacacacatgctggactccaagccccaggccccctccctgccccagctggtgacaagggggacctcctgctccaggcagtgcaacagagctgcctggcagaccatctgctgacagcgtcatggggggcagatccagtcccaaccaaggctcctggagagggacaagaagggcttcccctgactggggcctgtgctggaggcccagggctccctgctggggagctgtacgggtgggcagtagagacgacccccagccccgggccccagcccgcggcactaacgacaggcgaggccgcggccccagagtccccgcaccaggcagagccgtacctgtcaccctccccaagcgcctgcaccgcggtgcaagagcccagcccaggggcgctggacgtgaccatcatgtacaagggccgcacggtgctgcagaaggtggtgggacacccgagctgcacgttcctatacggccccccagacccagctgtccgggccacagacccccagcaggtagcattccccagccctgccgagctcccggaccagaagcagctgcgctacacggaggaactgctgcggcacgtggcccctgggttgcacctggagcttcgggggccacagctgtgggcccggcgcatgggcaagtgcaaggtgtactgggaggtgggcggacccccaggctccgccagcccctccaccccagcctgcctgctgcctcggaactgtgacacccccatcttcgacttcagagtcttcttccaagagctggtggaattccgggcacggcagcgccgtggctccccacgctataccatctacctgggcttcgggcaggacctgtcagctgggaggcccaaggagaagagcctggtcctggtgaagctggaaccctggctgtgccgagtgcacctagagggcacgcagcgtgagggtgtgtcttccctggatagcagcagcctcagcctctgcctgtccagcgccaacagcctctatgacgacatcgagtgcttccttatggagctggagcagcccgcctagaacccagtctaatgagaactccagaaagctggagcagcccacctagagctggccgcggccgcccagtctaataaaaagaactccagaaca

SEQ ID NO: 143567 - DNA, 1968 bp, Homo sapiens
  Payload ID: 8357
  Gene Symbol: IRF7
  Gene Name: interferon regulatory factor 7
  Uniprot ID: Q92985
  ENST ID: ENST00000621391
  CDS Start-End: 371-1882
gaaactcccgcctggccaccataaaagcgccggccctccgcttccccgcgagacgaaacttcccgtcccggcggctctggcacccagggtccggcctgcgccttcccgccaggcctggacactggttcaacacctgtgacttcatgtgtgcgcgccggccacacctgcagtcacacctgtagccccctctgccaagagatccataccgaggcagcgtcggtggctacaagccctcagtccacacctgtggacacctgtgacacctggccacacgacctgtggccgcggcctggcgtctgctgcgacaggagcccttacctcccctgttataacacctgaccgccacctaactgcccctgcagaaggagcaatggccttggctcctgagagggcagccccacgcgtgctgttcggagagtggctccttggagagatcagcagcggctgctatgaggggctgcagtggctggacgaggcccgcacctgtttccgcgtgccctggaagcacttcgcgcgcaaggacctgagcgaggccgacgcgcgcatcttcaaggcctgggctgtggcccgcggcaggtggccgcctagcagcaggggaggtggcccgccccccgaggctgagactgcggagcgcgccggctggaaaaccaacttccgctgcgcactgcgcagcacgcgtcgcttcgtgatgctgcgagataactcgggggacccggccgacccgcacaaggtgtacgcgctcagccgggagctgtgctggcgagaaggcccaggcacggaccagactgaggcagaggcccccgcagctgtcccaccaccacagggtgggcccccagggccattcctggcacacacacatgctggactccaagccccaggccccctccctgccccagctggtgacaagggggacctcctgctccaggcagtgcaacagagctgcctggcagaccatctgctgacagcgtcatggggggcagatccagtcccaaccaaggctcctggagagggacaagaagggcttcccctgactggggcctgtgctggaggcccagggctccctgctggggagctgtacgggtgggcagtagagacgacccccagccccgggccccagcccgcggcactaacgacaggcgaggccgcggccccagagtccccgcaccaggcagagccgtacctgtcaccctccccaagcgcctgcaccgcggtgcaagagcccagcccaggggcgctggacgtgaccatcatgtacaagggccgcacggtgctgcagaaggtggtgggacacccgagctgcacgttcctatacggccccccagacccagctgtccgggccacagacccccagcaggtagcattccccagccctgccgagctcccggaccagaagcagctgcgctacacggaggaactgctgcggcacgtggcccctgggttgcacctggagcttcgggggccacagctgtgggcccggcgcatgggcaagtgcaaggtgtactgggaggtgggcggacccccaggctccgccagcccctccaccccagcctgcctgctgcctcggaactgtgacacccccatcttcgacttcagagtcttcttccaagagctggtggaattccgggcacggcagcgccgtggctccccacgctataccatctacctgggcttcgggcaggacctgtcagctgggaggcccaaggagaagagcctggtcctggtgaagctggaaccctggctgtgccgagtgcacctagagggcacgcagcgtgagggtgtgtcttccctggatagcagcagcctcagcctctgcctgtccagcgccaacagcctctatgacgacatcgagtgcttccttatggagctggagcagcccgcctagaacccagtctaatgagaactccagaaagctggagcagcccacctagagctggccgcggccgcccagtctaataaaaagaactccag

SEQ ID NO: 143568 - DNA, 1604 bp, Homo sapiens
  Payload ID: 8357
  Gene Symbol: IRF7
  Gene Name: interferon regulatory factor 7
  ENST ID: ENST00000632194
  CDS Start-End: 355-912
caccataaaagcgccggccctccgcttccccgcgagacgaaacttcccgtcccggcggctctggcacccagggtccggcctgcgccttcccgccaggcctggacactggttcaacacctgtgacttcatgtgtgcgcgccggccacacctgcagtcacacctgtagccccctctgccaagagatccataccgaggcagcgtcggtggctacaagccctcagtccacacctgtggacacctgtgacacctggccacacgacctgtggccgcggcctggcgtctgctgcgacaggagcccttacctcccctgttataacacctgaccgccacctaactgcccctgcagaaggagcaatggccttggctcctgagagggcagccccacgcgtgctgttcggagagtggctccttggagagatcagcagcggctgctatgaggggctgcagtggctggacgaggcccgcacctgtttccgcgtgccctggaagcacttcgcgcgcaaggacctgagcgaggccgacgcgcgcatcttcaaggcctgggctgtggcccgcggcaggtggccgcctagcagcaggggaggtggcccgccccccgaggctgagactgcggagcgcgccggctggaaaaccaacttccgctgcgcactgcgcagcacgcgtcgcttcgtgatgctgcgagataactcgggggacccggccgacccgcacaaggtgtacgcgctcagccgggagctgtgctggcgaggcccaggcacggaccagactgaggcagaggcccccgcagctgtcccaccaccacaggcgaggccgcggccccagagtccccgcaccaggcagagccgtacctgtcaccctccccaagcgcctgcaccgcggtgcaagagcccagcccaggggcgctggacgtgaccatcatgtacaagggccgcacggtgctgcagaaggtggtgggacacccgagctgcacgttcctatacggccccccagacccagctgtccgggccacagacccccagcaggtagcattccccagccctgccgagctcccggaccagaagcagctgcgctacacggaggaactgctgcggcacgtggcccctgggttgcacctggagcttcgggggccacagctgtgggcccggcgcatgggcaagtgcaaggtgtactgggaggtgggcggacccccaggctccgccagcccctccaccccagcctgcctgctgcctcggaactgtgacacccccatcttcgacttcagagtcttcttccaagagctggtggaattccgggcacggcagcgccgtggctccccacgctataccatctacctgggcttcgggcaggacctgtcagctgggaggcccaaggagaagagcctggtcctggtgaagctggaaccctggctgtgccgagtgcacctagagggcacgcagcgtgagggtgtgtcttccctggatagcagcagcctcagcctctgcctgtccagcgccaacagcctctatgacgacatcgagtgcttccttatggagctggagcagcccgcctagaacccagtctaatgagaactccagaaagctggagcagcccacctagagctggcc

SEQ ID NO: 143569 - DNA, 1992 bp, Homo sapiens
  Payload ID: 8357
  Gene Symbol: IRF7
  Gene Name: interferon regulatory factor 7
  Uniprot ID: Q92985
  ENST ID: ENST00000632827
  CDS Start-End: 388-1938
ccggccctccgcttccccgcgagacgaaacttcccgtcccggcggctctggcacccagggtccggcctgcgccttcccgccaggcctggacactggttcaacacctgtgacttcatgtgtgcgcgccggccacacctgcagtcacacctgtagccccctctgccaagagatccataccgaggcagcgtcggtggctacaagccctcagtccacacctgtggacacctgtgacacctggccacacgacctgtggccgcggcctggcgtctgctgcgacaggagcccttacctcccctgttataacacctgaccgccacctaactgcccctgcagaaggagcaatggccttggctcctgagaggtaagagcccggcccaccctctccagatgccagtccccgagcgccctgcagccggccctgactctccgcggccgggcacccgcagggcagccccacgcgtgctgttcggagagtggctccttggagagatcagcagcggctgctatgaggggctgcagtggctggacgaggcccgcacctgtttccgcgtgccctggaagcacttcgcgcgcaaggacctgagcgaggccgacgcgcgcatcttcaaggcctgggctgtggcccgcggcaggtggccgcctagcagcaggggaggtggcccgccccccgaggctgagactgcggagcgcgccggctggaaaaccaacttccgctgcgcactgcgcagcacgcgtcgcttcgtgatgctgcgagataactcgggggacccggccgacccgcacaaggtgtacgcgctcagccgggagctgtgctggcgagaaggcccaggcacggaccagactgaggcagaggcccccgcagctgtcccaccaccacagggtgggcccccagggccattcctggcacacacacatgctggactccaagccccaggccccctccctgccccagctggtgacaagggggacctcctgctccaggcagtgcaacagagctgcctggcagaccatctgctgacagcgtcatggggggcagatccagtcccaaccaaggctcctggagagggacaagaagggcttcccctgactggggcctgtgctggaggcccagggctccctgctggggagctgtacgggtgggcagtagagacgacccccagccccgggccccagcccgcggcactaacgacaggcgaggccgcggccccagagtccccgcaccaggcagagccgtacctgtcaccctccccaagcgcctgcaccgcggtgcaagagcccagcccaggggcgctggacgtgaccatcatgtacaagggccgcacggtgctgcagaaggtggtgggacacccgagctgcacgttcctatacggccccccagacccagctgtccgggccacagacccccagcaggtagcattccccagccctgccgagctcccggaccagaagcagctgcgctacacggaggaactgctgcggcacgtggcccctgggttgcacctggagcttcgggggccacagctgtgggcccggcgcatgggcaagtgcaaggtgtactgggaggtgggcggacccccaggctccgccagcccctccaccccagcctgcctgctgcctcggaactgtgacacccccatcttcgacttcagagtcttcttccaagagctggtggaattccgggcacggcagcgccgtggctccccacgctataccatctacctgggcttcgggcaggacctgtcagctgggaggcccaaggagaagagcctggtcctggtgaagctggaaccctggctgtgccgagtgcacctagagggcacgcagcgtgagggtgtgtcttccctggatagcagcagcctcagcctctgcctgtccagcgccaacagcctctatgacgacatcgagtgcttccttatggagctggagcagcccgcctagaacccagtctaatgagaactccagaaagctggagcagcccacctagagctggcc

SEQ ID NO: 143570 - DNA, 1588 bp, Homo sapiens
  Payload ID: 8357
  Gene Symbol: IRF7
  Gene Name: interferon regulatory factor 7
  ENST ID: ENST00000631879
  CDS Start-End: 303-1496
ccaggcctggacactggttcaacacctggcagccccacgcgtgctgttcggagagtggctccttggagagatcagcagcggctgctatgaggggctgcagtggctggacgaggcccgcacctgtttccgcgtgccctggaagcacttcgcgcgcaaggacctgagcgaggccgacgcgcgcatcttcaaggtggccgcctagcagcaggggaggtggcccgccccccgaggctgagactgcggagcgcgccggctggaaaaccaacttccgctgcgcactgcgcagcacgcgtcgcttcgtgatgctgcgagataactcgggggacccggccgacccgcacaaggtgtacgcgctcagccgggagctgtgctggcgagaaggcccaggcacggaccagactgaggcagaggcccccgcagctgtcccaccaccacagggtgggcccccagggccattcctggcacacacacatgctggactccaagccccaggccccctccctgccccagctggtgacaagggggacctcctgctccaggcagtgcaacagagctgcctggcagaccatctgctgacagcgtcatggggggcagatccagtcccaaccaaggctcctggagagggacaagaagggcttcccctgactggggcctgtgctggaggcccagggctccctgctggggagctgtacgggtgggcagtagagacgacccccagccccgggccccagcccgcggcactaacgacaggcgaggccgcggccccagagtccccgcaccaggcagagccgtacctgtcaccctccccaagcgcctgcaccgcggtgcaagagcccagcccaggggcgctggacgtgaccatcatgtacaagggccgcacggtgctgcagaaggtggtgggacacccgagctgcacgttcctatacggccccccagacccagctgtccgggccacagacccccagcaggtagcattccccagccctgccgagctcccggaccagaagcagctgcgctacacggaggaactgctgcggcacgtggcccctgggttgcacctggagcttcgggggccacagctgtgggcccggcgcatgggcaagtgcaaggtgtactgggaggtgggcggacccccaggctccgccagcccctccaccccagcctgcctgctgcctcggaactgtgacacccccatcttcgacttcagagtcttcttccaagagctggtggaattccgggcacggcagcgccgtggctccccacgctataccatctacctgggcttcgggcaggacctgtcagctgggaggcccaaggagaagagcctggtcctggtgaagctggaaccctggctgtgccgagtgcacctagagggcacgcagcgtgagggtgtgtcttccctggatagcagcagcctcagcctctgcctgtccagcgccaacagcctctatgacgacatcgagtgcttccttatggagctggagcagcccgcctagaacccagtctaatgagaactccagaaagctggagcagcccacctagagctggccgcggccgcccagtctaataaaaagaactccagaacacg

SEQ ID NO: 143571 - DNA, 1634 bp, Homo sapiens
  Payload ID: 8357
  Gene Symbol: IRF7
  Gene Name: interferon regulatory factor 7
  Uniprot ID: Q92985
  ENST ID: ENST00000634105
  CDS Start-End: 287-781
cagggtccggcctgcgccttcccgccaggcctggacactggttcaacacctgtgacttcatgtgtgcgcgccggccacacctgcagtcacacctgtagccccctctgccaagagatccataccgaggcagcgtcggtggctacaagccctcagtccacacctgtggacacctgtgacacctggccacacgacctgtggccgcggcctggcgtctgctgcgacaggagcccttacctcccctgttataacacctgaccgccacctaactgcccctgcagaaggagcaatggccttggctcctgagagggcagccccacgcgtgctgttcggagagtggctccttggagagatcagcagcggctgctatgaggggctgcagtggctggacgaggcccgcacctgtttccgcgtgccctggaagcacttcgcgcgcaaggacctgagcgaggccgacgcgcgcatcttcaaggcctgggctgtggcccgcggcaggtggccgcctagcagcaggggaggtggcccgccccccgaggctgagactgcggagcgcgccggctggaaaaccaacttccgctgcgcactgcgcagcacgcgtcgcttcgtgatgctgcgagataactcgggggacccggccgacccgcacaaggtgtacgcgctcagccgggagctgtgctggcgagaaggcccaggcacggaccagactgaggcagaggcccccgcagctgtcccaccaccacaggcccagggctccctgctggggagctgtacgggtgggcagtagagacgacccccagccccgggccccagcccgcggcactaacgacaggcgaggccgcggccccagagtccccgcaccaggcagagccgtacctgtcaccctccccaagcgcctgcaccgcggtgcaagagcccagcccaggggcgctggacgtgaccatcatgtacaagggccgcacggtgctgcagaaggtggtgggacacccgagctgcacgttcctatacggccccccagacccagctgtccgggccacagacccccagcaggtagcattccccagccctgccgagctcccggaccagaagcagctgcgctacacggaggaactgctgcggcacgtggcccctgggttgcacctggagcttcgggggccacagctgtgggcccggcgcatgggcaagtgcaaggtgtactgggaggtgggcggacccccaggctccgccagcccctccaccccagcctgcctgctgcctcggaactgtgacacccccatcttcgacttcagagtcttcttccaagagctggtggaattccgggcacggcagcgccgtggctccccacgctataccatctacctgggcttcgggcaggacctgtcagctgggaggcccaaggagaagagcctggtcctggtgaagctggaaccctggctgtgccgagtgcacctagagggcacgcagcgtgagggtgtgtcttccctggatagcagcagcctcagcctctgcctgtccagcgccaacagcctctatgacgacatcgagtgcttccttatggagctggagcagcccgcctagaacccagtctaatgagaactccagaaagctggagcagcccacctagagctggccgcggccgc

SEQ ID NO: 143572 - DNA, 1776 bp, Homo sapiens
  Payload ID: 8357
  Gene Symbol: IRF7
  Gene Name: interferon regulatory factor 7
  Uniprot ID: Q92985
  ENST ID: ENST00000633274
  CDS Start-End: 322-816
gagacgaaacttcccgtcccggcggctctggcacccagggtccggcctgcgccttcccgccaggcctggacactggttcaacacctgtgacttcatgtgtgcgcgccggccacacctgcagtcacacctgtagccccctctgccaagagatccataccgaggcagcgtcggtggctacaagccctcagtccacacctgtggacacctgtgacacctggccacacgacctgtggccgcggcctggcgtctgctgcgacaggagcccttacctcccctgttataacacctgaccgccacctaactgcccctgcagaaggagcaatggccttggctcctgagagggcagccccacgcgtgctgttcggagagtggctccttggagagatcagcagcggctgctatgaggggctgcagtggctggacgaggcccgcacctgtttccgcgtgccctggaagcacttcgcgcgcaaggacctgagcgaggccgacgcgcgcatcttcaaggcctgggctgtggcccgcggcaggtggccgcctagcagcaggggaggtggcccgccccccgaggctgagactgcggagcgcgccggctggaaaaccaacttccgctgcgcactgcgcagcacgcgtcgcttcgtgatgctgcgagataactcgggggacccggccgacccgcacaaggtgtacgcgctcagccgggagctgtgctggcgagaaggcccaggcacggaccagactgaggcagaggcccccgcagctgtcccaccaccacaggcccagggctccctgctggggagctgtacgggtgggcagtagagacgacccccagccccgggccccagcccgcggcactaacgacaggtgagaggggtaggggttgggaggcctggggcacagggagaggctagggatgaggtgccagcacaggattcccttccggatgcaggcgaggccgcggccccagagtccccgcaccaggcagagccgtacctgtcaccctccccaagcgcctgcaccgcggtgcaagagcccagcccaggggcgctggacgtgaccatcatgtacaagggccgcacggtgctgcagaaggtggtgggacacccgagctgcacgttcctatacggccccccagacccagctgtccgggccacagacccccagcaggtagcattccccagccctgccgagctcccggaccagaagcagctgcgctacacggaggaactgctgcggcacgtggcccctgggttgcacctggagcttcgggggccacagctgtgggcccggcgcatgggcaagtgcaaggtgtactgggaggtgggcggacccccaggctccgccagcccctccaccccagcctgcctgctgcctcggaactgtgacacccccatcttcgacttcagagtcttcttccaagagctggtggaattccgggcacggcagcgccgtggctccccacgctataccatctacctgggcttcgggcaggacctgtcagctgggaggcccaaggagaagagcctggtcctggtgaagctggaaccctggctgtgccgagtgcacctagagggcacgcagcgtgagggtgtgtcttccctggatagcagcagcctcagcctctgcctgtccagcgccaacagcctctatgacgacatcgagtgcttccttatggagctggagcagcccgcctagaacccagtctaatgagaactccagaaagctggagcagcccacctagagctggccgcggccgcccagtctaataaaaagaactcc

SEQ ID NO: 143573 - DNA, 1801 bp, Homo sapiens
  Payload ID: 8357
  Gene Symbol: IRF7
  Gene Name: interferon regulatory factor 7
  Uniprot ID: Q92985
  ENST ID: ENST00000633943
  CDS Start-End: 287-1711
cagggtccggcctgcgccttcccgccaggcctggacactggttcaacacctgtgacttcatgtgtgcgcgccggccacacctgcagtcacacctgtagccccctctgccaagagatccataccgaggcagcgtcggtggctacaagccctcagtccacacctgtggacacctgtgacacctggccacacgacctgtggccgcggcctggcgtctgctgcgacaggagcccttacctcccctgttataacacctgaccgccacctaactgcccctgcagaaggagcaatggccttggctcctgagagggcagccccacgcgtgctgttcggagagtggctccttggagagatcagcagcggctgctatgaggggctgcagtggctggacgaggcccgcacctgtttccgcgtgccctggaagcacttcgcgcgcaaggacctgagcgaggccgacgcgcgcatcttcaaggcctgggctgtggcccgcggcaggtggccgcctagcagcaggggaggtggcccgccccccgaggctgagactgcggagcgcgccggctggaaaaccaacttccgctgcgcactgcgcagcacgcgtcgcttcgtgatgctgcgagataactcgggggacccggccgacccgcacaaggtgtacgcgctcagccgggagctgtgctggcgagaaggcccaggcacggaccagactgaggcagaggcccccgcagctgtcccaccaccacagggtgggcccccagggccattcctggcacacacacatgctggactccaagccccaggccccctccctgccccagctggtgacaagggggacctcctgctccaggcagtgcaacagagctgcctggcagaccatctgctgacagcgtcatggggggcagatccagtcccaaccaaggctcctggagagggacaagaagggcttcccctgactggggcctgtgctggaggcgaggccgcggccccagagtccccgcaccaggcagagccgtacctgtcaccctccccaagcgcctgcaccgcggtgcaagagcccagcccaggggcgctggacgtgaccatcatgtacaagggccgcacggtgctgcagaaggtggtgggacacccgagctgcacgttcctatacggccccccagacccagctgtccgggccacagacccccagcaggtagcattccccagccctgccgagctcccggaccagaagcagctgcgctacacggaggaactgctgcggcacgtggcccctgggttgcacctggagcttcgggggccacagctgtgggcccggcgcatgggcaagtgcaaggtgtactgggaggtgggcggacccccaggctccgccagcccctccaccccagcctgcctgctgcctcggaactgtgacacccccatcttcgacttcagagtcttcttccaagagctggtggaattccgggcacggcagcgccgtggctccccacgctataccatctacctgggcttcgggcaggacctgtcagctgggaggcccaaggagaagagcctggtcctggtgaagctggaaccctggctgtgccgagtgcacctagagggcacgcagcgtgagggtgtgtcttccctggatagcagcagcctcagcctctgcctgtccagcgccaacagcctctatgacgacatcgagtgcttccttatggagctggagcagcccgcctagaacccagtctaatgagaactccagaaagctggagcagcccacctagagctggccgcggccgcccagtctaataaaaagaactccagaaca

SEQ ID NO: 143574 - DNA, 3030 bp, Homo sapiens
  Payload ID: 8358
  Gene Symbol: IRF8
  Gene Name: interferon regulatory factor 8
  Uniprot ID: Q02556
  ENST ID: ENST00000268638
  CDS Start-End: 423-1703
agtggctcgctcgggagccgccgcactcccggggctgtccgcccgagccggcctggaaggcggaggacgcctccaggtcgctccgcggggcctccggaattcctgggaaagcccccctgcagcgccgcccctggaccccaggtgtgaggagcggggctcggccagcggctccagaagaggcccggaccccactgccgtggctgccgggggcgggaaagtgatttctcggaaagcagagcacttcgaagaaggcgggccgcgcgagccaagctgacgctattggtcggtgtggccgtcgctctgcgcaccgcccgtcccccccacgaccctttttaaggccgcgcgaccgctggcgcatcgcctggagcgcggcagcaagcgtgggaacgcgggcggcgagacggcggcaggacggcggcaggatgtgtgaccggaatggtggtcggcggcttcgacagtggctgatcgagcagattgacagtagcatgtatccaggactgatttgggagaatgaggagaagagcatgttccggatcccttggaaacacgctggcaagcaagattataatcaggaagtggatgcctccatttttaaggcctgggcagtttttaaagggaagtttaaagaaggggacaaagctgaaccagccacttggaagacgaggttacgctgtgctttgaataagagcccagattttgaggaagtgacggaccggtcccaactggacatttccgagccatacaaagtttaccgaattgttcctgaggaagagcaaaaatgcaaactaggcgtggcaactgctggctgcgtgaatgaagttacagagatggagtgcggtcgctctgaaatcgacgagctgatcaaggagccttctgtggacgattacatggggatgatcaaaaggagcccttccccgccggaggcctgtcggagtcagctccttccagactggtgggcgcagcagcccagcacaggcgtgccgctggtgacggggtacaccacctacgacgcgcaccattcagcattctcccagatggtgatcagcttctactatgggggcaagctggtgggccaggccaccaccacctgccccgagggctgccgcctgtccctgagccagcctgggctgcccggcaccaagctgtatgggcccgagggcctggagctggtgcgcttcccgccggccgacgccatccccagcgagcgacagaggcaggtgacgcggaagctgttcgggcacctggagcgcggggtgctgctgcacagcagccggcagggcgtgttcgtcaagcggctgtgccagggccgcgtgttctgcagcggcaacgccgtggtgtgcaaaggcaggcccaacaagctggagcgtgatgaggtggtccaggtcttcgacaccagccagttcttccgagagctgcagcagttctataacagccagggccggcttcctgacggcagggtggtgctgtgctttggggaagagtttccggatatggcccccttgcgctccaaactcattctcgtgcagattgagcagctgtatgtccggcaactggcagaagaggctgggaagagctgtggagccggctctgtgatgcaggcccccgaggagccgccgccagaccaggtcttccggatgtttccagatatttgtgcctcacaccagagatcatttttcagagaaaaccaacagatcaccgtctaagtgcgtcgcttgggcgccccaccccgtctgcgtcctgcatccatctccctgttacagtggcccgcatcatgattaaagaatgtggatccctctgtctggggtgggatgccttactttgcacttaatttaataagggcattctcggaggagtagacgtttaatacgaagtggcggcatagccctgccgagatgtcggtgatggcctggatgctgtaaccacaacctgtggctaaaaattttattttctatcctttacccgtcattatcattagttgctatgattctttctgcattttcggttaactatcatttccaaagacttgtcattcagtaatattagcagatagctgcttcgataaaggaatttggagtttaaaaatcaacttgtgaaaacaaggttgtttttgtctttatcgtttgttagagttatagatttatgatttcataggcttgattctatgtgaaatatctttttacttttatgcattttaataagatttaaaaatatttagattaaagccccctttaatgagtacaagaaaaactcttggcttgttagaagaaagtatattctttctagaatttggtgcaggaatatgtgttcatatccaggcaaacgggtgtgtttttatcttcagacaatgaaaccttctcctctggggctttgttgccaggaagattagaactaaatttatttttttcatttctgtcatgaaatcattccagatacctcttttcttctttccaaatggttttcacatgtgtttgaaatatttgtacttcgaattgtcggattttccatgtcctcctttctcctttgtgcccagcctgagtcagcaccaatcccgcattcagaacctcccagtgaaagggcagccttcattttgagaaggtggaaggtgttagggtttgggagacagctcatccaatctcccaagtctcatggtggatttgtgactgtgagagtttccggtttaaaatctgaaaagccagatatgcctgtttccttttcccagcaccatgcctgtggaggggacagtcagacccagaggtcctttacgtgtggatggagttcacaggcgaatagaggagaggaccaggggacgtggcttgtcccttttgtccaacaaagcattatatttttaagaatggcagacctgtttgctgaagtgttcataagataacaataggcttgaatctccaattcaaatgaatgtcaaagcacatatctttaatatgctgaatgaatatttatttttgtatccattaaaacagtatattgatctcttttattctttattaaaataaaatgctcttttttaaagct

SEQ ID NO: 143575 - DNA, 1582 bp, Homo sapiens
  Payload ID: 8358
  Gene Symbol: IRF8
  Gene Name: interferon regulatory factor 8
  ENST ID: ENST00000566369
  CDS Start-End: 1-458
aggcctgggcagtttttaaagggaagtttaaagaaggggacaaagctgaaccagccacttggaagacgaggttacgctgtgctttgaataagagcccagattttgaggaagtgacggaccggtcccaactggacatttccgagccatacaaagtttaccgaattgttcctgaggaagagcaaaaatgcaaactaggcgtggcaactgctggctgcgtgaatgaagttacagagatggagtgcggtcgctctgaaatcgacgagctgatcaaggagagctgcagcagttctataacagccagggccggcttcctgacggcagggtggtgctgtgctttggggaagagtttccggatatggcccccttgcgctccaaactcattctcgtgcagattgagcagctgtatgtccggcaactggcagaagaggctgggaagagctgtggagccggctctgtgatgcaggcccccgaggagccgccgccagaccaggtcttccggatgtttccagatatttgtgcctcacaccagagatcatttttcagagaaaaccaacagatcaccgtctaagtgcgtcgcttgggcgccccaccccgtctgcgtcctgcatccatctccctgttacagtggcccgcatcatgattaaagaatgtggatccctctgtctggggtgggatgccttactttgcacttaatttaataagggcattctcggaggagtagacgtttaatacgaagtggcggcatagccctgccgagatgtcggtgatggcctggatgctgtaaccacaacctgtggctaaaaattttattttctatcctttacccgtcattatcattagttgctatgattctttctgcattttcggttaactatcatttccaaagacttgtcattcagtaatattagcagatagctgcttcgataaaggaatttggagtttaaaaatcaacttgtgaaaacaaggttgtttttgtctttatcgtttgttagagttatagatttatgatttcataggcttgattctatgtgaaatatctttttacttttatgcattttaataagatttaaaaatatttagattaaagccccctttaatgagtacaagaaaaactcttggcttgttagaagaaagtatattctttctagaatttggtgcaggaatatgtgttcatatccaggcaaacgggtgtgtttttatcttcagacaatgaaaccttctcctctggggctttgttgccaggaagattagaactaaatttatttttttcatttctgtcatgaaatcattccagatacctcttttcttctttccaaatggttttcacatgtgtttgaaatatttgtacttcgaattgtcggattttccatgtcctcctttctcctttgtgcccagcctgagtcagcaccaatcccgcattcagaacctcccagtgaaagggcagccttcattttgagaaggtggaaggtgttagggtttgggagacagctcatccaatctcccaagtctcatggtggatttgtgactgtgagagtttccggtttaaaatctgaaaagccagatatgcctgtttccttttccc

SEQ ID NO: 143576 - DNA, 946 bp, Homo sapiens
  Payload ID: 8358
  Gene Symbol: IRF8
  Gene Name: interferon regulatory factor 8
  ENST ID: ENST00000562492
  CDS Start-End: 189-857
agaggtccctggaaaggcacctctgtctgtgctgcaggaacaccatccggaaagctagcttgcacccccaggctctcccccagagataagccctgggtggtgggtatgcagtccagtggtattctgggggcgtgccgctggtgacggggtacaccacctacgacgcgcaccattcagcattctcccagatggtgatcagcttctactatgggggcaagctggtgggccaggccaccaccacctgccccgagggctgccgcctgtccctgagccagcctgggctgcccggcaccaagctgtatgggcccgagggcctggagctggtgcgcttcccgccggccgacgccatccccagcgagcgacagaggcaggtgacgcggaagctgttcgggcacctggagcgcggggtgctgctgcacagcagccggcagggcgtgttcgtcaagcggctgtgccagggccgcgtgttctgcagcggcaacgccgtggtgtgcaaaggcaggcccaacaagctggagcgtgatgaggtggtccaggtcttcgacaccagccagttcttccgagagctgcagcagttctataacagccagggccggcttcctgacggcagggtggtgctgtgctttggggaagagtttccggatatggcccccttgcgctccaaactcattctcgtgcagattgagcagctgtatgtccggcaactggcagaagaggctgggaagagctgtggagccggctctgtgatgcaggcccccgaggagccgccgccagaccaggtcttccggatgtttccagatatttgtgcctcacaccagagatcatttttcagagaaaaccaacagatcaccgtctaagtgcgtcgcttgggcgccccaccccgtctgcgtcctgcatccatctccctgttacagtggcccgcatcatgattaaagaatgtggatcc

SEQ ID NO: 143577 - DNA, 289 bp, Homo sapiens
  Payload ID: 8358
  Gene Symbol: IRF8
  Gene Name: interferon regulatory factor 8
  ENST ID: ENST00000569145
  CDS Start-End: 247-289
tgtgggagtctgggaggtggcagctggccccggaggccttgaaggttgccaggccttgggtgtcgagtaagaggtccctggaaaggcacctctgtctgtgctgcaggaacaccatccggaaagctagcttgcacccccaggctctcccccagagataagccctgggtggcgtgccgctggtgacggggtacaccacctacgacgcgcaccattcagcattctcccagatggtgatcagcttctactatgggggcaagctggtgggccaggccaccaccacctgccccga

SEQ ID NO: 143578 - DNA, 531 bp, Homo sapiens
  Payload ID: 8358
  Gene Symbol: IRF8
  Gene Name: interferon regulatory factor 8
  ENST ID: ENST00000564617
  CDS Start-End: 55-531
tttgcactcagggctgtgaggtcatggaggccagcattgccttctcatggcaggatgtgtgaccggaatggtggtcggcggcttcgacagtggctgatcgagcagattgacagtagcatgtatccaggactgatttgggagaatgaggagaagagcatgttccggatcccttggaaacacgctggcaagcaagattataatcaggaagtggatgcctccatttttaaggcctgggcagtttttaaagggaagtttaaagaaggggacaaagctgaaccagccacttggaagacgaggttacgctgtgctttgaataagagcccagattttgaggaagtgacggaccggtcccaactggacatttccgagccatacaaagtttaccgaattgttcctgaggaagagcaaaaatgcaaactaggcgtggcaactgctggctgcgtgaatgaagttacagagatggagtgcggtcgctctgaaatcgacgagctgatcaaggagccttctgtggacgattacatggggatgatc

SEQ ID NO: 143579 - DNA, 522 bp, Homo sapiens
  Payload ID: 8358
  Gene Symbol: IRF8
  Gene Name: interferon regulatory factor 8
  ENST ID: ENST00000565552
  CDS Start-End: 382-522
cctggagcgcggcagcaagcgtgggaacgcgggcggcgagacggcggcaggacggcggcaggaggctcaggaactgtggattctagtttaagaaacttgtagcaaggaaatcaggggagttgaaagtctcagaagccaacccctatgttgtgttctggccacctctgtgcagctcattcctcaatctaggagaaatttttctaccttgccccaggaaagagctgctaacttgttttcggggagtgtgggggggtctttggtattggtgttccatttctcttctcaggtaccctctcccaagtctgtcccttctttatgataaacacagtggcctgctttagaattctgggtctcttgagatacagcctctcaacttacaggatgtgtgaccggaatggtggtcggcggcttcgacagtggctgatcgagcagattgacagtagcatgtatccaggactgatttgggagaatgaggagaagagcatgttccggatcccttggaaacacgctggcaagcaagat

SEQ ID NO: 143580 - DNA, 880 bp, Homo sapiens
  Payload ID: 8358
  Gene Symbol: IRF8
  Gene Name: interferon regulatory factor 8
  ENST ID: ENST00000569607
  CDS Start-End: 220-880
tggggaaaagcactgaattcagcggaagcctgtgctccctggagcctctggcacgccatgtgcagccttttaagggacttttggagaaggagcgattggggttactccctgtacaccacacctgggtggctctgagcttgcttttctgtttctcctgcaggcgtgccgctggtgacggggtacaccacctacgacgcgcaccattcagcattctcccagatggtgatcagcttctactatgggggcaagctggtgggccaggccaccaccacctgccccgagggctgccgcctgtccctgagccagcctgggctgcccggcaccaagctgtatgggcccgagggcctggagctggtgcgcttcccgccggccgacgccatccccagcgagcgacagaggcaggtgacgcggaagctgttcgggcacctggagcgcggggtgctgctgcacagcagccggcagggcgtgttcgtcaagcggctgtgccagggccgcgtgttctgcagcggcaacgccgtggtgtgcaaaggcaggcccaacaagctggagcgtgatgaggtggtccaggtcttcgacaccagccagttcttccgagagctgcagcagttctataacagccagggccggcttcctgacggcagggtggtgctgtgctttggggaagagtttccggatatggcccccttgcgctccaaactcattctcgtgcagattgagcagctgtatgtccggcaactggcagaagaggctgggaagagctgtggagccggctctgtgatgcaggcccccgaggagccgccgccagaccaggtcttccggatgtttccagatatttgtgcctcacaccagagatcatttttcagagaaaaccaacagatca

SEQ ID NO: 143581 - DNA, 1038 bp, Homo sapiens
  Payload ID: 8358
  Gene Symbol: IRF8
  Gene Name: interferon regulatory factor 8
  ENST ID: ENST00000564803
  CDS Start-End: 54-1038
atggaggccagcattgccttctcatggcaggtgtcccggagtccctgaatctgatgtgtgaccggaatggtggtcggcggcttcgacagtggctgatcgagcagattgacagtagcatgtatccaggactgatttgggagaatgaggagaagagcatgttccggatcccttggaaacacgctggcaagcaagattataatcaggaagtggatgcctccatttttaaggcctgggcagtttttaaagggaagtttaaagaaggggacaaagctgaaccagccacttggaagacgaggttacgctgtgctttgaataagagcccagattttgaggaagtgacggaccggtcccaactggacatttccgagccatacaaagtttaccgaattgttcctgaggaagagcaaaaatgcaaactaggcgtggcaactgctggctgcgtgaatgaagttacagagatggagtgcggtcgctctgaaatcgacgagctgatcaaggagccttctgtggacgattacatggggatgatcaaaaggagcccttccccgccggaggcctgtcggagtcagctccttccagactggtgggcgcagcagcccagcacaggcgtgccgctggtgacggggtacaccacctacgacgcgcaccattcagcattctcccagatggtgatcagcttctactatgggggcaagctggtgggccaggccaccaccacctgccccgagggctgccgcctgtccctgagccagcctgggctgcccggcaccaagctgtatgggcccgagggcctggagctggtgcgcttcccgccggccgacgccatccccagcgagcgacagaggcaggtgacgcggaagctgttcgggcacctggagcgcggggtgctgctgcacagcagccggcagggcgtgttcgtcaagcggctgtgccagggccgcgtgttctgcagcggcaacgccgtggtgtgcaaaggcaggcccaacaagctggagcgtgatgaggtggtccaggtcttcgacaccagccagttcttcc

SEQ ID NO: 143582 - DNA, 1394 bp, Homo sapiens
  Payload ID: 8358
  Gene Symbol: IRF8
  Gene Name: interferon regulatory factor 8
  ENST ID: ENST00000563180
  CDS Start-End: 328-708
tgttcactgtggttgtatctgcctgaaaggaaagggcagatgaaagctggaaggagcacagccagcacagtgggaggggcctgcagggggctgctggtggctgcaggtttcccacggagctttcagtttgcactcagggctgtgaggtcatggaggccagcattgccttctcatggcaggtgtcccggagtccctgaatctgtgggtttcccccaagccagcacctttgctgcaaacctctgagtttcctgttagcagtttttgggttgctgtgatgaatgagacaatatccgtaatatcacagcgtgtatttctgtctttccaaggatgtgtgaccggaatggtggtcggcggcttcgacagtggctgatcgagcagattgacagtagcatgtatccaggactgatttgggagaatgaggagaagagcatgttccggatcccttggaaacacgctggcaagcaagattataatcaggaagtggatgcctccatttttaaggcctgggcagtttttaaagggaagtttaaagaaggggacaaagctgaaccagccacttggaagacgaggttacgctgtgctttgaataagagcccagattttgaggaagtgacggaccggtcccaactggacatttccgagccatacaaagtttaccgaattgttcctgaggaagagcaaaaatgtaactatcctttatgggcatgaaaccttccagaagctgccctggcctgtagccttcaccacagaacttgggtctggggtagacacagggtctggggcacatagtttcagttaaacaaagcagttctctccttcgtgtaagcagaaattgagatctctttccagtgacctcagagggaagggcggaggagattgggtgctgcccaacctgtgccccacttgctgcctgaccacagacatttgtagggcctccctggacaggaacaagcatcctccagcagtttctgatgaggaatcctttcattttccagcagcttgcagaggaggccaggggaaaatatggtgaccacagaaggcctggatcatgagggttgggagtaaagctctcagatgaagttgtcaaagatggcaccatggccttcgttgttggagatgggatatgcctcagtgtgttactagatcctgattgttatttgggaactccgggatgtgatcattcctgaggtttcttccagctctcaaatcccaagaaagcatttgtgacagattaaagcaggacagcaaaaacatgccgcaccctggtcctacatcactaaaataaatcccaaagtactgagctgggatctggcctcagaaggcttctcaaagccctgtgctgtgccgctgccatgaattgtagctgatttatgagataaaacctaattaccagc

SEQ ID NO: 143583 - DNA, 658 bp, Homo sapiens
  Payload ID: 8359
  Gene Symbol: IRF9
  Gene Name: interferon regulatory factor 9
  ENST ID: ENST00000324076
  CDS Start-End: 1-630
gagggggacacaggaggtccagctgtctggaagactcgcctgcgctgtgcactcaacaagagttctgaatttaaggaggttcctgagaggggccgcatggatgttgctgagccctacaaggtgtatcagttgctgccaccaggaatcgtctctggccagccagggactcagaaagtaccatcaaagcgacagcacagttctgtgtcctctgagaggaaggaggaagaggatgccatgcagaactgcacactcagtccctctgtgctccaggactccctcaataatgaggaggagggggccagtgggggagcagtccattcagacattgggagcagcagcagcagcagcagccctgagccacaggaagttacagacacaactgaggccccctttcaaggggatcagaggtccctggagtttctgcttcctccagagccagacttggtcaggtactttcagggcctgggccccccaccgaagttccaggtaacactgaatttctgggaagagagccatggctccagccatactccacagaatcttatcacagtgaagatggagcaggcctttgcccgatacttgctggagcagactccagagcagcaggcagccattctgtccctggtgtagagcctgggggacccatcttccacctcac

SEQ ID NO: 143584 - DNA, 1838 bp, Homo sapiens
  Payload ID: 8359
  Gene Symbol: IRF9
  Gene Name: interferon regulatory factor 9
  Uniprot ID: Q00978
  ENST ID: ENST00000396864
  CDS Start-End: 288-1469
atctgagggaggcaggggaatgagccaggctggagctgagccagcagggcagggcccccctgctgcgacagtggcatcctgatagtgagatgctcagatgctgctgccctctagtggccgccagttccctgcaactcagaccacgtgatttctgggaaaaggccctccctggaggagaactgaaacttagggtggggactgtagaaaggggcggagagatcagccgcccagccaggagttaagctgaggtcgtctgagccctgcgacagcctggacagcaactcaggatggcatcaggcagggcacgctgcacccgaaaactccggaactgggtggtggagcaagtggagagtgggcagtttcccggagtgtgctgggatgatacagctaagaccatgttccggattccctggaaacatgcaggcaagcaggacttccgggaggaccaggatgctgccttcttcaaggcctgggcaatatttaagggaaagtataaggagggggacacaggaggtccagctgtctggaagactcgcctgcgctgtgcactcaacaagagttctgaatttaaggaggttcctgagaggggccgcatggatgttgctgagccctacaaggtgtatcagttgctgccaccaggaatcgtctctggccagccagggactcagaaagtaccatcaaagcgacagcacagttctgtgtcctctgagaggaaggaggaagaggatgccatgcagaactgcacactcagtccctctgtgctccaggactccctcaataatgaggaggagggggccagtgggggagcagtccattcagacattgggagcagcagcagcagcagcagccctgagccacaggaagttacagacacaactgaggccccctttcaaggggatcagaggtccctggagtttctgcttcctccagagccagactactcactgctgctcaccttcatctacaacgggcgcgtggtgggcgaggcccaggtgcaaagcctggattgccgccttgtggctgagccctcaggctctgagagcagcatggagcaggtgctgttccccaagcctggcccactggagcccacgcagcgcctgctgagccagcttgagaggggcatcctagtggccagcaacccccgaggcctcttcgtgcagcgcctttgccccatccccatctcctggaatgcaccccaggctccacctgggccaggcccgcatctgctgcccagcaacgagtgcgtggagctcttcagaaccgcctacttctgcagagacttggtcaggtactttcagggcctgggccccccaccgaagttccaggtaacactgaatttctgggaagagagccatggctccagccatactccacagaatcttatcacagtgaagatggagcaggcctttgcccgatacttgctggagcagactccagagcagcaggcagccattctgtccctggtgtagagcctgggggacccatcttccacctcacctctttgttcttcctgtctcctttgaagtagactcattcttcacacgattgacctgtcctctttgtgataattctcagtagttgtccgtgataatcgtgtcctgaaaatcctcgcacacactggctggtggagaactcaaggctaattttttatccttttttttttttaattttgagatatacgccctctttcatctgtaagggactaggaaattccaaatggtgtgaacccagggggcctttccctcttccctgacctcccaactctaaagccaagcactttatattttcctcttagatattcactaaggacttaaaataaaattttattgaaagaggaa

SEQ ID NO: 143585 - DNA, 1391 bp, Homo sapiens
  Payload ID: 8359
  Gene Symbol: IRF9
  Gene Name: interferon regulatory factor 9
  ENST ID: ENST00000557894
  CDS Start-End: 193-1254
cagccgcccagccaggagttaagctgaggtcgtctgagccctgcgacagcctggacagcaactcaggcctgggcaatatttaagggaaagtataaggagggggacacaggaggtccagctgtctggaagactcgcctgcgctgtgcactcaacaagagttctgaatttaaggaggttcctgagaggggccgcatggatgttgctgagccctacaaggtgtatcagttgctgccaccaggaatcgtctctggccagccagggactcagaaagtaccatcaaagcgacagcacagttctgtgtcctctgagaggaaggaggaagaggatgccatgcagaactgcacactcagtccctctgtgctccaggactccctcaataatgaggaggagggggccagtgggggagcagtccattcagacattgggagcagcagcagcagcagcagccctgagccacaggaagttacagacacaactgaggccccctttcaaggggatcagaggtccctggagtttctgcttcctccagagccagactactcactgctgctcaccttcatctacaacgggcgcgtggtgggcgaggcccaggtgcaaagcctggattgccgccttgtggctgagccctcaggctctgagagcagcatggagcaggtgctgttccccaagcctggcccactggagcccacgcagcgcctgctgagccagcttgagaggggcatcctagtggccagcaacccccgaggcctcttcgtgcagcgcctttgccccatccccatctcctggaatgcaccccaggctccacctgggccaggcccgcatctgctgcccagcaacgagtgcgtggagctcttcagaaccgcctacttctgcagagatcctccatgtagcctatgcatggcactcctgcgcttgtgtgttgcatatcctgtgtggccatatgcccagcctggcagctacctggcagctctcctccagccaagacaatggaagaggtggttcagacttggtcaggtactttcagggcctgggccccccaccgaagttccaggtaacactgaatttctgggaagagagccatggctccagccatactccacagaatcttatcacagtgaagatggagcaggcctttgcccgatacttgctggagcagactccagagcagcaggcagccattctgtccctggtgtagagcctgggggacccatcttccacctcacctctttgttcttcctgtctcctttgaagtagactcattcttcacacgattgacctgtcctctttgtgataattctcagtagttgtccgtgataatcgtgtcctgaaaatcctcgcacacactggctggtggagaactcaaggctaattttttatcctttttttttttt

SEQ ID NO: 143586 - DNA, 583 bp, Homo sapiens
  Payload ID: 8359
  Gene Symbol: IRF9
  Gene Name: interferon regulatory factor 9
  ENST ID: ENST00000559284
  CDS Start-End: 48-583
aagctgaggtcgtctgagccctgcgacagcctggacagcaactcaggatggcatcaggcagggcacgctgcacccgaaaactccggaactgggtggtggagcaagtggagagtgggcagtttcccggagtgtgctgggatgatacagctaagaccatgttccggattccctggaaacatgcaggcaagcaggacttccgggaggaccaggatgctgccttcttcaaggcctgggcaatatttaagggaaagtataaggagggggacacaggaggtccagctgtctggaagactcgcctgcgctgtgcactcaacaagagttctgaatttaaggaggttcctgagaggggccgcatggatgttgctgagccctacaaggtgtatcagttgctgccaccaggaatcgtctctggccagccagggactcagaaagtaccatcaaagcgacagcacagttctgtgtcctctgagaggaaggaggaagaggatgccatgcagaactgcacactcagtccctctgtgctccaggactccctcaataatttacagacacaactgaggccccctttcaaggggatcagagg

SEQ ID NO: 143587 - DNA, 1066 bp, Homo sapiens
  Payload ID: 8359
  Gene Symbol: IRF9
  Gene Name: interferon regulatory factor 9
  ENST ID: ENST00000561342
  CDS Start-End: 64-216
cgcccagccaggagttaagctgaggtcgtctgagccctgcgacagcctggacagcaactcaggatggcatcaggcagggcacgctgcacccgaaaactccggaactgggtggtggagcaagtggagagtgggcagtttcccggagtgtgctgggatgatacagctaagaccatgttccggattccctggaaacatgcaggcctgggcaatatttaagggaaagtataaggagggggacacaggaggtccagctgtctggaagactcgcctgcgctgtgcactcaacaagagttctgaatttaaggaggttcctgagaggggccgcatggatgttgctgagccctacaaggtgtatcagttgctgccaccaggaatcgtctctggccagccagggactcagaaagtaccatcaaagcgacagcacagttctgtgtcctctgagaggaaggaggaagaggatgccatgcagaactgcacactcagtccctctgtgctccaggactccctcaataatgaggaggagggggccagtgggggagcagtccattcagacattgggagcagcagcagcagcagcagccctgagccacaggaagttacagacacaactgaggccccctttcaaggggatcagaggtccctggagtttctgcttcctccagagccagactactcactgctgctcaccttcatctacaacgggcgcgtggtgggcgaggcccaggtgcaaagcctggattgccgccttgtggctgagccctcaggctctgagagcagcatggagcaggtgctgttccccaagcctggcccactggagcccacgcagcgcctgctgagccagcttgagaggggcatcctagtggccagcaacccccgaggcctcttcgtgcagcgcctttgccccatccccatctcctggaatgcaccccaggctccacctgggccaggcccgcatctgctgcccagcaacgagtgcgtggagctcttcagaaccgcctacttctgcagagacttggtcaggtactttcagggcctgggccccccaccgaagttccaggtaacactg

SEQ ID NO: 143588 - DNA, 731 bp, Homo sapiens
  Payload ID: 8359
  Gene Symbol: IRF9
  Gene Name: interferon regulatory factor 9
  ENST ID: ENST00000560852
  CDS Start-End: 24-176
gacagcctggacagcaactcaggatggcatcaggcagggcacgctgcacccgaaaactccggaactgggtggtggagcaagtggagagtgggcagtttcccggagtgtgctgggatgatacagctaagaccatgttccggattccctggaaacatgcaggcctgggcaatatttaagggaaagtataaggagggggacacaggaggtccagctgtctggaagactcgcctgcgctgtgcactcaacaagagttctgaatttaaggaggttcctgagaggggccgcatggatgttgctgagccctacaaggtgtatcagttgctgccaccaggaatcgtctctggccagccagggactcagaaagtaccatcaaagcgacagcacagttctgtgtcctctgagaggaaggaggaagaggatgccatgcagaactgcacactcagtccctctgtgctccaggactccctcaataatgtaagagatggagagggaactgggtgggcctaagggcaggacagtaaccagagggagaggtgggccaatgaaagacactgtgtcttgggaggccgaggctggcagatcacgtgaggtcagaagttcgaaaccagcctcgaccaacatggtgagaacccgtctctactaaaaatacaaaaattagctgtgcgttgtggcatctgcctgtaatcccagctactcaggaggccgaggcaggagaatcgcttgaaccgggg

SEQ ID NO: 143589 - DNA, 841 bp, Homo sapiens
  Payload ID: 8359
  Gene Symbol: IRF9
  Gene Name: interferon regulatory factor 9
  ENST ID: ENST00000560275
  CDS Start-End: 40-841
gtcgtctgagccctgcgacagcctggacagcaactcaggatggcatcaggcagggcacgctgcacccgaaaactccggaactgggtggtggagcaagtggagagtgggcagtttcccggagtgtgctgggatgatacagctaagaccatgttccggattccctggaaacatgcaggcaagcaggacttccgggaggaccaggatgctgccttcttcaaggcctgggcaatatttaagggaaagtataaggagggggacacaggaggtccagctgtctggaagactcgcctgcgctgtgcactcaacaagagttctgaatttaaggaggttcctgagaggggccgcatggatgttgctgagccctacaaggtgtatcagttgctgccaccaggaatcgtctctggccagccagggactcagaaagtaccatcaaagcgacagcacagttctgtgtcctctgagaggaaggaggaagaggatgccatgcagaactgcacactcagtccctctgtgctccaggactccctcaataatgaggaggagggggccagtgggggagcagtccattcagacattgggagcagcagcagcagcagcagccctgagccacaggaagttacagacacaactgaggccccctttcaaggggatcagaggtccctggagtttctgcttcctccagagccagcaccaggtagggctgttctatccccagactactcactgctgctcaccttcatctacaacgggcgcgtggtgggcgaggcccaggtgcaaagcctggattgccgccttgtggctgagccctcaggctctgagagcagcatggagcaggtgctgt

SEQ ID NO: 143590 - DNA, 1856 bp, Homo sapiens
  Payload ID: 8360
  Gene Symbol: ISG20
  Gene Name: interferon stimulated exonuclease gene 20kDa
  Uniprot ID: Q96AZ6
  ENST ID: ENST00000306072
  CDS Start-End: 359-904
atccactccacgaacgtcaaatgcgtcatctgaggagggggagggccggggcaaaggaggggcaccctgacatggagcctgccagctccgtcagccctgactcggcccggagctgagctccccacctgccggtagcccaggagatggagcagcccagcccacgtgcccggccttccgcccctgacttcacttgataacaaactagaaactgaaacagggtcgggatgccgatgccggcttggagttagagatgagtcaccgctgagagcagctgcagtagctgagcagtggcagcagagaggcagacgtgagctgagggcgcagaggcaggcagcatctctgagggtccccaaggaacatggctgggagccgtgaggtggtggccatggactgcgagatggtggggctggggccccaccgggagagtggcctggctcgttgcagcctcgtgaacgtccacggtgctgtgctgtacgacaagttcatccggcctgagggagagatcaccgattacagaacccgggtcagcggggtcacccctcagcacatggtgggggccacaccatttgccgtggccaggctagagatcctgcagctcctgaaaggcaagctggtggtgggtcatgacctgaagcacgacttccaggcactgaaagaggacatgagcggctacacaatctacgacacgtccactgacaggctgttgtggcgtgaggccaagctggaccactgcaggcgtgtctccctgcgggtgctgagtgagcgcctcctacacaagagcatccagaacagcctgcttggacacagctcggtggaagatgcgagggcaacgatggagctctatcaaatctcccagagaatccgagcccgccgagggctgccccgcctggctgtgtcagactgaagccccatccagcccgttccgcagggactagaggctttcggctttttgggacagcaactaccttgcttttggaaaatacatttttaatagtaaagtggctctatattttctctacgccatcactgggtcctcttcttattcttctctccaagctgggttaacagtagacaggacccatttctgtgtgatgttaggagggaatgaagtcttatgctggggaggtgggcaagtatcaatttccttaatatcttgaatcctgtgggtccaaaatgtggcttggaaatctaagtagcatgtggcttaattactaatcccaccctttgctgttgcatcccagccctattcctggtgcatttatgcccagagaggtggcattatttcctggggtggcattcagctcctcttgagttggtgccacagcatttgtgggctttgaagcaaaggtacaggaaatgtcaagggtgccaccccggcaaccttgagcaagtcacccctcctatttgtaaaatgaggaaggaaaggtaacaaactgtggagtcagagagaagtaggttggaatcctctttgtcatttagtagctgtttgacctaaggtggtttactgaacttctcagtttctccatctgtaaaatgagaattctagcaactcgtagggtatttgtgagatgttgcaggcaaagcccccagcaccatgcctgtcctagcttaagcacccaccaggtgtcgataagtaattgttcttccctggactgcctgcacatctagggcaccccaggaagagtcaccgcactctgtttcggggctcggctctctgaggggagggcatcctgtatggggaggagggtctggaccagagctgtccctgatcgctagaatcaacggcagaattcttgttattttaataataattaataatttagtgcttccactaaataaaaatcattggaatggtg

SEQ ID NO: 143591 - DNA, 540 bp, Homo sapiens
  Payload ID: 8360
  Gene Symbol: ISG20
  Gene Name: interferon stimulated exonuclease gene 20kDa
  ENST ID: ENST00000379224
  CDS Start-End: 161-424
aaactagaaactgaaacagggtcgggatgccgatgccggcttggagttagagatgagtcaccgctgagagcagctgcagtagctgagcagtggcagcagagaggcagacgtgagctgagggcgcagaggcaggcagcatctctgagggtccccaaggaacatggctgggagccgtgaggtggtggccatggactgcgagatggtggggctggggccccaccgggagagtggcctggctcgttgcagcctcgtgaacgtccacggtgctgtgctgtacgacaagttcatccggcctgagggagagatcaccgattacagaacccgggtcagcggggtcacccctcagcacatggtgggggccacaccatttgccgtggccaggctagaggtccccttcccatcctctccaacggcagctgagtgaaagcaagctgactggcctgtgtgaccagagcagggcaggctgtccatgtgggaggcgaggcgaggaacgcggggctggggcagtcacagctgggcgcctgggctgctggaggcctg

SEQ ID NO: 143592 - DNA, 800 bp, Homo sapiens
  Payload ID: 8360
  Gene Symbol: ISG20
  Gene Name: interferon stimulated exonuclease gene 20kDa
  Uniprot ID: Q96AZ6
  ENST ID: ENST00000560741
  CDS Start-End: 165-710
tatggtcattacaggtggtcagctgtagctggatgtgtgccttgaaaggctgacaagtttgccctgagtgactcacctactgtcacctgatccaacaagatttgtgggcgtagcctgccgatgggtgacgccagttaaagcatctctgagggtccccaaggaacatggctgggagccgtgaggtggtggccatggactgcgagatggtggggctggggccccaccgggagagtggcctggctcgttgcagcctcgtgaacgtccacggtgctgtgctgtacgacaagttcatccggcctgagggagagatcaccgattacagaacccgggtcagcggggtcacccctcagcacatggtgggggccacaccatttgccgtggccaggctagagatcctgcagctcctgaaaggcaagctggtggtgggtcatgacctgaagcacgacttccaggcactgaaagaggacatgagcggctacacaatctacgacacgtccactgacaggctgttgtggcgtgaggccaagctggaccactgcaggcgtgtctccctgcgggtgctgagtgagcgcctcctacacaagagcatccagaacagcctgcttggacacagctcggtggaagatgcgagggcaacgatggagctctatcaaatctcccagagaatccgagcccgccgagggctgccccgcctggctgtgtcagactgaagccccatccagcccgttccgcagggactagaggctttcggctttttgggacagcaactaccttgcttttggaaaatacatttttaatag

SEQ ID NO: 143593 - DNA, 614 bp, Homo sapiens
  Payload ID: 8360
  Gene Symbol: ISG20
  Gene Name: interferon stimulated exonuclease gene 20kDa
  ENST ID: ENST00000559876
  CDS Start-End: 149-614
gaaacagggtcgggatgccgatgccggcttggagttagagatgagtcaccgctgagagcagctgcagtagctgagcagtggcagcagagaggcagacgtgagctgagggcgcagaggcaggcagcatctctgagggtccccaaggaacatggctgggagccgtgaggtggtggccatggactgcgagatggtggggctggggccccaccgggagagtggcctggctcgttgcagcctcgtgaacgtccacggtgctgtgctgtacgacaagttcatccggcctgagggagagatcaccgattacagaacccgggtcagcggggtcacccctcagcacatggtgggggccacaccatttgccgtggccaggctagaggcactgaaagaggacatgagcggctacacaatctacgacacgtccactgacaggctgttgtggcgtgaggccaagctggaccactgcaggcgtgtctccctgcgggtgctgagtgagcgcctcctacacaagagcatccagaacagcctgcttggacacagctcggtggaagatgcgagggcaacgatggagctctatcaaatctcccagagaatccgagcccgccgagggctgcccc

SEQ ID NO: 143594 - DNA, 3303 bp, Homo sapiens
  Payload ID: 8361
  Gene Symbol: ISG20L2
  Gene Name: interferon stimulated exonuclease gene 20kDa-like 2
  Uniprot ID: Q9H9L3
  ENST ID: ENST00000313146
  CDS Start-End: 784-1845
ttagctggacccgtctgggaggtaggtttgtgagcgtgagagatcgatctgtaccgcggggatccgaagtatgcttatccaggtgggctgcctcaagcctcgatcccacccccgcgctggtagatggtgtcaaggtccttgcgtgggagaaggacttgggtgagatgcatgcggagattgcccccaattccggcctggagccaagggaaagggatgcctggatttgtgtctctattggtggtccacgctgcggatgcctgggtagcccagaggttatctacgccatacttctcactgtttttgagcatacctagatgttcctttcctaggcggagtatagatcgcacgtgttctagcctcttagactcagagggttcgagctctataagcccctccactcccttcattttacaaatgagactcaaacctagagcgcggtaatgaccttactaagaccaaatggctggtgaattgggcttcactagaatccaggcttgctggctaacaccaatgctccctccatcatttcatgttatgttttcatttcccctctgtctgagagattgctctgatgtctttccttccataagtcctacggagatcgagcttacctcatttttctcccaggcctaggagctcaattaccaggatcactttcttccccagggtgtactacagacctccacatgttggacagtaggattcagcagagaatgagtcccacatcctcttttcatccataagccactcttcccaactactcttccgccttccattgtccctatgtctactttactgctcaatctggattttggggaacctcctcccaaaaaggcattagaaggaaatgccaagcaccgaaattttgtcaagaagcggaggctcttagaacggagaggctttctgagtaaaaagaaccaaccccctagcaaggcgcctaagttgcactctgaaccttcaaagaaaggggaaactcctacggtcgatggcacttggaagaccccttccttcccaaaaaagaagacagctgcttccagcaatgggtcaggacagcccctggacaagaaagctgcagtgtcttggttgacccctgccccttcaaaaaaggctgattctgttgctgctaaagtagatttgctgggggagttccagagtgcccttccaaagatcaatagccacccaacccgctctcagaagaagagctcccagaagaaatcctctaaaaagaaccatcctcagaagaatgccccacagaactccacccaagctcattcagagaataaatgctccggagcatcccagaagttgccacggaagatggtggcaattgactgtgagatggtgggcacaggaccaaaggggcatgttagttccttggctcgatgtagcattgtcaactacaacggagatgtgctttatgacgagtacattcttcccccctgccacattgtggactaccgaaccaggtggagtggtatccggaagcagcacatggtgaatgccacacccttcaagattgctcgaggccagatcttgaagatactcacagggaagatagtggtggggcatgccatccacaacgacttcaaagcccttcagtactttcaccccaagtccctcacccgtgacacctcccatatcccccccctcaaccggaaggctgactgcccggagaatgccaccatgtctctgaagcatctcaccaagaagctgctaaaccgggatatccaggttgggaagagcggacattcctctgtggaagatgcccaggccaccatggagctatataagttggttgaagtcgagtgggaagagcacctagcccggaatccccctacagactagtggcagtggggacgctggtgatatgaggaggcagaggcagcacccaggagaaacagggcagtggaccaatggacagctccaccagctccacatctttggaagctagatttggggagagagaagctctaccccagacttaatacccattgaaatttcacctcaggtgttgtgtcctgtgtctggttaagtgtcccatggaaggggaaagccttcacgtcagaacccaaccctataccttttacttcttaaatggtgctaaccacaggtgtcccagggtgctctgtgccagttaagatttttaactttcaaggggcagggcatactgggaaatgtagtttcccaaactgccttatcacttgggtggacatatgtctccttttatgccttttggtcttgagtaattaacagcatcctcttccacgctcagaagtgttctggttggggccaggcatggtggctcacacctgtagtcccaacacttagggaggccgaggcgggcggatcacctgagatcaggagttcaagaccagcctggccaacatggcgaattcccgttctctactaaaaatacaaaaaatgtgtggggtgtggtggcaggagcctgtaatcctagctactcaggaggctgaggcaggagaatcgcttgagcccaggaggcggagattgcagtgagccgagatcgtgtcactgcactccagcctgggtgacaagagtgagactccgtctccaaaaaaaaaaaaaaagaatttattaacctggttggttaataaattgtgtggtccctgccgggcgtggtggctcacgcctgtaatcccagcactttgggaggccgagacgggcagatcacgaggtcaggagatcgagaccatcctggctaacacggtgaaaccccgtctctactaaaaatacaaaaaattagccaggcgtggtggcgggcacctgtagttccagctacttgggaggctgaggcaggagaatggcgtgaacccaggaggcggagcttgcagtgagccgagattgtgccactgcactccagcctgggccacggccacagagcgagactctgtctcaaaaaaaaaaaaaaattaaaattgtgtggtccctttccatgtcacagagtctgcttttggctcagagtctgtatctagcctgtgtcaggatattgcctgttcttcccaccttgacttccagagcagccatcgctggtgagctttagttctccttagggttccaaggcattagaagtaagagtgtagcttggaaaccaacttctgtgatttaggaaagctgtctctttcctaaggtaatagggggtttatttcatttaggccccagttggtaggttttaaaataatttataaagtgttttaataatttggttgtcttttttaccttgctaaaccaagcctctaaaaactcaaattattcccttgataaatttttataatggaaaagcaa

SEQ ID NO: 143595 - DNA, 2310 bp, Homo sapiens
  Payload ID: 8361
  Gene Symbol: ISG20L2
  Gene Name: interferon stimulated exonuclease gene 20kDa-like 2
  Uniprot ID: Q9H9L3
  ENST ID: ENST00000368219
  CDS Start-End: 503-1564
gcgggccaagttccagttcccgccccttgccgtacactcctctcctcttacggaagtgaagccggaggtgtccggcgggctgcagttccggtttatcgcggccttcccacaccttcgcgttgtaccaccacggggctagaggggccggggagcgcatcccgcccccgcccccacccacgccgccccctcctccgccgccactgccgctcctcacacactcggaatcactggcctcactacctggggtcggggcggtgcgggtgtgcgcgcgccgacctctggcgcgttctaacccgcgcgcctgccttcccgggcttcgtcggcgcgcaccgatttccgcatccggctccggacgcttccggtcttagctggacccgtctgggagggtgtactacagacctccacatgttggacagtaggattcagcagagaatgagtcccacatcctcttttcatccataagccactcttcccaactactcttccgccttccattgtccctatgtctactttactgctcaatctggattttggggaacctcctcccaaaaaggcattagaaggaaatgccaagcaccgaaattttgtcaagaagcggaggctcttagaacggagaggctttctgagtaaaaagaaccaaccccctagcaaggcgcctaagttgcactctgaaccttcaaagaaaggggaaactcctacggtcgatggcacttggaagaccccttccttcccaaaaaagaagacagctgcttccagcaatgggtcaggacagcccctggacaagaaagctgcagtgtcttggttgacccctgccccttcaaaaaaggctgattctgttgctgctaaagtagatttgctgggggagttccagagtgcccttccaaagatcaatagccacccaacccgctctcagaagaagagctcccagaagaaatcctctaaaaagaaccatcctcagaagaatgccccacagaactccacccaagctcattcagagaataaatgctccggagcatcccagaagttgccacggaagatggtggcaattgactgtgagatggtgggcacaggaccaaaggggcatgttagttccttggctcgatgtagcattgtcaactacaacggagatgtgctttatgacgagtacattcttcccccctgccacattgtggactaccgaaccaggtggagtggtatccggaagcagcacatggtgaatgccacacccttcaagattgctcgaggccagatcttgaagatactcacagggaagatagtggtggggcatgccatccacaacgacttcaaagcccttcagtactttcaccccaagtccctcacccgtgacacctcccatatcccccccctcaaccggaaggctgactgcccggagaatgccaccatgtctctgaagcatctcaccaagaagctgctaaaccgggatatccaggttgggaagagcggacattcctctgtggaagatgcccaggccaccatggagctatataagttggttgaagtcgagtgggaagagcacctagcccggaatccccctacagactagtggcagtggggacgctggtgatatgaggaggcagaggcagcacccaggagaaacagggcagtggaccaatggacagctccaccagctccacatctttggaagctagatttggggagagagaagctctaccccagacttaatacccattgaaatttcacctcaggtgttgtgtcctgtgtctggttaagtgtcccatggaaggggaaagccttcacgtcagaacccaaccctataccttttacttcttaaatggtgctaaccacaggtgtcccagggtgctctgtgccagttaagatttttaactttcaaggggcagggcatactgggaaatgtagtttcccaaactgccttatcacttgggtggacatatgtctccttttatgccttttggtcttgagtaattaacagcatcctcttccacgctcagaagtgttctggttggggccaggcatggtggctcacacctgtagtcccaacacttagggaggccgaggcgggcggatcacctgagatcaggagttcaagaccagcctggccaacatggcgaattcccgttctctactaaaaatacaaaaaatgtgtggggtgtggtggcaggagcctgtaatcctagctactcaggaggctgaggcaggagaatcgcttgagcccaggaggcggagattgcagtgagccgagatcgtgtcactgcactccagcctgggtgacaagagtgagactccgtctccaaaaaaaaaaaaaaagaa

SEQ ID NO: 143596 - DNA, 863 bp, Homo sapiens
  Payload ID: 8362
  Gene Symbol: IFNA1
  Gene Name: interferon, alpha 1
  Uniprot ID: P01562
  ENST ID: ENST00000276927
  CDS Start-End: 55-624
caaggttcagagtcacccatctcagcaagcccagaagtatctgcaatatctacgatggcctcgccctttgctttactgatggtcctggtggtgctcagctgcaagtcaagctgctctctgggctgtgatctccctgagacccacagcctggataacaggaggaccttgatgctcctggcacaaatgagcagaatctctccttcctcctgtctgatggacagacatgactttggatttccccaggaggagtttgatggcaaccagttccagaaggctccagccatctctgtcctccatgagctgatccagcagatcttcaacctctttaccacaaaagattcatctgctgcttgggatgaggacctcctagacaaattctgcaccgaactctaccagcagctgaatgacttggaagcctgtgtgatgcaggaggagagggtgggagaaactcccctgatgaatgcggactccatcttggctgtgaagaaatacttccgaagaatcactctctatctgacagagaagaaatacagcccttgtgcctgggaggttgtcagagcagaaatcatgagatccctctctttatcaacaaacttgcaagaaagattaaggaggaaggaataacatctggtccaacatgaaaacaattcttattgactcatacaccaggtcacgctttcatgaattctgtcatttcaaagactctcacccctgctataactatgaccatgctgataaactgatttatctatttaaatatttatttaactattcataagatttaaattatttttgttcatataacgtcatgtgcacctttacactgtggttagtgtaataaaacatgttccttatatttactc

SEQ ID NO: 143597 - DNA, 640 bp, Homo sapiens
  Payload ID: 8362
  Gene Symbol: IFNA1
  Gene Name: interferon, alpha 1
  ENST ID: ENST00000613815
  CDS Start-End: 9-578
catctacaatggccttgactttttatttactggtggccctagtggtgctcagctacaagtcattcagctctctgggctgtgatctgcctcagactcacagcctgggtaacaggagggccttgatactcctggcacaaatgcgaagaatctctcctttctcctgcctgaaggacagacatgactttgaattcccccaggaggagtttgatgataaacagttccagaaggctcaagccatctctgtcctccatgagatgatccagcagaccttcaacctcttcagcacaaaggattcatctgctgcttgggatgaggacctcctagacaaattctgcaccgaactctaccagcagctgaatgacttggaagcctgtgtgatgcaggaggagagggtgggagaaactcccctgatgaatgcggactccatcttggctgtgaagaaatacttccgaagaatcactctctatctgacagagaagaaatacagcccttgtgcctgggaggttgtcagagcagaaatcatgagatccctctctttatcaacaaacttgcaagaaagattaaggaggaaggaataacatctggtccaacatgaaaacaattcttattgactcatacaccaggtcacgctttcatgaat

SEQ ID NO: 143598 - DNA, 963 bp, Homo sapiens
  Payload ID: 8363
  Gene Symbol: IFNA10
  Gene Name: interferon, alpha 10
  Uniprot ID: P01566
  ENST ID: ENST00000357374
  CDS Start-End: 47-616
caaggttatccatctcaagtagcctagcaatatttgcaacatcccaatggccctgtccttttctttacttatggccgtgctggtgctcagctacaaatccatctgttctctaggctgtgatctgcctcagacccacagcctgggtaataggagggccttgatactcctgggacaaatgggaagaatctctcctttctcctgcctgaaggacagacatgatttccgaatcccccaggaggagtttgatggcaaccagttccagaaggctcaagccatctctgtcctccatgagatgatccagcagaccttcaatctcttcagcacagaggactcatctgctgcttgggaacagagcctcctagaaaaattttccactgaactttaccagcaactgaatgacctggaagcatgtgtgatacaggaggttggggtggaagagactcccctgatgaatgaggactccatcctggctgtgaggaaatacttccaaagaatcactctttatctaatagagaggaaatacagcccttgtgcctgggaggttgtcagagcagaaatcatgagatccctctcgttttcaacaaacttgcaaaaaagattaaggaggaaggattgaaaactggttcaacatggcaatgatcctgattgactaatacattatctcacactttcatgagttcttccatttcaaagactcacttctataaccacgacgcgttgaatcaaaattttcaaatgttttcagcagtgtaaagaagtgtcgtgtatacctgtgcaggcactagtcctttacagatgaccattctgatgtctctgttcatcttttgtttaaatatttatttaattatttttaaaatttatgtaatatcatgagtcgctttacattgtggttaatgtaacaatatatgttcttcatatttagccaatatattaatttcctttttcattaaatttttactatac

SEQ ID NO: 143599 - DNA, 634 bp, Homo sapiens
  Payload ID: 8364
  Gene Symbol: IFNA13
  Gene Name: interferon, alpha 13
  Uniprot ID: P01562
  ENST ID: ENST00000449498
  CDS Start-End: 51-620
gttcagagtcacccatctcagcaagcccagaagcatctgcaatatctatgatggcctcgccctttgctttactgatggccctggtggtgctcagctgcaagtcaagctgctctctgggctgtgatctccctgagacccacagcctggataacaggaggaccttgatgctcctggcacaaatgagcagaatctctccttcctcctgtctgatggacagacatgactttggatttccccaggaggagtttgatggcaaccagttccagaaggctccagccatctctgtcctccatgagctgatccagcagatcttcaacctctttaccacaaaagattcatctgctgcttgggatgaggacctcctagacaaattctgcaccgaactctaccagcagctgaatgacttggaagcctgtgtgatgcaggaggagagggtgggagaaactcccctgatgaatgcggactccatcttggctgtgaagaaatacttccgaagaatcactctctatctgacagagaagaaatacagcccttgtgcctgggaggttgtcagagcagaaatcatgagatccctctctttatcaacaaacttgcaagaaagattaaggaggaaggaataacacctggtccaaca

SEQ ID NO: 143600 - DNA, 1539 bp, Homo sapiens
  Payload ID: 8364
  Gene Symbol: IFNA13
  Gene Name: interferon, alpha 13
  ENST ID: ENST00000610660
  CDS Start-End: 953-1525
agatctcaaagtcatatcatgagaggtgtcctctgcatacatatggtttgtcactggccatcttatagatattgcttatgtttgatccttagcatttctgtctgtgttgtgggctttgaaatgaaatataaataatttatattttaacaattctactgaagttgttcaacacatctatatttaggtcaagaattgaagaaaaaattcttcacactctctaggtgagtatctagcagctagtgaagttaaaaattttctcacatgcaacaaaattaaaagttaagtataataaaaataaatgataaaaatattttaaattattaagtctttatcagtttcaaataattcataaacattcattacttagctgtataatgtttatctagaaacattagataatgtttataatttgttaaatttcttatgtaatttaatacattacaatttatatcagtaaataaactatattgaagcccacaagcaaatttagttataaagttaagttaaatttgaatagcgtttaaatttaacttttatcttaaaattttcatttggttatttttaaacttgcattgaataaaatgattaaactttgtactttttgagtatagagatatacatatagtacacaaatagatagatattatatctgtgttattaaattttcacggtgggttcaattaggaaaaaaaatctaaaaagtctctgggaacaagatgggggagacaataatgaaaaacaaaatggttgagaaacacggctctaaactcatgtaaagagttcaagaaggaaagcaaaaacagaaatggaaagtggtccagaagcattaagaaagtggaaatcagtatgttccctatttaaggcatctgcaggaagcaaagccttcagagaacctagagcccaaggttcagagtcacccatctcagcaagcccagaagcatctgcaatatctatgatggcctcgccctttgctttactgatggccctggtggtgctcagctgcaagtcaagctgctctctgggctgtgatctccctgagacccacagcctggataacaggaggaccttgatgctcctggcacaaatgagcagaatctctccttcctcctgtctgatggacagacatgactttggatttccccaggaggagtttgatggcaaccagttccagaaggctccagccatctctgtcctccatgagctgatccagcagatcttcaacctctttaccacaaaagattcatctgctgcttgggatgaggacctcctagacaaattctgcaccgaactctaccagcagctgaatgacttggaagcctgtgtgatgcaggaggagagggtgggagaaactcccctgatgaatgcggactccatcttggctgtgaagaaatacttccgaagaatcactctctatctgacagagaagaaatacagcccttgtgcctgggaggttgtcagagcagaaatcatgagatccctctctttatcaacaaacttgcaagaaagattaaggaggaaggaataacacctggtccaaca

SEQ ID NO: 143601 - DNA, 990 bp, Homo sapiens
  Payload ID: 8365
  Gene Symbol: IFNA14
  Gene Name: interferon, alpha 14
  Uniprot ID: P01570
  ENST ID: ENST00000380222
  CDS Start-End: 57-626
ccaaggttcagtgttacccctcatcaaccagcccagcagcatcttcgggattcccaatggcattgccctttgctttaatgatggccctggtggtgctcagctgcaagtcaagctgctctctgggctgtaatctgtctcaaacccacagcctgaataacaggaggactttgatgctcatggcacaaatgaggagaatctctcctttctcctgcctgaaggacagacatgactttgaatttccccaggaggaatttgatggcaaccagttccagaaagctcaagccatctctgtcctccatgagatgatgcagcagaccttcaatctcttcagcacaaagaactcatctgctgcttgggatgagaccctcctagaaaaattctacattgaacttttccagcaaatgaatgacctggaagcctgtgtgatacaggaggttggggtggaagagactcccctgatgaatgaggactccatcctggctgtgaagaaatacttccaaagaatcactctttatctgatggagaagaaatacagcccttgtgcctgggaggttgtcagagcagaaatcatgagatccctctctttttcaacaaacttgcaaaaaagattaaggaggaaggattgaaaactggttcatcatggaaatgattctcattgactaatacatcatctcacactttcatgagttcttccatttcaaagactcacttctcctataaccaccacaagttgaatcaaaattttcaaatgttttcaggagtgtaaagaagcatcatgtatacctgtgcaggcactagtcctttacagatgaccatgctgatgtctcctttcatctatttatttaaatatttatttatttaactatttttattatttaaattattttttatgtaatatcatgtgtacctttacattgtggttaatataacaaatatgttcttcatatttagccaatatattaatttcctttttcattaaatttttactat

SEQ ID NO: 143602 - DNA, 939 bp, Homo sapiens
  Payload ID: 8366
  Gene Symbol: IFNA16
  Gene Name: interferon, alpha 16
  Uniprot ID: P05015
  ENST ID: ENST00000380216
  CDS Start-End: 7-576
atcccaatggccctgtccttttctttactgatggccgtgctggtgctcagctacaaatccatctgttctctgggctgtgatctgcctcagactcacagcctgggtaataggagggccttgatactcctggcacaaatgggaagaatctctcatttctcctgcctgaaggacagatatgatttcggattcccccaggaggtgtttgatggcaaccagttccagaaggctcaagccatctctgccttccatgagatgatccagcagaccttcaatctcttcagcacaaaggattcatctgctgcttgggatgagaccctcctagacaaattctacattgaacttttccagcaactgaatgacctagaagcctgtgtgacacaggaggttggggtggaagagattgccctgatgaatgaggactccatcctggctgtgaggaaatactttcaaagaatcactctttatctgatggggaagaaatacagcccttgtgcctgggaggttgtcagagcagaaatcatgagatccttctctttttcaacaaacttgcaaaaaggattaagaaggaaggattgaaaactcattcaacatggaaatgatcctcattgattaatacatcatctcacactttcatgagttcttccatttcaaagactcacttctataaccaccacaagttgaatcaaaattttcaaatgttttcaggagtgtaaagaagcatcgtgtttacctgtgcaggcactagtcctttacagatgaccatgctgatgtctctattcatctatttatttaaatatttatttatttaactatttttaaggtttaaatcatgttttatgtaatatcatgtgtacctttacattttgcttaatgtaacaatatatgttcttcatatttagttaatatattaacttccttttcattaaatttttactatac

SEQ ID NO: 143603 - DNA, 980 bp, Homo sapiens
  Payload ID: 8367
  Gene Symbol: IFNA17
  Gene Name: interferon, alpha 17
  Uniprot ID: P01571
  ENST ID: ENST00000413767
  CDS Start-End: 50-619
gttcaaggttacccatctcaagtagcctagcaacatttgcaacatcccaatggccctgtccttttctttactgatggccgtgctggtgctcagctacaaatccatctgttctctaggctgtgatctgcctcagacccacagcctgggtaataggagggccttgatactcctggcacaaatgggaagaatctctcctttctcctgcctgaaggacagacatgactttggacttccccaggaggagtttgatggcaaccagttccagaagactcaagccatctctgtcctccatgagatgatccagcagaccttcaatctcttcagcacagaggactcatctgctgcttgggaacagagcctcctagaaaaattttccactgaactttaccagcaactgaataacctggaagcatgtgtgatacaggaggttgggatggaagagactcccctgatgaatgaggactccatcctggctgtgaggaaatacttccaaagaatcactctttatctaacagagaagaaatacagcccttgtgcctgggaggttgtcagagcagaaatcatgagatctctctctttttcaacaaacttgcaaaaaatattaaggaggaaggattgaaaactggttcaacatggcaatgatcctgattgactaatacattatctcacactttcatgagttcctccatttcaaagactcacttctataaccaccacgagttgaatcaaaattttcaaatgttttcagcagtgtaaagaagcgtcgtgtatacctgtgcaggcactagtactttacagatgaccatgctgatgtctctgttcatctatttatttaaatatttatttaattatttttaagatttaaattatttttttatgtaatatcatgtgtacctttacattgtggtgaatgtaacaatatatgttcttcatatttagccaatatattaatttcctttttcattaaatttttactatac

SEQ ID NO: 143604 - DNA, 1135 bp, Homo sapiens
  Payload ID: 8368
  Gene Symbol: IFNA2
  Gene Name: interferon, alpha 2
  Uniprot ID: P01563
  ENST ID: ENST00000380206
  CDS Start-End: 60-626
gagcctaaggtttaggctcacccatttcaaccagtctagcagcatctgcaacatctacaatggccttgacctttgctttactggtggccctcctggtgctcagctgcaagtcaagctgctctgtgggctgtgatctgcctcaaacccacagcctgggtagcaggaggaccttgatgctcctggcacagatgaggagaatctctcttttctcctgcttgaaggacagacatgactttggatttccccaggaggagtttggcaaccagttccaaaaggctgaaaccatccctgtcctccatgagatgatccagcagatcttcaatctcttcagcacaaaggactcatctgctgcttgggatgagaccctcctagacaaattctacactgaactctaccagcagctgaatgacctggaagcctgtgtgatacagggggtgggggtgacagagactcccctgatgaaggaggactccattctggctgtgaggaaatacttccaaagaatcactctctatctgaaagagaagaaatacagcccttgtgcctgggaggttgtcagagcagaaatcatgagatctttttctttgtcaacaaacttgcaagaaagtttaagaagtaaggaatgaaaactggttcaacatggaaatgattttcattgattcgtatgccagctcacctttttatgatctgccatttcaaagactcatgtttctgctatgaccatgacacgatttaaatcttttcaaatgtttttaggagtattaatcaacattgtattcagctcttaaggcactagtcccttacagaggaccatgctgactgatccattatctatttaaatatttttaaaatattatttatttaactatttataaaacaacttatttttgttcatattatgtcatgtgcacctttgcacagtggttaatgtaataaaatatgttctttgtatttggtaaatttattttgtgttgttcattgaacttttgctatggaaacttttgtacttgtttattctttaaaatgaaattccaagcctaattgtgcaacctgattacagaataactggtacacttcatttatccatcaatattatattcaagatataagtaaaaataaactttctgtaaaccag

SEQ ID NO: 143605 - DNA, 1024 bp, Homo sapiens
  Payload ID: 8369
  Gene Symbol: IFNA21
  Gene Name: interferon, alpha 21
  Uniprot ID: P01568
  ENST ID: ENST00000380225
  CDS Start-End: 49-618
ttcaaggttacccatctcaagtagcctagcaatattggcaacatcccaatggccctgtccttttctttactgatggccgtgctggtgctcagctacaaatccatctgttctctgggctgtgatctgcctcagacccacagcctgggtaataggagggccttgatactcctggcacaaatgggaagaatctctcctttctcctgcctgaaggacagacatgactttggattcccccaggaggagtttgatggcaaccagttccagaaggctcaagccatctctgtcctccatgagatgatccagcagaccttcaatctcttcagcacaaaggactcatctgctacttgggaacagagcctcctagaaaaattttccactgaacttaaccagcagctgaatgacctggaagcctgcgtgatacaggaggttggggtggaagagactcccctgatgaatgtggactccatcctggctgtgaagaaatacttccaaagaatcactctttatctgacagagaagaaatacagcccttgtgcctgggaggttgtcagagcagaaatcatgagatccttctctttatcaaaaatttttcaagaaagattaaggaggaaggaatgaaacctgtttcaacatggaaatgatctgtattgactaatacaccagtccacacttctatgacttctgccatttcaaagactcatttctcctataaccaccgcatgagttgaatcaaaattttcagatcttttcaggagtgtaaggaaacatcatgtttacctgtgcaggcactagtcctttacagatgaccatgctgatagatctaattatctatctattgaaatatttatttatttattagatttaaattatttttgtccatgtaatattatgtgtacttttacattgtgttatatcaaaatatgttatttatatttagtcaatatattattttctttttattaatttttactattaaaacttcttatattatttgtttattctttaataaagaaataccaagccc

SEQ ID NO: 143606 - DNA, 978 bp, Homo sapiens
  Payload ID: 8370
  Gene Symbol: IFNA4
  Gene Name: interferon, alpha 4
  Uniprot ID: P05014
  ENST ID: ENST00000421715
  CDS Start-End: 141-710
acaactagggaatttagaaaatggaaattagtatgttcactatttaagacctatgcacagagcaaagtcttcagaaaacctagaggccgaagttcaaggttatccatctcaagtagcctagcaatatttgcaacatcccaatggccctgtccttttctttactgatggccgtgctggtgctcagctacaaatccatctgttctctgggctgtgatctgcctcagacccacagcctgggtaataggagggccttgatactcctggcacaaatgggaagaatctctcatttctcctgcctgaaggacagacatgatttcggattccccgaggaggagtttgatggccaccagttccagaaggctcaagccatctctgtcctccatgagatgatccagcagaccttcaatctcttcagcacagaggactcatctgctgcttgggaacagagcctcctagaaaaattttccactgaactttaccagcaactgaatgacctggaagcatgtgtgatacaggaggttggggtggaagagactcccctgatgaatgaggactccatcctggctgtgaggaaatacttccaaagaatcactctttatctaacagagaagaaatacagcccttgtgcctgggaggttgtcagagcagaaatcatgagatccctctcgttttcaacaaacttgcaaaaaagattaaggaggaaggattgaaacctggttcaacatggaaatgatcctgattgactaatacattatctcacactttcatgagttcttccatttcaaagactcacttctataaccaccacgagttgaatcaaaattttcaaatgttttcagcagtgtgaagaagcttggtgtatacctgtgcaggcactagtcctttacagatgacaatgctgatgtctctgttcatctatttatttaaatatttatttatttttaaaatttaaattattttttatgtgatatcatgagt

SEQ ID NO: 143607 - DNA, 567 bp, Homo sapiens
  Payload ID: 8370
  Gene Symbol: IFNA4
  Gene Name: interferon, alpha 4
  ENST ID: ENST00000619448
  CDS Start-End: 1-567
atggccctgtccttttctttactgatggccgtgctggtgctcagctacaaatccatctgttctctaggctgtgatctgcctcagacccacagcctgggtaataggagggccttgatactcctggcacaaatgggaagaatctctcctttctcctgcctgaaggacagacatgactttggacttccccaggaggagtttgatggcaaccagttccagaaggctcaagccatctctgtcctccatgagatgatccagcagaccttcaatctcttcagcacagaggactcatctgctgcttgggaacagagcctcctagaaaaattttccactgaactttaccagcaactgaatgacctggaagcatgtgtgatacaggaggttggggtggaagagactcccctgatgaatgaggactccatcctggctgtgaggaaatacttccaaagaatcactctttatctaacagagaagaaatacagcccttgtgcctgggaggttgtcagagcagaaatcatgagatccctctcgttttcaacaaacttgcaaaaaagattaaggaggaaggat

SEQ ID NO: 143608 - DNA, 987 bp, Homo sapiens
  Payload ID: 8371
  Gene Symbol: IFNA5
  Gene Name: interferon, alpha 5
  Uniprot ID: P01569
  ENST ID: ENST00000610521
  CDS Start-End: 57-626
cccaaggttcagggtcactcaatctcaacagcccagaagcatctgcaacctccccaatggccttgccctttgttttactgatggccctggtggtgctcaactgcaagtcaatctgttctctgggctgtgatctgcctcagacccacagcctgagtaacaggaggactttgatgataatggcacaaatgggaagaatctctcctttctcctgcctgaaggacagacatgactttggatttcctcaggaggagtttgatggcaaccagttccagaaggctcaagccatctctgtcctccatgagatgatccagcagaccttcaatctcttcagcacaaaggactcatctgctacttgggatgagacacttctagacaaattctacactgaactttaccagcagctgaatgacctggaagcctgtatgatgcaggaggttggagtggaagacactcctctgatgaatgtggactctatcctgactgtgagaaaatactttcaaagaatcaccctctatctgacagagaagaaatacagcccttgtgcatgggaggttgtcagagcagaaatcatgagatccttctctttatcagcaaacttgcaagaaagattaaggaggaaggaatgaaaactggttcaacatcgaaatgattctcattgactagtacaccatttcacacttcttgagttctgccgtttcaaatattaatttctgctatatccatgacttgagttgaatcaaaattttcaaacgtttcacacgtgttaagcaacacttctttagctccacagggacaaaatctttacagatgatcatgccaatctatctattctatctatttatctatctgtctgtcttctatctaatctatttaaatatttatttatttataagatttaaattattttaaattatgtttgttcaggtaatattacatccacctttactttgtggctaatataataaaatatgttctttatgttttgtc

SEQ ID NO: 143609 - DNA, 704 bp, Homo sapiens
  Payload ID: 8372
  Gene Symbol: IFNA6
  Gene Name: interferon, alpha 6
  ENST ID: ENST00000259555
  CDS Start-End: 67-639
agagaacctagagctgaaggttcagagtcacccatctcaacaagtccaacagcatctgcaacatctacaatggctttgccttttgctttactgatggccctggtggtgctcagctgcaagtcaagctgctctctggactgtgatctgcctcagacccacagcctgggtcacaggaggaccatgatgctcctggcacaaatgaggagaatctctcttttctcctgtctgaaggacagacatgacttcagatttccccaggaggagtttgatggcaaccagttccagaaggctgaagccatctctgtcctccatgaggtgattcagcagaccttcaacctcttcagcacaaaggactcatctgttgcttgggatgagaggcttctagacaaactctatactgaactttaccagcagctgaatgacctggaagcctgtgtgatgcaggaggtgtgggtgggagggactcccctgatgaatgaggactccatcctggctgtgagaaaatacttccaaagaatcactctctacctgacagagaaaaagtacagcccttgtgcctgggaggttgtcagagcagaaatcatgagatccttctcttcatcaagaaacttgcaagaaaggttaaggaggaaggaataagacctgatccaacacagaaacgactcccattgacgactacaccagcttgcactttcatgatctgc

SEQ ID NO: 143610 - DNA, 1544 bp, Homo sapiens
  Payload ID: 8372
  Gene Symbol: IFNA6
  Gene Name: interferon, alpha 6
  Uniprot ID: P05013
  ENST ID: ENST00000380210
  CDS Start-End: 492-1061
tgctcagagttaagttaaatgtcaaatttttaaaaatttaacttttagttaaattactttgccattcctaacagatcaagaaataataaaagtaaactttatgctttttcttttagtgtgcaaagtagacatacatacagtacataaggagatatacaatatatttgttattaaaatttaataaaaatttaatttcaattaagaaaaaaatttcttaaaagactctggaggcaggcaagagaagggagtgtcaataatgaccacatacacacacaaacacacacacaaaactggttgaaaaactactctatacccatgtagagagtaaataaatgaaagcaaaatcagacgtagaaagtaaattctgaaaatggaaactagtatgttccctatttaagacctacacataaagcaaggtcttcagagaacctagagctgaaggttcagagtcacccatctcaacaagtccaacagcatctgcaacatctacaatggctttgccttttgctttactgatggccctggtggtgctcagctgcaagtcaagctgctctctggactgtgatctgcctcagacccacagcctgggtcacaggaggaccatgatgctcctggcacaaatgaggagaatctctcttttctcctgtctgaaggacagacatgacttcagatttccccaggaggagtttgatggcaaccagttccagaaggctgaagccatctctgtcctccatgaggtgattcagcagaccttcaacctcttcagcacaaaggactcatctgttgcttgggatgagaggcttctagacaaactctatactgaactttaccagcagctgaatgacctggaagcctgtgtgatgcaggaggtgtgggtgggagggactcccctgatgaatgaggactccatcctggctgtgagaaaatacttccaaagaatcactctctacctgacagagaaaaagtacagcccttgtgcctgggaggttgtcagagcagaaatcatgagatccttctcttcatcaagaaacttgcaagaaaggttaaggaggaaggaataagacctgatccaacacagaaacgactcccattgacgactacaccagcttgcactttcatgatctgccattttaaagactcttgtttctgctataaccataccatgagttgaatcaaacgcgtcaagtattttcaagtgtgttaagcaacatcgtgttcagttgcacaggaactagtcccttacagatgactaagctgatggatctatttatctatttattaaatgtatatttatttgactataatatttaattttttgcccatataaaagcataaaatgtatacctttatattgttgataacataacaaaatatattttctatgtttagtcgatgtattattttgtttagtttattaaatatttactatagaaaacttcttggatttgtttattctctaaggagaaacaccaagccgattctccaacatgatttaaaaatgtatggttcaattcattgattcattgttattatactcaagttat

SEQ ID NO: 143611 - DNA, 737 bp, Homo sapiens
  Payload ID: 8373
  Gene Symbol: IFNA7
  Gene Name: interferon, alpha 7
  Uniprot ID: P01567
  ENST ID: ENST00000239347
  CDS Start-End: 41-610
tacccacctcaggtagcctagtgatatttgcaaaatcccaatggcccggtccttttctttactgatggtcgtgctggtactcagctacaaatccatctgctctctgggctgtgatctgcctcagacccacagcctgcgtaataggagggccttgatactcctggcacaaatgggaagaatctctcctttctcctgcttgaaggacagacatgaattcagattcccagaggaggagtttgatggccaccagttccagaagactcaagccatctctgtcctccatgagatgatccagcagaccttcaatctcttcagcacagaggactcatctgctgcttgggaacagagcctcctagaaaaattttccactgaactttaccagcaactgaatgacctggaagcatgtgtgatacaggaggttggggtggaagagactcccctgatgaatgaggacttcatcctggctgtgaggaaatacttccaaagaatcactctttatctaatggagaagaaatacagcccttgtgcctgggaggttgtcagagcagaaatcatgagatccttctctttttcaacaaacttgaaaaaaggattaaggaggaaggattgaaaactggttcatcatggaaatgattctcattgactaatgcatcatctcacactttcatgagttcttccatttcaaagactcacttctataaccaccacaagttgaatcaaaatttccaaatgttttc

SEQ ID NO: 143612 - DNA, 1039 bp, Homo sapiens
  Payload ID: 8374
  Gene Symbol: IFNA8
  Gene Name: interferon, alpha 8
  Uniprot ID: P32881
  ENST ID: ENST00000380205
  CDS Start-End: 31-600
accagctcagcagcatccacaacatctacaatggccttgactttttatttactggtggccctagtggtgctcagctacaagtcattcagctctctgggctgtgatctgcctcagactcacagcctgggtaacaggagggccttgatactcctggcacaaatgcgaagaatctctcctttctcctgcctgaaggacagacatgactttgaattcccccaggaggagtttgatgataaacagttccagaaggctcaagccatctctgtcctccatgagatgatccagcagaccttcaacctcttcagcacaaaggactcatctgctgctttggatgagacccttctagatgaattctacatcgaacttgaccagcagctgaatgacctggagtcctgtgtgatgcaggaagtgggggtgatagagtctcccctgatgtacgaggactccatcctggctgtgaggaaatacttccaaagaatcactctatatctgacagagaagaaatacagctcttgtgcctgggaggttgtcagagcagaaatcatgagatccttctctttatcaatcaacttgcaaaaaagattgaagagtaaggaatgagacctggtacaacacggaaatgattcttatagactaatacagcagctcacacttcgacaagttgtgctctttcaaagacccttgtttctgccaaaaccatgctatgaattgaatcaaatgtgtcaagtgttttcaggagtgttaagcaacatcctgttcagctgtatgggcactagtcccttacagatgaccatgctgatggatctattcatctatttatttaaatctttatttagttaactatctatagggcttaaattagttttgttcatattatattatgtgaacttttacattgtgaattgtgtaacaaaaacatgttctttatatttattattttgccttgtttattaaatttttactatagaaaaattctttatttattctttaaaattgaactccaaccctgattgtgcaaactgattaaagaatggatggt

SEQ ID NO: 143613 - DNA, 275 bp, Homo sapiens
  Payload ID: 8375
  Gene Symbol: IFI27
  Gene Name: interferon, alpha-inducible protein 27
  ENST ID: ENST00000555819
  CDS Start-End: 155-275
cggtgaggtcagcttcacattctcaggaactctccttctttggggagcctcagatgggaagggactcgagccccacctgtccctggactctggaatgtctggctgaagttgaggatctcttactctctaggccacggaattaacccgagcaggcatggaggcctctgctctcacctcatcagcagtgaccagtgtggccaaagtggtcagggtggcctctggctctgccgtagttttgcccctggccaggattgctacagttgtgattggaggag

SEQ ID NO: 143614 - DNA, 716 bp, Homo sapiens
  Payload ID: 8375
  Gene Symbol: IFI27
  Gene Name: interferon, alpha-inducible protein 27
  ENST ID: ENST00000616764
  CDS Start-End: 177-545
gggaacacatccaagcttaagacggtgaggtcagcttcacattctcaggaactctccttctttggggagcctcagatgggaagggactcgagccccacctgtccctggactctggaatgtctggctgaagttgaggatctcttactctctaggccacggaattaacccgagcaggcatggaggcctctgctctcacctcatcagcagtgaccagtgtggccaaagtggtcagggtggcctctggctctgccgtagttttgcccctggccaggattgctacagttgtgattggaggagttgtggccatggcggctgtgcccatggtgctcagtgccatgggcttcactgcggcgggaatcgcctcgtcctccatagcagccaagatgatgtccgcggcggccattgccaatgggggtggagttgcctcgggcagccttgtggctactctgcagtcactgggagcaactggactctccggattgaccaagttcatcctgggctccattgggtctgccattgcggctgtcattgcgaggttctactagctccctgcccctcgccctgcagagaagagaaccatgccaggggagaaggcacccagccatcctgacccagcgaggagccaactatcccaaatatacctggggtgaaatataccaaattctgcatctccagaggaaaataagaaataaagatgaattgttgcaactcttccc

SEQ ID NO: 143615 - DNA, 364 bp, Homo sapiens
  Payload ID: 8375
  Gene Symbol: IFI27
  Gene Name: interferon, alpha-inducible protein 27
  ENST ID: ENST00000618200
  CDS Start-End: 76-364
gcttaagacggtgaggtcagcttcacattctcaggaactctccttctttgggccacggaattaacccgagcaggcatggaggcctctgctctcacctcatcagcagtgaccagtgtggccaaagtggtcagggtggcctctggctctgccgtagttttgcccctggccaggattgctacagttgtgattggaggagttgtggccatggcggctgtgcccatggtgctcagtgccatgggcttcactgcggcgggaatcgcctcgtcctccatagcagccaagatgatgtccgcggcggccattgccaatgggggtggagttgcctcgggcagccttgtggctactctgcagtcactgggagcaa

SEQ ID NO: 143616 - DNA, 692 bp, Homo sapiens
  Payload ID: 8375
  Gene Symbol: IFI27
  Gene Name: interferon, alpha-inducible protein 27
  ENST ID: ENST00000614204
  CDS Start-End: 498-692
gggggtaagagacagtgagtgcccaaacacagcgtcctgtacagacagcttgggcgttgttctcagggaagactgcgcctcgaagatccttggaggaaaccaaagtgggctcccagccaggttcgctgcttctgtctctgtctctgtctcgttattctcaccgctccagccattaaggaagagcacaccggacccgaaggatgcagcatgtgacagaatctccttcctcgataaggctgaatgacattccaccggaggtatagaccacatttggttgatccattcacccatcagtggacacttgggctgcttccacctctcggctattgtgcatagtgctgctatgtacgtgggggcagtgcttcagtcggggtggagctgcttaaaaggcctgggatcacaccctttgggaacacatccaagcttaagacggtgaggtcagcttcacattctcaggaactctccttctttgggccacggaattaacccgagcaggcatggaggcctctgctctcacctcatcagcagtgaccagtgtggccaaagtggtcagggtggcctctggctctgccgtagttttgcccctggccaggattgctacagttgtgattggaggagttgtggccatggcggctgtgcccatggtgctcagtgccatgggcttcactgcggcgggaatcgcctcgtcctcc

SEQ ID NO: 143617 - DNA, 505 bp, Homo sapiens
  Payload ID: 8375
  Gene Symbol: IFI27
  Gene Name: interferon, alpha-inducible protein 27
  ENST ID: ENST00000618863
  CDS Start-End: 103-342
ggaacacatccaagcttaagacggtgaggtcagcttcacattctcaggaactctccttctttggccaggattgctacagttgtgattggaggagttgtggccatggcggctgtgcccatggtgctcagtgccatgggcttcactgcggcgggaatcgcctcgtcctccatagcagccaagatgatgtccgcggcggccattgccaatgggggtggagttgcctcgggcagccttgtggctactctgcagtcactgggagcaactggactctccggattgaccaagttcatcctgggctccattgggtctgccattgcggctgtcattgcgaggttctactagctccctgcccctcgccctgcagagaagagaaccatgccaggggagaaggcacccagccatcctgacccagcgaggagccaactatcccaaatatacctggggtgaaatataccaaattctgcatctccagaggaaaataagaaataaagatgaattgttgcaa

SEQ ID NO: 143618 - DNA, 719 bp, Homo sapiens
  Payload ID: 8375
  Gene Symbol: IFI27
  Gene Name: interferon, alpha-inducible protein 27
  ENST ID: ENST00000620066
  CDS Start-End: 189-548
ggcaggagctacccttcccgtggccccggaccttgggtgggctgtgggctcagggagcggaggggaggccttaagcatccactctctgcccggtgtttttgttctcatcagggagcctcagatgggaagggactcgagccccacctgtccctggactctggaatgccacggaattaacccgagcaggcatggaggcctctgctctcacctcatcagcagtgaccagtgtggccaaagtggtcagggtggcctctggctctgccgtagttttgcccctggccaggattgctacagttgtgattggaggagtggcggctgtgcccatggtgctcagtgccatgggcttcactgcggcgggaatcgcctcgtcctccatagcagccaagatgatgtccgcggcggccattgccaatgggggtggagttgcctcgggcagccttgtggctactctgcagtcactgggagcaactggactctccggattgaccaagttcatcctgggctccattgggtctgccattgcggctgtcattgcgaggttctactagctccctgcccctcgccctgcagagaagagaaccatgccaggggagaaggcacccagccatcctgacccagcgaggagccaactatcccaaatatacctggggtgaaatataccaaattctgcatctccagaggaaaataagaaataaagatgaattgttgcaactcttccc

SEQ ID NO: 143619 - DNA, 666 bp, Homo sapiens
  Payload ID: 8375
  Gene Symbol: IFI27
  Gene Name: interferon, alpha-inducible protein 27
  ENST ID: ENST00000614288
  CDS Start-End: 1-331
ccaggattgctacagttgtgattggaggagttgtggccatggcggctgtgcccatggtgctcagtgccatgggcttcactgcggcgggaatcgcctcgtcctccatagcagccaagatgatgtccgcggcggccattgccaatgggggtggagttgcctcgggcagccttgtggctactctgcagtcactggggtttctctgagggagatggaggagggagggaaggagcccaagccaggaacagtgcactcaggaagactcagcccgaagcagatttgctgggttacctggggcgtctcctcccctctggggtgcagcctccttccctgaagagcgaggctgcttctagctctggagttcaccatgggggttcatgcctgcagcagcctctccccaaacaaagaccccgagggagcaactggactctccggattgaccaagttcatcctgggctccattgggtctgccattgcggctgtcattgcgaggttctactagctccctgcccctcgccctgcagagaagagaaccatgccaggggagaaggcacccagccatcctgacccagcgaggagccaactatcccaaatatacctggggtgaaatataccaaattctgcatctccagaggaaaataagaaataaagatgaattgttgcaactct

SEQ ID NO: 143620 - DNA, 505 bp, Homo sapiens; identical to SEQ ID NO: 143617
  Payload ID: 8375
  Gene Symbol: IFI27
  Gene Name: interferon, alpha-inducible protein 27
  ENST ID: ENST00000615978
  CDS Start-End: 103-342

SEQ ID NO: 143621 - DNA, 227 bp, Homo sapiens
  Payload ID: 8375
  Gene Symbol: IFI27
  Gene Name: interferon, alpha-inducible protein 27
  ENST ID: ENST00000611954
  CDS Start-End: 48-227
acatccaagcttaagacggtgaggccacggaattaacccgagcaggcatggaggcctctgctctcacctcatcagcagtgaccagtgtggccaaagtggtcagggtggcctctggctctgccgtagttttgcccctggccaggattgctacagttgtgattggaggagttgtggccatggcggctgtgcccatggtgctcagtgccatgggcttcactgcggcggga

SEQ ID NO: 143622 - DNA, 725 bp, Homo sapiens
  Payload ID: 8375
  Gene Symbol: IFI27
  Gene Name: interferon, alpha-inducible protein 27
  ENST ID: ENST00000612813
  CDS Start-End: 189-557
ggcaggagctacccttcccgtggccccggaccttgggtgggctgtgggctcagggagcggaggggaggccttaagcatccactctctgcccggtgtttttgttctcatcagggagcctcagatgggaagggactcgagccccacctgtccctggactctggaatgccacggaattaacccgagcaggcatggaggcctctgctctcacctcatcagcagtgaccagtgtggccaaagtggtcagggtggcctctggctctgccgtagttttgcccctggccaggattgctacagttgtgattggaggagttgtggccatggcggctgtgcccatggtgctcagtgccatgggcttcactgcggcgggaatcgcctcgtcctccatagcagccaagatgatgtccgcggcggccattgccaatgggggtggagttgcctcgggcagccttgtggctactctgcagtcactgggagcaactggactctccggattgaccaagttcatcctgggctccattgggtctgccattgcggctgtcattgcgaggttctactagctccctgcccctcgccctgcagagaagagaaccatgccaggggagaaggcacccagccatcctgacccagcgaggagccaactatcccaaatatacctggggtgaaatataccaaattctgcatctccagaggaaaataagaaataaagatgaattgttgcaactctt

SEQ ID NO: 143623 - DNA, 644 bp, Homo sapiens
  Payload ID: 8375
  Gene Symbol: IFI27
  Gene Name: interferon, alpha-inducible protein 27
  ENST ID: ENST00000621160
  CDS Start-End: 108-476
ttaagacggtgaggtcagcttcacattctcaggaactctccttctttgggtctggctgaagttgaggatctcttactctctaggccacggaattaacccgagcaggcatggaggcctctgctctcacctcatcagcagtgaccagtgtggccaaagtggtcagggtggcctctggctctgccgtagttttgcccctggccaggattgctacagttgtgattggaggagttgtggccatggcggctgtgcccatggtgctcagtgccatgggcttcactgcggcgggaatcgcctcgtcctccatagcagccaagatgatgtccgcggcggccattgccaatgggggtggagttgcctcgggcagccttgtggctactctgcagtcactgggagcaactggactctccggattgaccaagttcatcctgggctccattgggtctgccattgcggctgtcattgcgaggttctactagctccctgcccctcgccctgcagagaagagaaccatgccaggggagaaggcacccagccatcctgacccagcgaggagccaactatcccaaatatacctggggtgaaatataccaaattctgcatctccagaggaaaataagaaataaagatgaattgttgcaactctt

SEQ ID NO: 143624 - DNA, 686 bp, Homo sapiens
  Payload ID: 8375
  Gene Symbol: IFI27
  Gene Name: interferon, alpha-inducible protein 27
  ENST ID: ENST00000612838
  CDS Start-End: 155-523
cggtgaggtcagcttcacattctcaggaactctccttctttggggagcctcagatgggaagggactcgagccccacctgtccctggactctggaatgtctggctgaagttgaggatctcttactctctaggccacggaattaacccgagcaggcatggaggcctctgctctcacctcatcagcagtgaccagtgtggccaaagtggtcagggtggcctctggctctgccgtagttttgcccctggccaggattgctacagttgtgattggaggagttgtggccatggcggctgtgcccatggtgctcagtgccatgggcttcactgcggcgggaatcgcctcgtcctccatagcagccaagatgatgtccgcggcggccattgccaatgggggtggagttgcctcgggcagccttgtggctactctgcagtcactgggagcaactggactctccggattgaccaagttcatcctgggctccattgggtctgccattgcggctgtcattgcgaggttctactagctccctgcccctcgccctgcagagaagagaaccatgccaggggagaaggcacccagccatcctgacccagcgaggagccaactatcccaaatatacctggggtgaaatataccaaattctgcatctccagaggaaaataagaaataaagatgaattgttgcaa

SEQ ID NO: 143625 - DNA, 599 bp, Homo sapiens
  Payload ID: 8375
  Gene Symbol: IFI27
  Gene Name: interferon, alpha-inducible protein 27
  ENST ID: ENST00000620396
  CDS Start-End: 95-433
gtcagcttcacattctcaggaactctccttctttgggtctggctgaagttgaggatctcttactctctaggccacggaattaacccgagcaggcatggaggcctctgctctcacctcatcagcagtgaccagtgtggccaaagtggtcagggtggcctctggctctgccgtagttttgcccctggttgtggccatggcggctgtgcccatggtgctcagtgccatgggcttcactgcggcgggaatcgcctcgtcctccatagcagccaagatgatgtccgcggcggccattgccaatgggggtggagttgcctcgggcagccttgtggctactctgcagtcactgggagcaactggactctccggattgaccaagttcatcctgggctccattgggtctgccattgcggctgtcattgcgaggttctactagctccctgcccctcgccctgcagagaagagaaccatgccaggggagaaggcacccagccatcctgacccagcgaggagccaactatcccaaatatacctggggtgaaatataccaaattctgcatctccagaggaaaataagaaataaagatgaattgttgcaactc

SEQ ID NO: 143626 - DNA, 644 bp, Homo sapiens; identical to SEQ ID NO: 143623
  Payload ID: 8375
  Gene Symbol: IFI27
  Gene Name: interferon, alpha-inducible protein 27
  ENST ID: ENST00000613997
  CDS Start-End: 108-476

SEQ ID NO: 143627 - DNA, 719 bp, Homo sapiens; identical to SEQ ID NO: 143618
  Payload ID: 8375
  Gene Symbol: IFI27
  Gene Name: interferon, alpha-inducible protein 27
  ENST ID: ENST00000618321
  CDS Start-End: 189-548

SEQ ID NO: 143628 - DNA, 692 bp, Homo sapiens; identical to SEQ ID NO: 143616
  Payload ID: 8375
  Gene Symbol: IFI27
  Gene Name: interferon, alpha-inducible protein 27
  ENST ID: ENST00000630123
  CDS Start-End: 498-692

SEQ ID NO: 143629 - DNA, 599 bp, Homo sapiens; identical to SEQ ID NO: 143625
  Payload ID: 8375
  Gene Symbol: IFI27
  Gene Name: interferon, alpha-inducible protein 27
  ENST ID: ENST00000626715
  CDS Start-End: 95-433

SEQ ID NO: 143630 - DNA, 725 bp, Homo sapiens; identical to SEQ ID NO: 143622
  Payload ID: 8375
  Gene Symbol: IFI27
  Gene Name: interferon, alpha-inducible protein 27
  ENST ID: ENST00000627111
  CDS Start-End: 189-557

SEQ ID NO: 143631 - DNA, 227 bp, Homo sapiens; identical to SEQ ID NO: 143621
  Payload ID: 8375
  Gene Symbol: IFI27
  Gene Name: interferon, alpha-inducible protein 27
  ENST ID: ENST00000631302
  CDS Start-End: 48-227

SEQ ID NO: 143632 - DNA, 666 bp, Homo sapiens; identical to SEQ ID NO: 143619
  Payload ID: 8375
  Gene Symbol: IFI27
  Gene Name: interferon, alpha-inducible protein 27
  ENST ID: ENST00000630342
  CDS Start-End: 1-331

SEQ ID NO: 143633 - DNA, 674 bp, Homo sapiens
  Payload ID: 8376
  Gene Symbol: IFI27L1
  Gene Name: interferon, alpha-inducible protein 27-like 1
  Uniprot ID: Q96BM0
  ENST ID: ENST00000393115
  CDS Start-End: 219-533
gcttggggcgctggcacctcctcttacagctttactcctgccagcttgggaaaaggccggagaaggtgaaattctgtgtgctccctccggcgagagactttgtcagctcccgcacagtaacctttattcaaaccagatcctgaataaagtcaaaactcaaccaacaggtggaagtccaagaatccgagtggaggctcaccgaggcgaaggggccaaccatgggaaaggagagtggatgggactcaggcagggctgctgtagcagctgtggtcggaggagttgtggctgtggggactgtgctcgtggcgctcagtgccatgggcttcacctcagtaggaatcgccgcatcctccatagcagccaagatgatgtctacagcagccattgccaacgggggcggagttgctgctggcagtctggtggctattctgcagtcagtgggggcagctggactctctgtgacatctaaagttatcgggggctttgctgggacagctcttggggcctggctgggttcacccccttccagctgaacaccacactgaggcagggagttggctctcttggtggagatgactttcctgggcctctggatgacaatcttccaaaggacaagtctcctactcccaaaactatttaaggaagcatgaaaaataaagatgctggttatcttc

SEQ ID NO: 143634 - DNA, 413 bp, Homo sapiens
  Payload ID: 8376
  Gene Symbol: IFI27L1
  Gene Name: interferon, alpha-inducible protein 27-like 1
  ENST ID: ENST00000557218
  CDS Start-End: 120-272
aggccggagaaggtgaaattctgtgtgctccctccggcgagagactttgtcagctcccgcacagtaacgtggaagtccaagaatccgagtggaggctcaccgaggcgaaggggccaaccatgggaaaggagagtggatgggactcaggcagggctgctgtagcagctgtggtcggaggaggggcagctggactctctgtgacatctaaagttatcgggggctttgctgggacagctcttggggcctggctgggttcacccccttccagctgaacaccacactgaggcagggagttggctctcttggtggagatgactttcctgggcctctggatgacaatcttccaaaggacaagtctcctactcccaaaactatttaaggaagcatgaaaaataaagatgctggttatcttc

SEQ ID NO: 143635 - DNA, 571 bp, Homo sapiens
  Payload ID: 8376
  Gene Symbol: IFI27L1
  Gene Name: interferon, alpha-inducible protein 27-like 1
  ENST ID: ENST00000554562
  CDS Start-End: 32-310
gtggaggctcaccgaggcgaaggggccaaccatgggaaaggagagtggatgggactcaggcagggctgctgtagcagctgtggtcggaggagttgtggctgtggggactgtgctcgtggcgctcagtgccatgggcttcacctcagtaggaatcgccgcatcctccatagcagccaagatgatgtctacagcagccattgccaacgggggcggagttgctgctggcagtctggtggctattctgcagtcagtgggtgagtgttctggacaggatgaccagagccaggagatgatccagccccgaggctgaaccagggaggcctctcctctccctgcaggggcagctggactctctgtgacatctaaagttatcgggggctttgctgggacagctcttggggcctggctgggttcacccccttccagctgaacaccacactgaggcagggagttggctctcttggtggagatgactttcctgggcctctggatgacaatcttccaaaggacaagtctcctactcccaaaactatttaaggaagcatgaaaaataaagatgctggttatcttc

SEQ ID NO: 143636 - DNA, 647 bp, Homo sapiens
  Payload ID: 8376
  Gene Symbol: IFI27L1
  Gene Name: interferon, alpha-inducible protein 27-like 1
  ENST ID: ENST00000553664
  CDS Start-End: 126-443
cctgccagcttgggaaaaggccggagaaggtgaaattctgtgtgctccctccggcgagagactttgtcagctcccgcacagtaactagcagaagcagagtcccaggatccatttcttacgttactatgcgagatgcagaaggtggaagtccaagaatccgagtggaggctcaccgaggcgaaggggccaaccatgggaaaggagagtggatgggactcaggcagggctgctgtagcagctgtggtcggaggagttgtggctgtggggactgtgctcgtggcgctcagtgccatgggcttcacctcagtaggaatcgccgcatcctccatagcagccaagatgatgtctacagcagccattgccaacgggggcggagttgctgctggcagtctggtggctattctgcagtcagtgggggcagctggactctctgtgacatctaaagttatcgggggctttgctgggacagctcttggggcctggctgggttcacccccttccagctgaacaccacactgaggcagggagttggctctcttggtggagatgactttcctgggcctctggatgacaatcttccaaaggacaagtctcctactcccaaaactatttaaggaagcatgaaaaataaagatgctggttatctt

SEQ ID NO: 143637 - DNA, 804 bp, Homo sapiens
  Payload ID: 8376
  Gene Symbol: IFI27L1
  Gene Name: interferon, alpha-inducible protein 27-like 1
  ENST ID: ENST00000556381
  CDS Start-End: 336-611
agctttactcctgccagcttgggaaaaggccggagaaggtgaaattctgtgtgctccctccggcgagagactttgtcagctcccgcacagtaacgtggaagtccaagaatccgagtggaggctcaccgaggcgaaggggccaaccatgggaaaggagagtggatgggactcagcaggaaggcttttggcctgagctgctgagaggatggattccgggttcagcagtgacttgggccagagcagaggcagagagacaagttaggaagctcctccagtcatcccactgagagacgcgggtggcttggtccgggactggagctgcagaagtatgagggatggtcagactggatatttctgaaggcagggctgctgtagcagctgtggtcggaggagttgtggctgtggggactgtgctcgtggcgctcagtgccatgggcttcacctcagtaggaatcgccgcatcctccatagcagccaagatgatgtctacagcagccattgccaacgggggcggagttgctgctggcagtctggtggctattctgcagtcagtgggtgagtgttctggacaggatgaccagagccaggagatgatccagccccgaggctgaaccagggaggcctctcctctccctgcaggggcagctggactctctgtgacatctaaagttatcgggggctttgctgggacagctcttggggcctggctgggttcacccccttccagctgaacaccacactgaggcagggagttggctctcttggtggagatgactttcctgggcctctggatgacaatcttcc

SEQ ID NO: 143638 - DNA, 629 bp, Homo sapiens
  Payload ID: 8376
  Gene Symbol: IFI27L1
  Gene Name: interferon, alpha-inducible protein 27-like 1
  ENST ID: ENST00000555341
  CDS Start-End: 345-629
tgggaaaaggccggagaaggtgaaattctgtgtgctccctccggcgagagactttgtcagctcccgcacagtaacatcctgaataaagtcaaaactcaaccaacaggtggaagtccaagaatccgagtggaggctcaccgaggcgaaggggccaaccatgggaaaggagagtggatgggactcaggaaggcttttggcctgagctgctgagaggatggattccgggttcagcagtgacttgggccagagcagaggcagagagacaagttaggaagctcctccagtcatcccactgagagacgcgggtggcttggtccgggactggagctgcagaagtatgagggatggtcagactggatatttctgaaggcagggctgctgtagcagctgtggtcggaggagttgtggctgtggggactgtgctcgtggcgctcagtgccatgggcttcacctcagtaggaatcgccgcatcctccatagcagccaagatgatgtctacagcagccattgccaacgggggcggagttgctgctggcagtctggtggctattctgcagtcagtgggggcagctggactctctgtgacatctaaagttatcgggggctttgctgggacagctcttggggcc

SEQ ID NO: 143639 - DNA, 406 bp, Homo sapiens
  Payload ID: 8376
  Gene Symbol: IFI27L1
  Gene Name: interferon, alpha-inducible protein 27-like 1
  ENST ID: ENST00000554544
  CDS Start-End: 146-265
ggagaaggtgaaattctgtgtgctccctccggcgagagactttgtcagctcccgcacagtaacatcctgaataaagtcaaaactcaaccaacaggtggaagtccaagaatccgagtggaggctcaccgaggcgaaggggccaaccatgggaaaggagagtggatgggactcaggggcagctggactctctgtgacatctaaagttatcgggggctttgctgggacagctcttggggcctggctgggttcacccccttccagctgaacaccacactgaggcagggagttggctctcttggtggagatgactttcctgggcctctggatgacaatcttccaaaggacaagtctcctactcccaaaactatttaaggaagcatgaaaaataaagatgctggttatcttc

SEQ ID NO: 143640 - DNA, 680 bp, Homo sapiens
  Payload ID: 8376
  Gene Symbol: IFI27L1
  Gene Name: interferon, alpha-inducible protein 27-like 1
  Uniprot ID: Q96BM0
  ENST ID: ENST00000555523
  CDS Start-End: 220-534
cctgattggctgcctcgcggaccgcagcagtgccggcgggagagctggcttggggcgctggcacctcctcttacagctttactcctgccagcttgggaaaaggccggagaaggtgaaattctgtgtgctccctccggcgagagactttgtcagctcccgcacagtaacgtggaagtccaagaatccgagtggaggctcaccgaggcgaaggggccaaccatgggaaaggagagtggatgggactcaggcagggctgctgtagcagctgtggtcggaggagttgtggctgtggggactgtgctcgtggcgctcagtgccatgggcttcacctcagtaggaatcgccgcatcctccatagcagccaagatgatgtctacagcagccattgccaacgggggcggagttgctgctggcagtctggtggctattctgcagtcagtgggggcagctggactctctgtgacatctaaagttatcgggggctttgctgggacagctcttggggcctggctgggttcacccccttccagctgaacaccacactgaggcagggagttggctctcttggtggagatgactttcctgggcctctggatgacaatcttccaaaggacaagtctcctactcccaaaactatttaaggaagcatgaaaaataaagatgctggttatcttctccta

SEQ ID NO: 143641 - DNA, 580 bp, Homo sapiens
  Payload ID: 8376
  Gene Symbol: IFI27L1
  Gene Name: interferon, alpha-inducible protein 27-like 1
  ENST ID: ENST00000557066
  CDS Start-End: 287-439
gaaattctgtgtgctccctccggcgagagactttgtcagctcccgcacagtaactcttcctgtgtgaggtccaagcaccctctcttggagtctggattgggacccctttccagtaatatactcctggtgaaccatgaaaggacgatattgaggagacccctgaactaaaggaaatagaccgcaacaccaattggctgactttggatcctgaataaagtcaaaactcaaccaacaggtggaagtccaagaatccgagtggaggctcaccgaggcgaaggggccaaccatgggaaaggagagtggatgggactcaggcagggctgctgtagcagctgtggtcggaggaggggcagctggactctctgtgacatctaaagttatcgggggctttgctgggacagctcttggggcctggctgggttcacccccttccagctgaacaccacactgaggcagggagttggctctcttggtggagatgactttcctgggcctctggatgacaatcttccaaaggacaagtctcctactcccaaaactatttaaggaagcatgaaaaataaagatgctggttatcttc

SEQ ID NO: 143642 - DNA, 615 bp, Homo sapiens
  Payload ID: 8376
  Gene Symbol: IFI27L1
  Gene Name: interferon, alpha-inducible protein 27-like 1
  ENST ID: ENST00000554166
  CDS Start-End: 336-615
agctttactcctgccagcttgggaaaaggccggagaaggtgaaattctgtgtgctccctccggcgagagactttgtcagctcccgcacagtaacgtggaagtccaagaatccgagtggaggctcaccgaggcgaaggggccaaccatgggaaaggagagtggatgggactcagcaggaaggcttttggcctgagctgctgagaggatggattccgggttcagcagtgacttgggccagagcagaggcagagagacaagttaggaagctcctccagtcatcccactgagagacgcgggtggcttggtccgggactggagctgcagaagtatgagggatggtcagactggatatttctgaaggcagggctgctgtagcagctgtggtcggaggagttgtggctgtggggactgtgctcgtggcgctcagtgccatgggcttcacctcagtaggaatcgccgcatcctccatagcagccaagatgatgtctacagcagccattgccaacgggggcggagttgctgctggcagtctggtggctattctgcagtcagtgggggcagctggactctctgtgacatctaaagttatcgggggctttgctgggacagctcttg

SEQ ID NO: 143643 - DNA, 674 bp, Homo sapiens; identical to SEQ ID NO: 143633
  Payload ID: 8376
  Gene Symbol: IFI27L1
  Gene Name: interferon, alpha-inducible protein 27-like 1
  Uniprot ID: Q96BM0
  ENST ID: ENST00000611681
  CDS Start-End: 219-533

SEQ ID NO: 143644 - DNA, 804 bp, Homo sapiens; identical to SEQ ID NO: 143637
  Payload ID: 8376
  Gene Symbol: IFI27L1
  Gene Name: interferon, alpha-inducible protein 27-like 1
  ENST ID: ENST00000629798
  CDS Start-End: 336-611

SEQ ID NO: 143645 - DNA, 680 bp, Homo sapiens; identical to SEQ ID NO: 143640
  Payload ID: 8376
  Gene Symbol: IFI27L1
  Gene Name: interferon, alpha-inducible protein 27-like 1
  Uniprot ID: Q96BM0
  ENST ID: ENST00000629591
  CDS Start-End: 220-534

SEQ ID NO: 143646 - DNA, 413 bp, Homo sapiens; identical to SEQ ID NO: 143634
  Payload ID: 8376
  Gene Symbol: IFI27L1
  Gene Name: interferon, alpha-inducible protein 27-like 1
  ENST ID: ENST00000628436
  CDS Start-End: 120-272

SEQ ID NO: 143647 - DNA, 406 bp, Homo sapiens; identical to SEQ ID NO: 143639
  Payload ID: 8376
  Gene Symbol: IFI27L1
  Gene Name: interferon, alpha-inducible protein 27-like 1
  ENST ID: ENST00000627633
  CDS Start-End: 146-265

SEQ ID NO: 143648 - DNA, 580 bp, Homo sapiens; identical to SEQ ID NO: 143641
  Payload ID: 8376
  Gene Symbol: IFI27L1
  Gene Name: interferon, alpha-inducible protein 27-like 1
  ENST ID: ENST00000627939
  CDS Start-End: 287-439

SEQ ID NO: 143649 - DNA, 629 bp, Homo sapiens; identical to SEQ ID NO: 143638
  Payload ID: 8376
  Gene Symbol: IFI27L1
  Gene Name: interferon, alpha-inducible protein 27-like 1
  ENST ID: ENST00000627570
  CDS Start-End: 345-629

SEQ ID NO: 143650 - DNA, 571 bp, Homo sapiens; identical to SEQ ID NO: 143635
  Payload ID: 8376
  Gene Symbol: IFI27L1
  Gene Name: interferon, alpha-inducible protein 27-like 1
  ENST ID: ENST00000626801
  CDS Start-End: 32-310

SEQ ID NO: 143651 - DNA, 615 bp, Homo sapiens; identical to SEQ ID NO: 143642
  Payload ID: 8376
  Gene Symbol: IFI27L1
  Gene Name: interferon, alpha-inducible protein 27-like 1
  ENST ID: ENST00000627505
  CDS Start-End: 336-615

SEQ ID NO: 143652 - DNA, 647 bp, Homo sapiens; identical to SEQ ID NO: 143636
  Payload ID: 8376
  Gene Symbol: IFI27L1
  Gene Name: interferon, alpha-inducible protein 27-like 1
  ENST ID: ENST00000625811
  CDS Start-End: 126-443

SEQ ID NO: 143653 - DNA, 511 bp, Homo sapiens
  Payload ID: 8377
  Gene Symbol: IFI27L2
  Gene Name: interferon, alpha-inducible protein 27-like 2
  Uniprot ID: Q9H2X8
  ENST ID: ENST00000238609
  CDS Start-End: 101-493
ctagggcagagtaggcgcgtccctactggatggagggggaagtaacaccccaagaacgctgtcatttcctgggccaagttgggacccggacggcctcaccatgatgaaacgggcagctgctgctgcagtgggaggagccctggcagtgggggctgtgcccgtggtgctcagtgccatgggcttcactggggcaggaatcgccgcgtcctccatagcagccaagatgatgtccgcagcagccattgccaacgggggtggtgtttctgcggggagcctggtggctactctgcagtccgtgggggcagctggactctccacatcatccaacatcctcctggcctctgttgggtcagtgttgggggcctgcttggggaattcaccttcttcttctctcccagctgaacccgaggctaaagaagatgaggcaagagaaaatgtaccccaaggtgaacctccaaaacccccactcaagtcagagaaacatgaggaataaaggtcacatgcagatgca

SEQ ID NO: 143654 - DNA, 556 bp, Homo sapiens
  Payload ID: 8377
  Gene Symbol: IFI27L2
  Gene Name: interferon, alpha-inducible protein 27-like 2
  ENST ID: ENST00000556727
  CDS Start-End: 229-546
atcagagccgtcaaagcctcccagactcacagaagtgtacactacaagggtgaattttactttgtgtaaatcacctacaccttaataaacttgactttttaaaaatcttgatgaaggatattaagcagcctggggaaatctaaatggttgattaactaaaaacgggcagctgctgctgcagtgggaggagccctggcagtgggggctgtgcccgtggtgctcagtgccatgggcttcactggggcaggaatcgccgcgtcctccatagcagccaagatgatgtccgcagcagccattgccaacgggggtggtgtttctgcggggagcctggtggctactctgcagtccgtgggggcagctggactctccacatcatccaacatcctcctggcctctgttgggtcagtgttgggggcctgcttggggaattcaccttcttcttctctcccagctgaacccgaggctaaagaagatgaggcaagagaaaatgtaccccaaggtgaacctccaaaacccccactcaagtcagagaaacatgaggaataaaggtcacatg

SEQ ID NO: 143655 - DNA, 511 bp, Homo sapiens; identical to SEQ ID NO: 143653
  Payload ID: 8377
  Gene Symbol: IFI27L2
  Gene Name: interferon, alpha-inducible protein 27-like 2
  Uniprot ID: Q9H2X8
  ENST ID: ENST00000619362
  CDS Start-End: 101-493

SEQ ID NO: 143656 - DNA, 556 bp, Homo sapiens; identical to SEQ ID NO: 143654
  Payload ID: 8377
  Gene Symbol: IFI27L2
  Gene Name: interferon, alpha-inducible protein 27-like 2
  ENST ID: ENST00000626155
  CDS Start-End: 229-546

SEQ ID NO: 143657 - DNA, 822 bp, Homo sapiens
  Payload ID: 8378
  Gene Symbol: IFI6
  Gene Name: interferon, alpha-inducible protein 6
  Uniprot ID: P09912
  ENST ID: ENST00000339145
  CDS Start-End: 89-505
gtgcccatctatcagcaggctccgggctgaagattgcttctcttctctcctccaaggtctagtgacggagcccgcgcgcggcgccaccatgcggcagaaggcggtatcgcttttcttgtgctacctgctgctcttcacttgcagtggggtggaggcaggtgagaatgcgggtaaggatgcaggtaagaaaaagtgctcggagagctcggacagcggctccgggttctggaaggccctgaccttcatggccgtcggaggaggactcgcagtcgccgggctgcccgcgctgggcttcaccggcgccggcatcgcggccaactcggtggctgcctcgctgatgagctggtctgcgatcctgaatgggggcggcgtgcccgccggggggctagtggccacgctgcagagcctcggggctggtggcagcagcgtcgtcataggtaatattggtgccctgatgggctacgccacccacaagtatctcgatagtgaggaggatgaggagtagccagcagctcccagaacctcttcttccttcttggcctaactcttccagttaggatctagaactttgcctttttttttttttttttttttttgagatgggttctcactatattgtccaggctagagtgcagtggctattcacagatgcgaacatagtacactgcagcctccaactcctagcctcaagtgatcctcctgtctcaacctcccaagtaggattacaagcatgcgccgacgatgcccagaatccagaactttgtctatcactctccccaacaacctagatgtgaaaacagaataaacttcacccagaaaaca

SEQ ID NO: 143658 - DNA, 841 bp, Homo sapiens
  Payload ID: 8378
  Gene Symbol: IFI6
  Gene Name: interferon, alpha-inducible protein 6
  Uniprot ID: P09912
  ENST ID: ENST00000361157
  CDS Start-End: 129-521
aaaagccagccttcagccggagaaccgtttactcgctgctgtgcccatctatcagcaggctccgggctgaagattgcttctcttctctcctccaaggtctagtgacggagcccgcgcgcggcgccaccatgcggcagaaggcggtatcgcttttcttgtgctacctgctgctcttcacttgcagtggggtggaggcaggtaagaaaaagtgctcggagagctcggacagcggctccgggttctggaaggccctgaccttcatggccgtcggaggaggactcgcagtcgccgggctgcccgcgctgggcttcaccggcgccggcatcgcggccaactcggtggctgcctcgctgatgagctggtctgcgatcctgaatgggggcggcgtgcccgccggggggctagtggccacgctgcagagcctcggggctggtggcagcagcgtcgtcataggtaatattggtgccctgatgggctacgccacccacaagtatctcgatagtgaggaggatgaggagtagccagcagctcccagaacctcttcttccttcttggcctaactcttccagttaggatctagaactttgcctttttttttttttttttttttttgagatgggttctcactatattgtccaggctagagtgcagtggctattcacagatgcgaacatagtacactgcagcctccaactcctagcctcaagtgatcctcctgtctcaacctcccaagtaggattacaagcatgcgccgacgatgcccagaatccagaactttgtctatcactctccccaacaacctagatgtgaaaacagaataaacttcacccagaaaacactt

SEQ ID NO: 143659 - DNA, 828 bp, Homo sapiens
  Payload ID: 8378
  Gene Symbol: IFI6
  Gene Name: interferon, alpha-inducible protein 6
  Uniprot ID: P09912
  ENST ID: ENST00000362020
  CDS Start-End: 109-513
agaaccgtttactcgctgctgtgcccatctatcagcaggctccgggctgaagattgcttctcttctctcctccaaggtctagtgacggagcccgcgcgcggcgccaccatgcggcagaaggcggtatcgcttttcttgtgctacctgctgctcttcacttgcagtggggtggaggcaggtgagaatgcgggtaagaaaaagtgctcggagagctcggacagcggctccgggttctggaaggccctgaccttcatggccgtcggaggaggactcgcagtcgccgggctgcccgcgctgggcttcaccggcgccggcatcgcggccaactcggtggctgcctcgctgatgagctggtctgcgatcctgaatgggggcggcgtgcccgccggggggctagtggccacgctgcagagcctcggggctggtggcagcagcgtcgtcataggtaatattggtgccctgatgggctacgccacccacaagtatctcgatagtgaggaggatgaggagtagccagcagctcccagaacctcttcttccttcttggcctaactcttccagttaggatctagaactttgcctttttttttttttttttttttttgagatgggttctcactatattgtccaggctagagtgcagtggctattcacagatgcgaacatagtacactgcagcctccaactcctagcctcaagtgatcctcctgtctcaacctcccaagtaggattacaagcatgcgccgacgatgcccagaatccagaactttgtctatcactctccccaacaacctagatgtgaaaacagaataaacttcacccagaaaa

SEQ ID NO: 143660 - DNA, 859 bp, Homo sapiens
  Payload ID: 8379
  Gene Symbol: IFNB1
  Gene Name: interferon, beta 1, fibroblast
  Uniprot ID: P01574
  ENST ID: ENST00000380232
  CDS Start-End: 95-658
ccatacccatggagaaaggacattctaactgcaacctttcgaagcctttgctctggcacaacaggtagtaggcgacactgttcgtgttgtcaacatgaccaacaagtgtctcctccaaattgctctcctgttgtgcttctccactacagctctttccatgagctacaacttgcttggattcctacaaagaagcagcaattttcagtgtcagaagctcctgtggcaattgaatgggaggcttgaatactgcctcaaggacaggatgaactttgacatccctgaggagattaagcagctgcagcagttccagaaggaggacgccgcattgaccatctatgagatgctccagaacatctttgctattttcagacaagattcatctagcactggctggaatgagactattgttgagaacctcctggctaatgtctatcatcagataaaccatctgaagacagtcctggaagaaaaactggagaaagaagatttcaccaggggaaaactcatgagcagtctgcacctgaaaagatattatgggaggattctgcattacctgaaggccaaggagtacagtcactgtgcctggaccatagtcagagtggaaatcctaaggaacttttacttcattaacagacttacaggttacctccgaaactgaagatctcctagcctgtgcctctgggactggacaattgcttcaagcattcttcaaccagcagatgctgtttaagtgactgatggctaatgtactgcatatgaaaggacactagaagattttgaaatttttattaaattatgagttatttttatttatttaaattttattttggaaaataaattatttttggtgcaaaagtca

SEQ ID NO: 143661 - DNA, 1475 bp, Homo sapiens
  Payload ID: 8380
  Gene Symbol: IFNE
  Gene Name: interferon, epsilon
  Uniprot ID: Q86WN2
  ENST ID: ENST00000448696
  CDS Start-End: 620-1246
cttagatattaaactgataggataagatataaaataatttaagattgctgatatatgttttaaaattaattatttgctcaagcatttgtgacaatttacagttctaattgaggttttaaatttagtagtttgtaggtattttaagttttgcccctgaattctttataggtgctgataagcctttggtaagttttactccatgaaagactattactgaaaaaaacgtaatctcaataaaagaactttaataagcttgactaaatatttagaaagcacattgtgttcagtgaaactttgtatataatgaatagaataataaaagattatgttggatgactagtctgtaattgcctcaaggaaagcatacaatgaataagttattttggtacttcctcaaaatagccaacacaatagggaaatggagaaaatgtactctgaacaccatgaaaagggaacctgaaaatctaatgtgtaaacttggagaaatgacattagaaaacgaaagcaacaaaagagaacactctccaaaataatctgagatgcatgaaaggcaaacattcactagagctggaatttccctaagtctatgcagggataagtagcatatttgaccttcaccatgattatcaagcacttctttggaactgtgttggtgctgctggcctctaccactatcttctctctagatttgaaactgattatcttccagcaaagacaagtgaatcaagaaagtttaaaactcttgaataagttgcaaaccttgtcaattcagcagtgtctaccacacaggaaaaactttctgcttcctcagaagtctttgagtcctcagcagtaccaaaaaggacacactctggccattctccatgagatgcttcagcagatcttcagcctcttcagggcaaatatttctctggatggttgggaggaaaaccacacggagaaattcctcattcaacttcatcaacagctagaatacctagaagcactcatgggactggaagcagagaagctaagtggtactttgggtagtgataaccttagattacaagttaaaatgtacttccgaaggatccatgattacctggaaaaccaggactacagcacctgtgcctgggccattgtccaagtagaaatcagccgatgtctgttctttgtgttcagtctcacagaaaaactgagcaaacaaggaagacccttgaacgacatgaagcaagagcttactacagagtttagaagcccgaggtaggtggagggactagaggacttctccagacatgattcttcatagagtggtaatacaatttatagtacaatcacattgctttgattttgtgtatatatatatttatctgtgttttaagattgtgcatattgaccacaattgtttttattttgtaatgtggctttatatattctatccattttaaattgtttgtatgtcaaaataaattcattaatatggttgattcttcaaa

SEQ ID NO: 143662 - DNA, 1218 bp, Homo sapiens
  Payload ID: 8381
  Gene Symbol: IFNG
  Gene Name: interferon, gamma
  Uniprot ID: P01579
  ENST ID: ENST00000229135
  CDS Start-End: 133-633
gtgcagcacattgttctgatcatctgaagatcagctattagaagagaaagatcagttaagtcctttggacctgatcagcttgatacaagaactactgatttcaacttctttggcttaattctctcggaaacgatgaaatatacaagttatatcttggcttttcagctctgcatcgttttgggttctcttggctgttactgccaggacccatatgtaaaagaagcagaaaaccttaagaaatattttaatgcaggtcattcagatgtagcggataatggaactcttttcttaggcattttgaagaattggaaagaggagagtgacagaaaaataatgcagagccaaattgtctccttttacttcaaactttttaaaaactttaaagatgaccagagcatccaaaagagtgtggagaccatcaaggaagacatgaatgtcaagtttttcaatagcaacaaaaagaaacgagatgacttcgaaaagctgactaattattcggtaactgacttgaatgtccaacgcaaagcaatacatgaactcatccaagtgatggctgaactgtcgccagcagctaaaacagggaagcgaaaaaggagtcagatgctgtttcgaggtcgaagagcatcccagtaatggttgtcctgcctgcaatatttgaattttaaatctaaatctatttattaatatttaacattatttatatggggaatatatttttagactcatcaatcaaataagtatttataatagcaacttttgtgtaatgaaaatgaatatctattaatatatgtattatttataattcctatatcctgtgactgtctcacttaatcctttgttttctgactaattaggcaaggctatgtgattacaaggctttatctcaggggccaactaggcagccaacctaagcaagatcccatgggttgtgtgtttatttcacttgatgatacaatgaacacttataagtgaagtgatactatccagttactgccggtttgaaaatatgcctgcaatctgagccagtgctttaatggcatgtcagacagaacttgaatgtgtcaggtgaccctgatgaaaacatagcatctcaggagatttcatgcctggtgcttccaaatattgttgacaactgtgactgtacccaaatggaaagtaactcatttgttaaaattatcaatatctaatatatatgaataaagtgtaagttcacaacta

SEQ ID NO: 143663 - DNA, 2867 bp, Homo sapiens
  Payload ID: 8382
  Gene Symbol: IFI16
  Gene Name: interferon, gamma-inducible protein 16
  Uniprot ID: Q16666
  ENST ID: ENST00000295809
  CDS Start-End: 256-2613
agaataggagcaagccagcactagtcagctaactaagtgactcaaccaaggccttttttccttgttatctttgcagatacttcattttcttagcgtttctggagattacaacatcctgcggttccgtttctgggaactttactgatttatctcccccctcacacaaataagcattgattcctgcatttctgaagatctcaagatctggactactgttgaaaaaatttccagtgaggctcacttatgtctgtaaagatgggaaaaaaatacaagaacattgttctactaaaaggattagaggtcatcaatgattatcattttagaatggttaagtccttactgagcaacgatttaaaacttaatttaaaaatgagagaagagtatgacaaaattcagattgctgacttgatggaagaaaagttccgaggtgatgctggtttgggcaaactaataaaaattttcgaagatataccaacgcttgaagacctggctgaaactcttaaaaaagaaaagttaaaagtaaaaggaccagccctatcaagaaagaggaagaaggaagtggatgctacttcacctgcaccctccacaagcagcactgtcaaaactgaaggagcagaggcaactcctggagctcagaaaagaaaaaaatcaaccaaagaaaaggctggacccaaagggagtaaggtgtccgaggaacagactcagcctccctctcctgcaggagccggcatgtccacagccatgggccgttccccatctcccaagacctcattgtcagctccacccaacagttcttcaactgagaacccgaaaacagtggccaaatgtcaggtaactcccagaagaaatgttctccaaaaacgcccagtgatagtgaaggtactgagtacaacaaagccatttgaatatgagaccccagaaatggagaaaaaaataatgtttcatgctacagtggctacacagacacagttcttccatgtgaaggttttaaacaccagcttgaaggagaaattcaatggaaagaaaatcatcatcatatcagattatttggaatatgatagtctcctagaggtcaatgaagaatctactgtatctgaagctggtcctaaccaaacgtttgaggttccaaataaaatcatcaacagagcaaaggaaactctgaagattgatattcttcacaaacaagcttcaggaaatattgtatatggggtatttatgctacataagaaaacagtaaatcagaagaccacaatctacgaaattcaggatgatagaggaaaaatggatgtagtggggacaggacaatgtcacaatatcccctgtgaagaaggagataagctccaacttttctgctttcgacttagaaaaaagaaccagatgtcaaaactgatttcagaaatgcatagttttatccagataaagaaaaaaacaaacccgagaaacaatgaccccaagagcatgaagctaccccaggaacagcgtcagcttccatatccttcagaggccagcacaaccttccctgagagccatcttcggactcctcagatgccaccaacaactccatccagcagtttcttcaccaagaaaagtgaagacacaatctccaaaatgaatgacttcatgaggatgcagatactgaaggaagggagtcattttccaggaccgttcatgaccagcataggcccagctgagagccatccccacactcctcagatgcctccatcaacaccaagcagcagtttcttaaccacgaaaagtgaagacacaatctccaaaatgaatgacttcatgaggatgcagatactgaaggaagggagtcattttccaggaccgttcatgaccagcataggcccagctgagagccatccccacactcctcagatgcctccatcaacaccaagcagcagtttcttaaccacgttgaaaccaagactgaagactgaacctgaagaagtttccatagaagacagtgcccagagtgacctcaaagaagtgatggtgctgaacgcaacagaatcatttgtatatgagcccaaagagcagaagaaaatgtttcatgccacagtggcaactgagaatgaagtcttccgagtgaaggtttttaatattgacctaaaggagaagttcaccccaaagaagatcattgccatagcaaattatgtttgccgcaatgggttcctggaggtatatcctttcacacttgtggctgatgtgaatgctgaccgaaacatggagatcccaaaaggattgattagaagtgccagcgtaactcctaaaatcaatcagctttgctcacaaactaaaggaagttttgtgaatggggtgtttgaggtacataagaaaaatgtaaggggtgaattcacttattatgaaatacaagataatacagggaagatggaagtggtggtgcatggacgactgaccacaatcaactgtgaggaaggagataaactgaaactcacctgctttgaattggcaccgaaaagtgggaataccggggagttgagatctgtaattcatagtcacatcaaggtcatcaagaccaggaaaaacaagaaagacatactcaatcctgattcaagtatggaaacttcaccagactttttcttctaaaatctggatgtcattgacgataatgtttatggagataaggtctaagtgcctaaaaaaatgtacatatacctggttgaaatacaacactatacatacacaccaccatatatactagctgttaatcctatggaatggggtattgggagtgcttttttaatttttcatagtttttttttaataaaatggcatattttgcatctacaacttctataatttgaaaaaataaataaacattatcttttttgtgaaaggaa

SEQ ID NO: 143664 - DNA, 2732 bp, Homo sapiens
  Payload ID: 8382
  Gene Symbol: IFI16
  Gene Name: interferon, gamma-inducible protein 16
  ENST ID: ENST00000340979
  CDS Start-End: 1749-2480
attgtttcctactccattttctctggggcaatagcagaataggagcaagccagcactagtcagctaactaagtgactcaaccaaggccttttttccttgttatctttgcagatacttcattttcttagcgtttctggagattacaacatcctgcggttccgtttctgggaactttactgatttatctcccccctcacacaaataagcattgattcctgcatttctgaagatctcaagatctggactactgttgaaaaaatttccagtgaggctcacttatgtctgtaaagatgggaaaaaaatacaagaacattgttctactaaaaggattagaggtcatcaatgattatcattttagaatggttaagtccttactgagcaacgatttaaaacttaatttaaaaatgagagaagagtatgacaaaattcagattgctgacttgatggaagaaaagttccgaggtgatgctggtttgggcaaactaataaaaattttcgaagatataccaacgcttgaagacctggctgaaactcttaaaaaagaaaagttaaaagtaaaaggaccagccctatcaagaaagaggaagaaggaagtggatgctacttcacctgcaccctccacaagcagcactgtcaaaactgaaggagcagaggcaactcctggagctcagaaaagaaaaaaatcaaccaaagaaaaggctggacccaaagggagtaaggtgtccgaggaacagactcagcctccctctcctgcaggagccggcatgtccacagccatgggccgttccccatctcccaagacctcattgtcagctccacccaacagttcttcaactgagaacccgaaaacagtggccaaatgtcaggtaactcccagaagaaatgttctccaaaaacgcccagtgatagtgaaggtactgagtacaacaaagccatttgaatatgagaccccagaaatggagaaaaaaataatgtttcatgctacagtggctacacagacacagttcttccatgtgaaggttttaaacaccagcttgaaggagaaattcaatggaaagaaaatcatcatcatatcagattatttggaatatgatagtctcctagaggtcaatgaagaatctactgtatctgaagctggtcctaaccaaacgtttgaggttccaaataaaatcatcaacagagcaaaggaaactctgaagattgatattcttcacaaacaagcttcaggaaatattgtatatggggtatttatgctacataagaaaacagtaaatcagaagaccacaatctacgaaattcaggatgatagaggaaaaatggatgtagtggggacaggacaatgtcacaatatcccctgtgaagaaggagataagctccaacttttctgctttcgacttagaaaaaagaaccagatgtcaaaactgatttcagaaatgcatagttttatccagataaagaaaaaaacaaacccgagaaacaatgaccccaagagcatgaagctaccccaggaacagcgtcagcttccatatccttcagaggccagcacaaccttccctgagagccatcttcggactcctcagatgccaccaacaactccatccagcagtttcttcaccaagaaaagtgaagacacaatctccaaaatgaatgacttcatgaggatgcagatactgaaggaagggagtcattttccaggaccgttcatgaccagcataggcccagctgagagccatccccacactcctcagatgcctccatcaacaccaagcagcagtttcttaaccacgttgaaaccaagactgaagactgaacctgaagaagtttccatagaagacagtgcccagagtgacctcaaagaagtgatggtgctgaacgcaacagaatcatttgtatatgagcccaaagagcagaagaaaatgtttcatgccacagtggcaactgagaatgaagtcttccgagtgaaggtttttaatattgacctaaaggagaagttcaccccaaagaagatcattgccatagcaaattatgtttgccgcaatgggttcctggaggtatatcctttcacacttgtggctgatgtgaatgctgaccgaaacatggagatcccaaaaggattgattagaagtgccagcgtaactcctaaaatcaatcagctttgctcacaaactaaaggaagttttgtgaatggggtgtttgaggtacataagacagtcactaggaaacttggcattttattagaaatacaagataatacagggaagatggaagtggtggtgcatggacgactgaccacaatcaactgtgaggaaggagataaactgaaactcacctgctttgaattggcaccgaaaagtgggaataccggggagttgagatctgtaattcatagtcacatcaaggtcatcaagaccaggaaaaacaagaaagacatactcaatcctgattcaagtatggaaacttcaccagactttttcttctaaaatctggatgtcattgacgataatgtttatggagataaggtctaagtgcctaaaaaaatgtacatatacctggttgaaatacaacactatacatacacaccaccatatatactagctgttaatcctatggaatggggtattgggagtgcttttttaatttttcatagtttttttttaataaaatggcatattttgcatctacaacttctataatttgaaaaaataaataaacattatcttttttgtgaaagg

SEQ ID NO: 143665 - DNA, 2609 bp, Homo sapiens
  Payload ID: 8382
  Gene Symbol: IFI16
  Gene Name: interferon, gamma-inducible protein 16
  Uniprot ID: Q16666
  ENST ID: ENST00000359709
  CDS Start-End: 173-2362
attttcttagcgtttctggagattacaacatcctgcggttccgtttctgggaactttactgatttatctcccccctcacacaaataagcattgattcctgcatttctgaagatctcaagatctggactactgttgaaaaaatttccagtgaggctcacttatgtctgtaaagatgggaaaaaaatacaagaacattgttctactaaaaggattagaggtcatcaatgattatcattttagaatggttaagtccttactgagcaacgatttaaaacttaatttaaaaatgagagaagagtatgacaaaattcagattgctgacttgatggaagaaaagttccgaggtgatgctggtttgggcaaactaataaaaattttcgaagatataccaacgcttgaagacctggctgaaactcttaaaaaagaaaagttaaaagtaaaaggaccagccctatcaagaaagaggaagaaggaagtggatgctacttcacctgcaccctccacaagcagcactgtcaaaactgaaggagcagaggcaactcctggagctcagaacccgaaaacagtggccaaatgtcaggtaactcccagaagaaatgttctccaaaaacgcccagtgatagtgaaggtactgagtacaacaaagccatttgaatatgagaccccagaaatggagaaaaaaataatgtttcatgctacagtggctacacagacacagttcttccatgtgaaggttttaaacaccagcttgaaggagaaattcaatggaaagaaaatcatcatcatatcagattatttggaatatgatagtctcctagaggtcaatgaagaatctactgtatctgaagctggtcctaaccaaacgtttgaggttccaaataaaatcatcaacagagcaaaggaaactctgaagattgatattcttcacaaacaagcttcaggaaatattgtatatggggtatttatgctacataagaaaacagtaaatcagaagaccacaatctacgaaattcaggatgatagaggaaaaatggatgtagtggggacaggacaatgtcacaatatcccctgtgaagaaggagataagctccaacttttctgctttcgacttagaaaaaagaaccagatgtcaaaactgatttcagaaatgcatagttttatccagataaagaaaaaaacaaacccgagaaacaatgaccccaagagcatgaagctaccccaggaacagcgtcagcttccatatccttcagaggccagcacaaccttccctgagagccatcttcggactcctcagatgccaccaacaactccatccagcagtttcttcaccaagaaaagtgaagacacaatctccaaaatgaatgacttcatgaggatgcagatactgaaggaagggagtcattttccaggaccgttcatgaccagcataggcccagctgagagccatccccacactcctcagatgcctccatcaacaccaagcagcagtttcttaaccacgaaaagtgaagacacaatctccaaaatgaatgacttcatgaggatgcagatactgaaggaagggagtcattttccaggaccgttcatgaccagcataggcccagctgagagccatccccacactcctcagatgcctccatcaacaccaagcagcagtttcttaaccacgttgaaaccaagactgaagactgaacctgaagaagtttccatagaagacagtgcccagagtgacctcaaagaagtgatggtgctgaacgcaacagaatcatttgtatatgagcccaaagagcagaagaaaatgtttcatgccacagtggcaactgagaatgaagtcttccgagtgaaggtttttaatattgacctaaaggagaagttcaccccaaagaagatcattgccatagcaaattatgtttgccgcaatgggttcctggaggtatatcctttcacacttgtggctgatgtgaatgctgaccgaaacatggagatcccaaaaggattgattagaagtgccagcgtaactcctaaaatcaatcagctttgctcacaaactaaaggaagttttgtgaatggggtgtttgaggtacataagaaaaatgtaaggggtgaattcacttattatgaaatacaagataatacagggaagatggaagtggtggtgcatggacgactgaccacaatcaactgtgaggaaggagataaactgaaactcacctgctttgaattggcaccgaaaagtgggaataccggggagttgagatctgtaattcatagtcacatcaaggtcatcaagaccaggaaaaacaagaaagacatactcaatcctgattcaagtatggaaacttcaccagactttttcttctaaaatctggatgtcattgacgataatgtttatggagataaggtctaagtgcctaaaaaaatgtacatatacctggttgaaatacaacactatacatacacaccaccatatatactagctgttaatcctatggaatggggtattgggagtgcttttttaatttttcatagtttttttttaataaaatggcatattttgcatctacaacttctataatttgaaaaaataaataaacattatcttttttgtg

SEQ ID NO: 143666 - DNA, 2734 bp, Homo sapiens
  Payload ID: 8382
  Gene Symbol: IFI16
  Gene Name: interferon, gamma-inducible protein 16
  Uniprot ID: Q16666
  ENST ID: ENST00000368131
  CDS Start-End: 291-2480
attgtttcctactccattttctctggggcaatagcagaataggagcaagccagcactagtcagctaactaagtgactcaaccaaggccttttttccttgttatctttgcagatacttcattttcttagcgtttctggagattacaacatcctgcggttccgtttctgggaactttactgatttatctcccccctcacacaaataagcattgattcctgcatttctgaagatctcaagatctggactactgttgaaaaaatttccagtgaggctcacttatgtctgtaaagatgggaaaaaaatacaagaacattgttctactaaaaggattagaggtcatcaatgattatcattttagaatggttaagtccttactgagcaacgatttaaaacttaatttaaaaatgagagaagagtatgacaaaattcagattgctgacttgatggaagaaaagttccgaggtgatgctggtttgggcaaactaataaaaattttcgaagatataccaacgcttgaagacctggctgaaactcttaaaaaagaaaagttaaaagtaaaaggaccagccctatcaagaaagaggaagaaggaagtggatgctacttcacctgcaccctccacaagcagcactgtcaaaactgaaggagcagaggcaactcctggagctcagaaaagaaaaaaatcaaccaaagaaaaggctggacccaaagggagtaaggtgtccgaggaacagactcagcctccctctcctgcaggagccggcatgtccacagccatgggccgttccccatctcccaagacctcattgtcagctccacccaacagttcttcaactgagaacccgaaaacagtggccaaatgtcaggtaactcccagaagaaatgttctccaaaaacgcccagtgatagtgaaggtactgagtacaacaaagccatttgaatatgagaccccagaaatggagaaaaaaataatgtttcatgctacagtggctacacagacacagttcttccatgtgaaggttttaaacaccagcttgaaggagaaattcaatggaaagaaaatcatcatcatatcagattatttggaatatgatagtctcctagaggtcaatgaagaatctactgtatctgaagctggtcctaaccaaacgtttgaggttccaaataaaatcatcaacagagcaaaggaaactctgaagattgatattcttcacaaacaagcttcaggaaatattgtatatggggtatttatgctacataagaaaacagtaaatcagaagaccacaatctacgaaattcaggatgatagaggaaaaatggatgtagtggggacaggacaatgtcacaatatcccctgtgaagaaggagataagctccaacttttctgctttcgacttagaaaaaagaaccagatgtcaaaactgatttcagaaatgcatagttttatccagataaagaaaaaaacaaacccgagaaacaatgaccccaagagcatgaagctaccccaggaacagcgtcagcttccatatccttcagaggccagcacaaccttccctgagagccatcttcggactcctcagatgccaccaacaactccatccagcagtttcttcaccaagaaaagtgaagacacaatctccaaaatgaatgacttcatgaggatgcagatactgaaggaagggagtcattttccaggaccgttcatgaccagcataggcccagctgagagccatccccacactcctcagatgcctccatcaacaccaagcagcagtttcttaaccacgttgaaaccaagactgaagactgaacctgaagaagtttccatagaagacagtgcccagagtgacctcaaagaagtgatggtgctgaacgcaacagaatcatttgtatatgagcccaaagagcagaagaaaatgtttcatgccacagtggcaactgagaatgaagtcttccgagtgaaggtttttaatattgacctaaaggagaagttcaccccaaagaagatcattgccatagcaaattatgtttgccgcaatgggttcctggaggtatatcctttcacacttgtggctgatgtgaatgctgaccgaaacatggagatcccaaaaggattgattagaagtgccagcgtaactcctaaaatcaatcagctttgctcacaaactaaaggaagttttgtgaatggggtgtttgaggtacataagaaaaatgtaaggggtgaattcacttattatgaaatacaagataatacagggaagatggaagtggtggtgcatggacgactgaccacaatcaactgtgaggaaggagataaactgaaactcacctgctttgaattggcaccgaaaagtgggaataccggggagttgagatctgtaattcatagtcacatcaaggtcatcaagaccaggaaaaacaagaaagacatactcaatcctgattcaagtatggaaacttcaccagactttttcttctaaaatctggatgtcattgacgataatgtttatggagataaggtctaagtgcctaaaaaaatgtacatatacctggttgaaatacaacactatacatacacaccaccatatatactagctgttaatcctatggaatggggtattgggagtgcttttttaatttttcatagtttttttttaataaaatggcatattttgcatctacaacttctataatttgaaaaaataaataaacattatcttttttgtgaaaggaa

SEQ ID NO: 143667 - DNA, 2704 bp, Homo sapiens
  Payload ID: 8382
  Gene Symbol: IFI16
  Gene Name: interferon, gamma-inducible protein 16
  Uniprot ID: Q16666
  ENST ID: ENST00000368132
  CDS Start-End: 265-2454
ggcaatagcagaataggagcaagccagcactagtcagctaactaagtgactcaaccaaggccttttttccttgttatctttgcagatacttcattttcttagcgtttctggagattacaacatcctgcggttccgtttctgggaactttactgatttatctcccccctcacacaaataagcattgattcctgcatttctgaagatctcaagatctggactactgttgaaaaaatttccagtgaggctcacttatgtctgtaaagatgggaaaaaaatacaagaacattgttctactaaaaggattagaggtcatcaatgattatcattttagaatggttaagtccttactgagcaacgatttaaaacttaatttaaaaatgagagaagagtatgacaaaattcagattgctgacttgatggaagaaaagttccgaggtgatgctggtttgggcaaactaataaaaattttcgaagatataccaacgcttgaagacctggctgaaactcttaaaaaagaaaagttaaaagtaaaaggaccagccctatcaagaaagaggaagaaggaagtggatgctacttcacctgcaccctccacaagcagcactgtcaaaactgaaggagcagaggcaactcctggagctcagaaaagaaaaaaatcaaccaaagaaaaggctggacccaaagggagtaaggtgtccgaggaacagactcagcctccctctcctgcaggagccggcatgtccacagccatgggccgttccccatctcccaagacctcattgtcagctccacccaacagttcttcaactgagaacccgaaaacagtggccaaatgtcaggtaactcccagaagaaatgttctccaaaaacgcccagtgatagtgaaggtactgagtacaacaaagccatttgaatatgagaccccagaaatggagaaaaaaataatgtttcatgctacagtggctacacagacacagttcttccatgtgaaggttttaaacaccagcttgaaggagaaattcaatggaaagaaaatcatcatcatatcagattatttggaatatgatagtctcctagaggtcaatgaagaatctactgtatctgaagctggtcctaaccaaacgtttgaggttccaaataaaatcatcaacagagcaaaggaaactctgaagattgatattcttcacaaacaagcttcaggaaatattgtatatggggtatttatgctacataagaaaacagtaaatcagaagaccacaatctacgaaattcaggatgatagaggaaaaatggatgtagtggggacaggacaatgtcacaatatcccctgtgaagaaggagataagctccaacttttctgctttcgacttagaaaaaagaaccagatgtcaaaactgatttcagaaatgcatagttttatccagataaagaaaaaaacaaacccgagaaacaatgaccccaagagcatgaagctaccccaggaacagcgtcagcttccatatccttcagaggccagcacaaccttccctgagagccatcttcggactcctcagatgccaccaacaactccatccagcagtttcttcaccaagaaaagtgaagacacaatctccaaaatgaatgacttcatgaggatgcagatactgaaggaagggagtcattttccaggaccgttcatgaccagcataggcccagctgagagccatccccacactcctcagatgcctccatcaacaccaagcagcagtttcttaaccacgttgaaaccaagactgaagactgaacctgaagaagtttccatagaagacagtgcccagagtgacctcaaagaagtgatggtgctgaacgcaacagaatcatttgtatatgagcccaaagagcagaagaaaatgtttcatgccacagtggcaactgagaatgaagtcttccgagtgaaggtttttaatattgacctaaaggagaagttcaccccaaagaagatcattgccatagcaaattatgtttgccgcaatgggttcctggaggtatatcctttcacacttgtggctgatgtgaatgctgaccgaaacatggagatcccaaaaggattgattagaagtgccagcgtaactcctaaaatcaatcagctttgctcacaaactaaaggaagttttgtgaatggggtgtttgaggtacataagaaaaatgtaaggggtgaattcacttattatgaaatacaagataatacagggaagatggaagtggtggtgcatggacgactgaccacaatcaactgtgaggaaggagataaactgaaactcacctgctttgaattggcaccgaaaagtgggaataccggggagttgagatctgtaattcatagtcacatcaaggtcatcaagaccaggaaaaacaagaaagacatactcaatcctgattcaagtatggaaacttcaccagactttttcttctaaaatctggatgtcattgacgataatgtttatggagataaggtctaagtgcctaaaaaaatgtacatatacctggttgaaatacaacactatacatacacaccaccatatatactagctgttaatcctatggaatggggtattgggagtgcttttttaatttttcatagtttttttttaataaaatggcatattttgcatctacaacttctataatttgaaaaaataaataaacattatcttttttgtgaaa

SEQ ID NO: 143668 - DNA, 2245 bp, Homo sapiens
  Payload ID: 8382
  Gene Symbol: IFI16
  Gene Name: interferon, gamma-inducible protein 16
  Uniprot ID: Q16666
  ENST ID: ENST00000448393
  CDS Start-End: 1-2022
atgggaaaaaaatacaagaacattgttctactaaaaggattagaggtcatcaatgattatcattttagaatggttaagtccttactgagcaacgatttaaaacttaatttaaaaatgagagaagagtatgacaaaattcagattgctgacttgatggaagaaaagttccgaggtgatgctggtttgggcaaactaataaaaattttcgaagatataccaacgcttgaagacctggctgaaactcttaaaaaagaaaagttaaaagtaaaaggaccagccctatcaagaaagaggaagaaggaagtggatgctacttcacctgcaccctccacaagcagcactgtcaaaactgaaggagcagaggcaactcctggagctcagaaaagaaaaaaatcaaccaaagaaaaggctggacccaaagggagtaaggtgtccgaggaacagactcagcctccctctcctgcaggagccggcatgtccacagccatgggccgttccccatctcccaagacctcattgtcagctccacccaacagttcttcaactgagaacccgaaaacagtggccaaatgtcaggtaactcccagaagaaatgttctccaaaaacgcccagtgatagtgaaggtactgagtacaacaaagccatttgaatatgagaccccagaaatggagaaaaaaataatgtttcatgctacagtggctacacagacacagttcttccatgtgaaggttttaaacaccagcttgaaggagaaattcaatggaaagaaaatcatcatcatatcagattatttggaatatgatagtctcctagaggtcaatgaagaatctactgtatctgaagctggtcctaaccaaacgtttgaggttccaaataaaatcatcaacagagcaaaggaaactctgaagattgatattcttcacaaacaagcttcaggaaatattgtatatggggtatttatgctacataagaaaacagtaaatcagaagaccacaatctacgaaattcaggatgatagaggaaaaatggatgtagtggggacaggacaatgtcacaatatcccctgtgaagaaggagataagctccaacttttctgctttcgacttagaaaaaagaaccagatgtcaaaactgatttcagaaatgcatagttttatccagataaagaaaaaaacaaacccgagaaacaatgaccccaagagcatgaagctaccccaggaacagcgtcagcttccatatccttcagaggccagcacaaccttccctgagagccatcttcggactcctcagatgccaccaacaactccatccagcagtttcttcaccaagttgaaaccaagactgaagactgaacctgaagaagtttccatagaagacagtgcccagagtgacctcaaagaagtgatggtgctgaacgcaacagaatcatttgtatatgagcccaaagagcagaagaaaatgtttcatgccacagtggcaactgagaatgaagtcttccgagtgaaggtttttaatattgacctaaaggagaagttcaccccaaagaagatcattgccatagcaaattatgtttgccgcaatgggttcctggaggtatatcctttcacacttgtggctgatgtgaatgctgaccgaaacatggagatcccaaaaggattgattagaagtgccagcgtaactcctaaaatcaatcagctttgctcacaaactaaaggaagttttgtgaatggggtgtttgaggtacataagaaaaatgtaaggggtgaattcacttattatgaaatacaagataatacagggaagatggaagtggtggtgcatggacgactgaccacaatcaactgtgaggaaggagataaactgaaactcacctgctttgaattggcaccgaaaagtgggaataccggggagttgagatctgtaattcatagtcacatcaaggtcatcaagaccaggaaaaacaagaaagacatactcaatcctgattcaagtatggaaacttcaccagactttttcttctaaaatctggatgtcattgacgataatgtttatggagataaggtctaagtgcctaaaaaaatgtacatatacctggttgaaatacaacactatacatacacaccaccatatatactagctgttaatcctatggaatggggtattgggagtgcttttttaatttttcatagtttttttttaataaaatggcatattttgcatctacaacttctataatttgaaaaaa

SEQ ID NO: 143669 - DNA, 761 bp, Homo sapiens
  Payload ID: 8382
  Gene Symbol: IFI16
  Gene Name: interferon, gamma-inducible protein 16
  ENST ID: ENST00000426592
  CDS Start-End: 260-761
actgtctgaaagactactcaggcgtgcactgcgaggtggagatctgacttctcttgttcccgcttaagactgcctcctgtatacttcattttcttagcgtttctggagattacaacatcctgcggttccgtttctgggaactttactgatttatctcccccctcacacaaataagcattgattcctgcatttctgaagatctcaagatctggactactgttgaaaaaatttccagtgaggctcacttatgtctgtaaagatgggaaaaaaatacaagaacattgttctactaaaaggattagaggtcatcaatgattatcattttagaatggttaagtccttactgagcaacgatttaaaacttaatttaaaaatgagagaagagtatgacaaaattcagattgctgacttgatggaagaaaagttccgaggtgatgctggtttgggcaaactaataaaaattttcgaagatataccaacgcttgaagacctggctgaaactcttaaaaaagaaaagttaaaagtaaaaggaccagccctatcaagaaagaggaagaaggaagtggatgctacttcacctgcaccctccacaagcagcactgtcaaaactgaaggagcagaggcaactcctggagctcagaaaagaaaaaaatcaaccaaagaaaaggctggacccaaagggagtaaggtgtccgaggaacagactcagcctccctctcctgcaggagccggcatgtccacagccatgggccgttccccat

SEQ ID NO: 143670 - DNA, 951 bp, Homo sapiens
  Payload ID: 8382
  Gene Symbol: IFI16
  Gene Name: interferon, gamma-inducible protein 16
  ENST ID: ENST00000447473
  CDS Start-End: 411-951
tttatttgacatcctggggttacagcacgctaaagggcacccactgtccttaacagagaaaaatacactgctgagcagaggattaaacagactcctcacactaccggaagttcagtgcattttccaggattttcaagtcttcgatgctgtcatgttgagagtccactatccacgtttgtttatccaggaataatgcagaaaatctgagcattcgtgaatctaatcattgagatacttcattttcttagcgtttctggagattacaacatcctgcggttccgtttctgggaactttactgatttatctcccccctcacacaaataagcattgattcctgcatttctgaagatctcaagatctggactactgttgaaaaaatttccagtgaggctcacttatgtctgtaaagatgggaaaaaaatacaagaacattgttctactaaaaggattagaggtcatcaatgattatcattttagaatggttaagtccttactgagcaacgatttaaaacttaatttaaaaatgagagaagagtatgacaaaattcagattgctgacttgatggaagaaaagttccgaggtgatgctggtttgggcaaactaataaaaattttcgaagatataccaacgcttgaagacctggctgaaactcttaaaaaagaaaagttaaaagtaaaaggaccagccctatcaagaaagaggaagaaggaagtggatgctacttcacctgcaccctccacaagcagcactgtcaaaactgaaggagcagaggcaactcctggagctcagaaaagaaaaaaatcaaccaaagaaaaggctggacccaaagggagtaaggtgtccgaggaacagactcagcctccctctcctgcaggagccggcatgtccacagccatgggccgttccccatctcccaagacctcattgtcagctccacccaacagttctt

SEQ ID NO: 143671 - DNA, 546 bp, Homo sapiens
  Payload ID: 8382
  Gene Symbol: IFI16
  Gene Name: interferon, gamma-inducible protein 16
  ENST ID: ENST00000567661
  CDS Start-End: 324-546
agtgcttgttcctgtcttgtgactgctggtctccttaaggccaggctgggctaatgcagtagagctagactaaagcacagctgaaccctcaagcaggaactgagagcaaattgtattgaaactgcttcagctgtcggagatcgtttatatgtcttccttttttctgcattggttgggaataaaattgaatctattccagtaaaaggaccagccctatcaagaaagaggaagaaggaagtggatgctacttcacctgcaccctccacaagcagcactgtcaaaactgaaggagcagaggcaactcctggagctcaggagccggcatgtccacagccatgggccgttccccatctcccaagacctcattgtcagctccacccaacagttcttcaactgagaacccgaaaacagtggccaaatgtcaggtaactcccagaagaaatgttctccaaaaacgcccagtgatagtgaaggtactgagtacaacaaagccatttgaatatgagaccccagaaatggagaaaaaaataatgtttcatgctacag

SEQ ID NO: 143672 - DNA, 1095 bp, Homo sapiens
  Payload ID: 8382
  Gene Symbol: IFI16
  Gene Name: interferon, gamma-inducible protein 16
  ENST ID: ENST00000474473
  CDS Start-End: 409-1095
agtgcttgttcctgtcttgtgactgctggtctccttaaggccaggctgggctaatgcagtagagctagactaaagcacagctgaaccctcaagcaggaactgagagcaaattgtattgaaactgcttcagctgtcggagatcgtttatatgtcttccttttttctgcattggttgggaataaaattgaatctattccagtaaaaggaccagccctatcaagaaagaggaagaaggaagtggatgctacttcacctgcaccctccacaagcagcactgtcaaaactgaaggagcagaggcaactcctggagctcagaaaagaaaaaaatcaaccaaagaaaaggctggacccaaagggagtaaggtgtccgaggaacagactcagcctccctctcctgcaggagccggcatgtccacagccatgggccgttccccatctcccaagacctcattgtcagctccacccaacagttcttcaactgagaacccgaaaacagtggccaaatgtcaggtaactcccagaagaaatgttctccaaaaacgcccagtgatagtgaaggtactgagtacaacaaagccatttgaatatgagaccccagaaatggagaaaaaaataatgtttcatgctacagtggctacacagacacagttcttccatgtgaaggttttaaacaccagcttgaaggagaaattcaatggaaagaaaatcatcatcatatcagattatttggaatatgatagtctcctagaggtcaatgaagaatctactgtatctgaagctggtcctaaccaaacgtttgaggttccaaataaaatcatcaacagagcaaaggaaactctgaagattgatattcttcacaaacaagcttcaggaaatattgtatatggggtatttatgctacataagaaaacagtaaatcagaagaccacaatctacgaaattcaggatgatagaggaaaaatggatgtagtggggacaggacaatgtcacaatatcccctgtgaagaaggagataagctccaacttttctgctttcgacttagaaaaaagaaccagatgtcaaaactgatttcagaaatgcatagttttatccag

SEQ ID NO: 143673 - DNA, 856 bp, Homo sapiens
  Payload ID: 8382
  Gene Symbol: IFI16
  Gene Name: interferon, gamma-inducible protein 16
  ENST ID: ENST00000566111
  CDS Start-End: 608-856
tcatcaacatgcattcccagaaatgccatgaaaggaaagaccaagtcttgactgagaaacggaccgggcagatgagggactcccacatatacctgtttcctgctcttcccgaagacattttgccacaagcatataattcagcttctgaaaaatacggtcttcctcactgcagacaccatgccagcgttttaaatcaagttggctactcgtgctgtttagagtatgcagtttgcctgtggcaatattaaactcatctggaagaaagcacttaaacctatccagttcctcatcggtgatgttatccaggctggttagcaagagtatctccttatatttactctccatctcacgacttttcagcttataagggatccaaactatgtaagattataccaccaaaagtgattcaacattcaaaatgaagcaagatacttcattttcttagcgtttctggagattacaacatcctgcggttccgtttctgggaactttactgatttatctcccccctcacacaaataagcattgattcctgcatttctgaagatctcaagatctggactactgttgaaaaaatttccagtgaggctcacttatgtctgtaaagatgggaaaaaaatacaagaacattgttctactaaaaggattagaggtcatcaatgattatcattttagaatggttaagtccttactgagcaacgatttaaaacttaatttaaaaatgagagaagagtatgacaaaattcagattgctgacttgatggaagaaaagttccgaggtgatgctggtttgggcaaactaataaaaattttcgaagatataccaacgcttgaagacctggctgaaactcttaaa

SEQ ID NO: 143674 - DNA, 1134 bp, Homo sapiens
  Payload ID: 8383
  Gene Symbol: IFI30
  Gene Name: interferon, gamma-inducible protein 30
  Uniprot ID: P13284
  ENST ID: ENST00000407280
  CDS Start-End: 176-928
gggtgggggtgggacactcagaggaaggagtggaggagggagagacgctggcccgggacccgaggggcgtgggcatcgggaggcgggcccgggttaggggcgggaccgccgcctggttaaaggcgcttatttcccaggcagccgctgcagtcgccacacctttgcccctgctgcgatgaccctgtcgccacttctgctgttcctgccaccgctgctgctgctgctggacgtccccacggcggcggtgcaggcgtcccctctgcaagcgttagacttctttgggaatgggccaccagttaactacaagacaggcaatctatacctgcgggggcccctgaagaagtccaatgcaccgcttgtcaatgtgaccctctactatgaagcactgtgcggtggctgccgagccttcctgatccgggagctcttcccaacatggctgttggtcatggagatcctcaatgtcacgctggtgccctacggaaacgcacaggaacaaaatgtcagtggcaggtgggagttcaagtgccagcatggagaagaggagtgcaaattcaacaaggtggaggcctgcgtgttggatgaacttgacatggagctagccttcctgaccattgtctgcatggaagagtttgaggacatggagagaagtctgccactatgcctgcagctctacgccccagggctgtcgccagacactatcatggagtgtgcaatgggggaccgcggcatgcagctcatgcacgccaacgcccagcggacagatgctctccagccaccacacgagtatgtgccctgggtcaccgtcaatgggaaacccttggaagatcagacccagctccttacccttgtctgccagttgtaccagggcaagaagccggatgtctgcccttcctcaaccagctccctcaggagtgtttgcttcaagtgatggccggtgagctgcggagagctcatggaaggcgagtgggaacccggctgcctgcctttttttctgatccagaccctcggcacctgctacttaccaactggaaaattttatgcatcccatgaagcccagatacacaaaattccaccccatgatcaagaatcctgctccactaagaatggtgctaaagtaaaactagtttaataagc

SEQ ID NO: 143675 - DNA, 411 bp, Homo sapiens
  Payload ID: 8383
  Gene Symbol: IFI30
  Gene Name: interferon, gamma-inducible protein 30
  ENST ID: ENST00000597802
  CDS Start-End: 97-411
cagcttctgctttccggcgtggctgtggtcaagcctgagtcagtcccacgggaccacggcagccgctgcagtcgccacacctttgcccctgctgcgatgaccctgtcgccacttctgctgttcctgccaccgctgctgctgctgctggacgtccccacggcggcggtgcaggcgtcccctctgcaagcgttagacttctttgggaatgggccaccagttaactacaagacaggcaatctatacctgcgggggcccctgaagaagtccaatgcaccgcttgtcaatgtgaccctctactatgaagcactgtgcggtggctgccgagccttcctgatccgggagctcttcccaacatggctgttggtcatggagatcctcaatgtcacgctggtgccctacggaaacgcacag

SEQ ID NO: 143676 - DNA, 1140 bp, Homo sapiens
  Payload ID: 8384
  Gene Symbol: IFNK
  Gene Name: interferon, kappa
  Uniprot ID: Q9P0W0
  ENST ID: ENST00000276943
  CDS Start-End: 24-647
ggattttttagcttgcaaaaaaaatgagcaccaaacctgatatgattcaaaagtgtttgtggcttgagatccttatgggtatattcattgctggcaccctatccctggactgtaacttactgaacgttcacctgagaagagtcacctggcaaaatctgagacatctgagtagtatgagcaattcatttcctgtagaatgtctacgagaaaacatagcttttgagttgccccaagagtttctgcaatacacccaacctatgaagagggacatcaagaaggccttctatgaaatgtccctacaggccttcaacatcttcagccaacacaccttcaaatattggaaagagagacacctcaaacaaatccaaataggacttgatcagcaagcagagtacctgaaccaatgcttggaggaagacaagaatgaaaatgaagacatgaaagaaatgaaagagaatgagatgaaaccctcagaagccagggtcccccagctgagcagcctggaactgaggagatatttccacaggatagacaatttcctgaaagaaaagaaatacagtgactgtgcctgggagattgtccgagtggaaatcagaagatgtttgtattacttttacaaatttacagctctattcaggaggaaataagaatcatctaccttcaagcaagaattaacagagattgtggctacgcaaatgcaccaaaaaagggtgaaatatatctgaaatgtacctggttctgcccttggaagccatttcctgctcatgccactaacagcatgctgccaaactgttcagattcaagattattccaagcgcagggcccaaatgttatagccaaagaaagtcttatgataaaagtgaggcaaatttcagccaagaagttagaagagatgtttaaaagaacaagaacaaattgtggatcatggtatatgcaggctatcagcagaaggatcagacaataaaatgagttagtgcaaaccatttagtaaaaataactatcagcagagttgttccagattaaaaatagtactacaagcttgtaaaggagttaggacatgcaagctactgagcataaaatatatacttgctatttttcatgactttctctaataaagtctttgcctgttctctctaataa

SEQ ID NO: 143677 - DNA, 857 bp, Homo sapiens
  Payload ID: 8385
  Gene Symbol: IFNL1
  Gene Name: interferon, lambda 1
  Uniprot ID: Q8IU54
  ENST ID: ENST00000333625
  CDS Start-End: 98-700
aattaccttttcactttacacacatcatcttggattgcccattttgcgtggctaaaaagcagagccatgccgctggggaagcagttgcgatttagccatggctgcagcttggaccgtggtgctggtgactttggtgctaggcttggccgtggcaggccctgtccccacttccaagcccaccacaactgggaagggctgccacattggcaggttcaaatctctgtcaccacaggagctagcgagcttcaagaaggccagggacgccttggaagagtcactcaagctgaaaaactggagttgcagctctcctgtcttccccgggaattgggacctgaggcttctccaggtgagggagcgccctgtggccttggaggctgagctggccctgacgctgaaggtcctggaggccgctgctggcccagccctggaggacgtcctagaccagccccttcacaccctgcaccacatcctctcccagctccaggcctgtatccagcctcagcccacagcagggcccaggccccggggccgcctccaccactggctgcaccggctccaggaggcccccaaaaaggagtccgctggctgcctggaggcatctgtcaccttcaacctcttccgcctcctcacgcgagacctcaaatatgtggccgatgggaacctgtgtctgagaacgtcaacccaccctgagtccacctgacaccccacaccttatttatgcgctgagccctactccttccttaatttatttcctctcaccctttatttatgaagctgcagccctgactgagacatagggctgagtttattgttttacttttatacattatgcacaaataaacaacaaggaattggaa

SEQ ID NO: 143678 - DNA, 737 bp, Homo sapiens
  Payload ID: 8386
  Gene Symbol: IFNL2
  Gene Name: interferon, lambda 2
  Uniprot ID: Q8IZJ0
  ENST ID: ENST00000331982
  CDS Start-End: 56-658
ccctgggtgacagcctcagagtgtttcttctgctgacaaagaccagagatcaggaatgaaactagacatgactggggactgcacgccagtgctggtgctgatggccgcagtgctgaccgtgactggagcagttcctgtcgccaggctccacggggctctcccggatgcaaggggctgccacatagcccagttcaagtccctgtctccacaggagctgcaggcctttaagagggccaaagatgccttagaagagtcgcttctgctgaaggactgcaggtgccactcccgcctcttccccaggacctgggacctgaggcagctgcaggtgagggagcgccccatggctttggaggctgagctggccctgacgctgaaggttctggaggccaccgctgacactgacccagccctggtggacgtcttggaccagccccttcacaccctgcaccatatcctctcccagttccgggcctgtatccagcctcagcccacggcagggcccaggacccggggccgcctccaccattggctgtaccggctccaggaggccccaaaaaaggagtcccctggctgcctcgaggcctctgtcaccttcaacctcttccgcctcctcacgcgagacctgaattgtgttgccagtggggacctgtgtgtctgaccctcccaccagtcatgcaacctgagattttatttataaattagccacttgtcttaatttattgccacccagtcgctat

SEQ ID NO: 143679 - DNA, 656 bp, Homo sapiens
  Payload ID: 8387
  Gene Symbol: IFNL3
  Gene Name: interferon, lambda 3
  Uniprot ID: Q8IZI9
  ENST ID: ENST00000413851
  CDS Start-End: 40-630
ctgcattccctcagctccctttctctctgtgacacagacatgaccggggactgcatgccagtgctggtgctgatggccgcagtgctgaccgtgactggagcagttcctgtcgccaggctccgcggggctctcccggatgcaaggggctgccacatagcccagttcaagtccctgtctccacaggagctgcaggcctttaagagggccaaagatgccttagaagagtcgcttctgctgaaggactgcaagtgccgctcccgcctcttccccaggacctgggacctgaggcagctgcaggtgagggagcgccccgtggctttggaggctgagctggccctgacgctgaaggttctggaggccaccgctgacactgacccagccctgggggatgtcttggaccagccccttcacaccctgcaccatatcctctcccagctccgggcctgtatccagcctcagcccacggcagggcccaggacccggggccgcctccaccattggctgcaccggctccaggaggccccaaaaaaggagtcccctggctgcctcgaggcctctgtcaccttcaacctcttccgcctcctcacgcgagacctgaattgtgttgccagcggggacctgtgtgtctgacccttccgccagtcatgcaacctgag

SEQ ID NO: 143680 - DNA, 734 bp, Homo sapiens
  Payload ID: 8387
  Gene Symbol: IFNL3
  Gene Name: interferon, lambda 3
  ENST ID: ENST00000613087
  CDS Start-End: 53-655
tgggtgacagcctcagagtgtttcttctgctgacaaagaccagagatcaggaatgaaactagacatgaccggggactgcatgccagtgctggtgctgatggccgcagtgctgaccgtgactggagcagttcctgtcgccaggctccgcggggctctcccggatgcaaggggctgccacatagcccagttcaagtccctgtctccacaggagctgcaggcctttaagagggccaaagatgccttagaagagtcgcttctgctgaaggactgcaagtgccgctcccgcctcttccccaggacctgggacctgaggcagctgcaggtgagggagcgccccgtggctttggaggctgagctggccctgacgctgaaggttctggaggccaccgctgacactgacccagccctgggggatgtcttggaccagccccttcacaccctgcaccatatcctctcccagctccgggcctgtatccagcctcagcccacggcagggcccaggacccggggccgcctccaccattggctgcaccggctccaggaggccccaaaaaaggagtcccctggctgcctcgaggcctctgtcaccttcaacctcttccgcctcctcacgcgagacctgaattgtgttgccagcggggacctgtgtgtctgacccttccgccagtcatgcaacctgagattttatttataaattagccacttggcttaatttattgtcacccagtcgctat

SEQ ID NO: 143681 - DNA, 1637 bp, Homo sapiens
  Payload ID: 8388
  Gene Symbol: IFNL4
  Gene Name: interferon, lambda 4 (gene/pseudogene)
  ENST ID: ENST00000606380
  CDS Start-End: 278-818
gttgcccaggtggagacggctctggacgcctcccaggggacagtggacggcagcacctgctgcagcacgaggcacagagggtgcactgcagacaggagtgagggcagaggccaaggcgaggagggggccggctcccactctctctcccactgtgtgtgctgtgccttcacgctccgagcattgccttccctgggatcctaacccaaggcggggggctggacgcgctggaccctctctttggcttccctgacgtctctcgcctgctgcagaagcagagatgcggccgagtgtctgggccgcagtggccgcggggctgtgggtcctgtgcacggtgatcgcagaaggccccccggcgctgcctgctctcgcactaccgctcgctggagccccggacgctggcggctgccaaggcgctgagggaccgctacgaggaagaggcgctgagctgggggcagcgcaactgctccttccgccccaggagggatcctccgcggccatcgtcctgcgctcggctccgccacgtggcccggggcatcgcggacgcccaggcagtgctcagcggcctgcaccgctcggagctgctccccggcgccggcccgatcctggagctgctggcggccgcggggagggatgtggcggcctgccttgagctggcacggccaggctcctccaggaaggtccccggggcccagaagaggcgtcacaaaccccggagagcggactcgcctcggtgccgcaaagccagcgtggtcttcaacctcctgcgcctgctcacgtgggagctccggctggctgcacactctgggccttgcctctgaccccgccccctctggcagcacggaaacctccacgccattggctgccgaaagcagctcctgtcgtccattgggctggccgggcgaggctctcagtcaatgggtgctgaggcacgaaaacttcttcgcagccttgggcctgacttggatccactgtctcagatataagaggagcgggtccttctacagggaagagaccacagttctccaggaagccacgatatttcctcggggtgcattgtacgaccctccaacggttgctgtggcaggaaaaaacttgagctctggaaaccgtggctgaccccaggcaacagggaccagttcctccttgtgtggttaccaggacacccccaacaccaggtcctaaccccggatttgtagccccacagccagctttgagattctgtgaatccgtgactcttggatccggcatctaagggacaccaatccatgagggatttggtagtgaaaggcccaagggtccttaaccgactgtggttctttggattcccttacgtgtgtttgtatttgtgaagttcctgtgcatttgctattctgtctcccggtttaaatttattgccagttatcaaagagtgttttgatcgcattggttgttttccgtatgatgattgtgaggtgcaccttacagcaaaaaaagaggccgagccagggactcaggtggcctgagtttcagttctgaccctgccagttaattacagtggaattcagggcaaattacttttctgagcctctgtttcctcacctataggatgggttagcatacttgccttgtggaggagtagtgtccgttgagatcacgtt

SEQ ID NO: 143682 - DNA, 1132 bp, Homo sapiens
  Payload ID: 8388
  Gene Symbol: IFNL4
  Gene Name: interferon, lambda 4 (gene/pseudogene)
  ENST ID: ENST00000616270
  CDS Start-End: 278-709
gttgcccaggtggagacggctctggacgcctcccaggggacagtggacggcagcacctgctgcagcacgaggcacagagggtgcactgcagacaggagtgagggcagaggccaaggcgaggagggggccggctcccactctctctcccactgtgtgtgctgtgccttcacgctccgagcattgccttccctgggatcctaacccaaggcggggggctggacgcgctggaccctctctttggcttccctgacgtctctcgcctgctgcagaagcagagatgcggccgagtgtctgggccgcagtggccgcggggctgtgggtcctgtgcacggtgatcgcagaaggccccccggcgctgcctgctctcgcactaccgctcgctggagccccggacgctggcggctgccaaggcgctgagggaccgctacgaggaagaggcgctgagctgggggcagcgcaactgctccttccgccccaggagggatcctccgcggccatcgcttctctgcatcctcaggcccacggcgagccccagcgctttgccaatctgtcctgcttagcggaaaaacccatccagaccggagtcgggtcctctgggtgtcctgaaatccgggctcgagtctgcggctgggagggccacgggcagatgcagagaggggcttcgtccttcgccttttccatttgcctcatgtcccacctccagctttgagattctgtgaatccgtgactcttggatccggcatctaagggacaccaatccatgagggatttggtagtgaaaggcccaagggtccttaaccgactgtggttctttggattcccttacgtgtgtttgtatttgtgaagttcctgtgcatttgctattctgtctcccggtttaaatttattgccagttatcaaagagtgttttgatcgcattggttgttttccgtatgatgattgtgaggtgcaccttacagcaaaaaaagaggccgagccagggactcaggtggcctgagtttcagttctgaccctgccagttaattacagtggaattcagggcaaattacttttctgagcctctgtttcctcacctataggatgggttagcatacttgccttgtggaggagtagtgtccgttgagatcacgtt

SEQ ID NO: 143683 - DNA, 1636 bp, Homo sapiens
  Payload ID: 8388
  Gene Symbol: IFNL4
  Gene Name: interferon, lambda 4 (gene/pseudogene)
  ENST ID: ENST00000610963
  CDS Start-End: 278-817
gttgcccaggtggagacggctctggacgcctcccaggggacagtggacggcagcacctgctgcagcacgaggcacagagggtgcactgcagacaggagtgagggcagaggccaaggcgaggagggggccggctcccactctctctcccactgtgtgtgctgtgccttcacgctccgagcattgccttccctgggatcctaacccaaggcggggggctggacgcgctggaccctctctttggcttccctgacgtctctcgcctgctgcagaagcagagatgcggccgagtgtctgggccgcagtggccgcggggctgtgggtcctgtgcacggtgatcgcagaagccccccggcgctgcctgctctcgcactaccgctcgctggagccccggacgctggcggctgccaaggcgctgagggaccgctacgaggaagaggcgctgagctgggggcagcgcaactgctccttccgccccaggagggatcctccgcggccatcgtcctgcgctcggctccgccacgtggcccggggcatcgcggacgcccaggcagtgctcagcggcctgcaccgctcggagctgctccccggcgccggcccgatcctggagctgctggcggccgcggggagggatgtggcggcctgccttgagctggcacggccaggctcctccaggaaggtccccggggcccagaagaggcgtcacaaaccccggagagcggactcgcctcggtgccgcaaagccagcgtggtcttcaacctcctgcgcctgctcacgtgggagctccggctggctgcacactctgggccttgcctctgaccccgccccctctggcagcacggaaacctccacgccattggctgccgaaagcagctcctgtcgtccattgggctggccgggcgaggctctcagtcaatgggtgctgaggcacgaaaacttcttcgcagccttgggcctgacttggatccactgtctcagatataagaggagcgggtccttctacagggaagagaccacagttctccaggaagccacgatatttcctcggggtgcattgtacgaccctccaacggttgctgtggcaggaaaaaacttgagctctggaaaccgtggctgaccccaggcaacagggaccagttcctccttgtgtggttaccaggacacccccaacaccaggtcctaaccccggatttgtagccccacagccagctttgagattctgtgaatccgtgactcttggatccggcatctaagggacaccaatccatgagggatttggtagtgaaaggcccaagggtccttaaccgactgtggttctttggattcccttacgtgtgtttgtatttgtgaagttcctgtgcatttgctattctgtctcccggtttaaatttattgccagttatcaaagagtgttttgatcgcattggttgttttccgtatgatgattgtgaggtgcaccttacagcaaaaaaagaggccgagccagggactcaggtggcctgagtttcagttctgaccctgccagttaattacagtggaattcagggcaaattacttttctgagcctctgtttcctcacctataggatgggttagcatacttgccttgtggaggagtagtgtccgttgagatcacgtt

SEQ ID NO: 143684 - DNA, 1421 bp, Homo sapiens
  Payload ID: 8388
  Gene Symbol: IFNL4
  Gene Name: interferon, lambda 4 (gene/pseudogene)
  ENST ID: ENST00000634680
  CDS Start-End: 278-602
gttgcccaggtggagacggctctggacgcctcccaggggacagtggacggcagcacctgctgcagcacgaggcacagagggtgcactgcagacaggagtgagggcagaggccaaggcgaggagggggccggctcccactctctctcccactgtgtgtgctgtgccttcacgctccgagcattgccttccctgggatcctaacccaaggcggggggctggacgcgctggaccctctctttggcttccctgacgtctctcgcctgctgcagaagcagagatgcggccgagtgtctgggccgcagtggccgcggggctgtgggtcctgtgcacggtgatcgcagaaggccccccggcgctgcctgctctcgcactaccgctcgctggagccccggacgctggcggctgccaaggcgctgagggaccgctaccttgagctggcacggccaggctcctccaggaaggtccccggggcccagaagaggcgtcacaaaccccggagagcggactcgcctcggtgccgcaaagccagcgtggtcttcaacctcctgcgcctgctcacgtgggagctccggctggctgcacactctgggccttgcctctgaccccgccccctctggcagcacggaaacctccacgccattggctgccgaaagcagctcctgtcgtccattgggctggccgggcgaggctctcagtcaatgggtgctgaggcacgaaaacttcttcgcagccttgggcctgacttggatccactgtctcagatataagaggagcgggtccttctacagggaagagaccacagttctccaggaagccacgatatttcctcggggtgcattgtacgaccctccaacggttgctgtggcaggaaaaaacttgagctctggaaaccgtggctgaccccaggcaacagggaccagttcctccttgtgtggttaccaggacacccccaacaccaggtcctaaccccggatttgtagccccacagccagctttgagattctgtgaatccgtgactcttggatccggcatctaagggacaccaatccatgagggatttggtagtgaaaggcccaagggtccttaaccgactgtggttctttggattcccttacgtgtgtttgtatttgtgaagttcctgtgcatttgctattctgtctcccggtttaaatttattgccagttatcaaagagtgttttgatcgcattggttgttttccgtatgatgattgtgaggtgcaccttacagcaaaaaaagaggccgagccagggactcaggtggcctgagtttcagttctgaccctgccagttaattacagtggaattcagggcaaattacttttctgagcctctgtttcctcacctataggatgggttagcatacttgccttgtggaggagtagtgtccgttgagatcacgtt

SEQ ID NO: 143685 - DNA, 1493 bp, Homo sapiens
  Payload ID: 8388
  Gene Symbol: IFNL4
  Gene Name: interferon, lambda 4 (gene/pseudogene)
  ENST ID: ENST00000634967
  CDS Start-End: 278-674
gttgcccaggtggagacggctctggacgcctcccaggggacagtggacggcagcacctgctgcagcacgaggcacagagggtgcactgcagacaggagtgagggcagaggccaaggcgaggagggggccggctcccactctctctcccactgtgtgtgctgtgccttcacgctccgagcattgccttccctgggatcctaacccaaggcggggggctggacgcgctggaccctctctttggcttccctgacgtctctcgcctgctgcagaagcagagatgcggccgagtgtctgggccgcagtggccgcggggctgtgggtcctgtgcacggtgatcgcagaaggccccccggcgctgcctgctctcgcactaccgctcgctggagccccggacgctggcggctgccaaggcgctgagggaccgctacgaggaagaggcgctgagctgggggcagcgcaactgctccttccgccccaggagggatcctccgcggccatcgcttgagctggcacggccaggctcctccaggaaggtccccggggcccagaagaggcgtcacaaaccccggagagcggactcgcctcggtgccgcaaagccagcgtggtcttcaacctcctgcgcctgctcacgtgggagctccggctggctgcacactctgggccttgcctctgaccccgccccctctggcagcacggaaacctccacgccattggctgccgaaagcagctcctgtcgtccattgggctggccgggcgaggctctcagtcaatgggtgctgaggcacgaaaacttcttcgcagccttgggcctgacttggatccactgtctcagatataagaggagcgggtccttctacagggaagagaccacagttctccaggaagccacgatatttcctcggggtgcattgtacgaccctccaacggttgctgtggcaggaaaaaacttgagctctggaaaccgtggctgaccccaggcaacagggaccagttcctccttgtgtggttaccaggacacccccaacaccaggtcctaaccccggatttgtagccccacagccagctttgagattctgtgaatccgtgactcttggatccggcatctaagggacaccaatccatgagggatttggtagtgaaaggcccaagggtccttaaccgactgtggttctttggattcccttacgtgtgtttgtatttgtgaagttcctgtgcatttgctattctgtctcccggtttaaatttattgccagttatcaaagagtgttttgatcgcattggttgttttccgtatgatgattgtgaggtgcaccttacagcaaaaaaagaggccgagccagggactcaggtggcctgagtttcagttctgaccctgccagttaattacagtggaattcagggcaaattacttttctgagcctctgtttcctcacctataggatgggttagcatacttgccttgtggaggagtagtgtccgttgagatcacgtt

SEQ ID NO: 143686 - DNA, 4549 bp, Homo sapiens
  Payload ID: 8389
  Gene Symbol: IFNLR1
  Gene Name: interferon, lambda receptor 1
  Uniprot ID: Q8IU57
  ENST ID: ENST00000327535
  CDS Start-End: 14-1576
cggcaggaaggccatggcggggcccgagcgctggggccccctgctcctgtgcctgctgcaggccgctccagggaggccccgtctggcccctccccagaatgtgacgctgctctcccagaacttcagcgtgtacctgacatggctcccagggcttggcaacccccaggatgtgacctattttgtggcctatcagagctctcccacccgtagacggtggcgcgaagtggaagagtgtgcgggaaccaaggagctgctatgttctatgatgtgcctgaagaaacaggacctgtacaacaagttcaagggacgcgtgcggacggtttctcccagctccaagtccccctgggtggagtccgaatacctggattacctttttgaagtggagccggccccacctgtcctggtgctcacccagacggaggagatcctgagtgccaatgccacgtaccagctgcccccctgcatgcccccactggatctgaagtatgaggtggcattctggaaggagggggccggaaacaagaccctatttccagtcactccccatggccagccagtccagatcactctccagccagctgccagcgaacaccactgcctcagtgccagaaccatctacacgttcagtgtcccgaaatacagcaagttctctaagcccacctgcttcttgctggaggtcccagaagccaactgggctttcctggtgctgccatcgcttctgatactgctgttagtaattgccgcagggggtgtgatctggaagaccctcatggggaacccctggtttcagcgggcaaagatgccacgggccctggacttttctggacacacacaccctgtggcaacctttcagcccagcagaccagagtccgtgaatgacttgttcctctgtccccaaaaggaactgaccagaggggtcaggccgacgcctcgagtcagggccccagccacccaacagacaagatggaagaaggaccttgcagaggacgaagaggaggaggatgaggaggacacagaagatggcgtcagcttccagccctacattgaaccaccttctttcctggggcaagagcaccaggctccagggcactcggaggctggtggggtggactcagggaggcccagggctcctctggtcccaagcgaaggctcctctgcttgggattcttcagacagaagctgggccagcactgtggactcctcctgggacagggctgggtcctctggctatttggctgagaaggggccaggccaagggccgggtggggatgggcaccaagaatctctcccaccacctgaattctccaaggactcgggtttcctggaagagctcccagaagataacctctcctcctgggccacctggggcaccttaccaccggagccgaatctggtccctgggggacccccagtttctcttcagacactgaccttctgctgggaaagcagccctgaggaggaagaggaggcgagggaatcagaaattgaggacagcgatgcgggcagctggggggctgagagcacccagaggaccgaggacaggggccggacattggggcattacatggccaggtgagctgtcccccgacatcccaccgaatctgatgctgctgctgcctttgcaaggactactgggcttcccaagaaactcaagagcctccgtacctcccctgggcggcggaggggcattgcacttccgggaagtccacctagcggctgtttgcctgtcgggctgagcaacaagatgcccctccctcctgtgacccgccctctttaggctgagctataagaggggtggacacagggtgggctgaggtcagaggttggtggggtgtcatcacccccattgtccctagggtgacaggccagggggaaaaattatccccggacaacatgaaacaggtgaggtcaggtcactgcggacatcaagggcggacaccaccaaggggccctctggaacttgagaccactggaggcacacctgctatacctcatgcctttcccagcagccactgaactcccccatcccagggctcagcctcctgattcatgggtcccctagttaggcccagataaaaatccagttggctgagggttttggatgggaagggaagggtggctgtcctcaaatcctggtctttggagtcatggcactgtacggttttagtgtcagacagaccggggttcaaatcccagctctgctgttcactggttgtatgatcttggggaagacatcttccttctctgcctcggcttcctcatctgcagctacgcctgggtgtggtgagggttctaggggatctcagatgtgtgtagcacggagcctgctgtgtcctgggtgctctctacgtggtggccggtagaattctccatctatccaggctccaggagacccctgggcatctcccacctgtggcccctaaacccagagtgactgagagcacttaacattcagcttgtctcatccccagtctacctccttccttctaccctcactgcctcccagtcaggagagtgagctctcagaagccagagccccacccaaggggaccctggtctctccgccttcacctagcaatgggaaccctgcttcccaggggaggaaccaactgctccaccttctagggacccagtttgttggagtaggacagtaacatggcaggaatcggacttctgggcctgtaatcccagtttggatggcacgttagactcttggttgaccgttgtggtccttagaagtcccattctcccttccagttatgagaaaccaatgccttctagattcaggtgactatccttacctgggggtgctgatgcatcctcagttaacctacacccacctgaatatagatgagcgtagctgagttttcacccgtaggaccgaagtgttttgtggtggagtatctgaacaaccttggctctgtggccattcaacctgccaggactaacatttctggatttgtgaagaagggatcttcaaagccattgaacccacagagctgtgttgctttaaagccaccacaagggtacagcattaaatggcagaactggaaaagcttcttagggcatctcatccagggattctcaaaccatgtcccccagaggccttgggctgcagttgcagggggcgccatggggctataggagcctcccactttcaccagagcagcctcactgtgccctgattcacacactgtggctttccacgtgaggttttgtttagagggatccactactcaagaaaaagttagcaaaccactccttttgttgcaaaggagctgaggtcaagggtggcaaaggcacttgtccaaggtcgcccagcagtgctgctctgatgacttgtgcacatccccaagggtaagagcttcgatctctgcacagccgggccaacctctgaccccttgtccatgtcagtaaaatatgaaggtcacagccaggatttctaagggtcaggaggccttcaccgctgctggggcacacacacacacatgcatacacacatacgacacacacctgtgtctccccaggggttttccctgcagtgaggcttgtccagatgattgagcccaggagaggaagaacaaacaaactacggagctggggagggctgtggcttggggccagctcccagggaaattcccagacctgtaccgatgttctctctggcaccagccgagctgcttcgtggaggtaacttcaaaaaagtaaaagctatcatcagcatcatcttagacttgtatgaaataaccactccgtttctattcttaaaccttaccatttttgttttgttttgtttttttgagtcggagttttgttctttttgcctaggctggagtgcagtggtacaatctcggctcactgcaacctccacctcccgggttcaagtgattctcctgcctcagcctcccaagtagctgggattacaggcacccgccaccacacctggctaatttttttgtatttttagtagagacggggtttcaccatgttggccaggctggtctcgaactcctgacctcaggtgatccgcccgcctcggcctcccaaagtgctgggattacaggcgtgagccaccgcgcccagccaaaccttactatttttttaaagaattttttccagagtttaatttctgacatagcttaagttttccagtaactctaaactccatctcctttatcgtcattaagtcattcacaaaaagccaggagaagcatttggaaagggcatgataatcagtataataatttgccttgtgtggtcagcacttaactgtttacaaagccctttcacgtgcacagcaggtgggaactgcgcggtgtgggctgggcctgcgctggaagcatatcccgtgaaaagtgttagtgccttaggtgaaagcaacatgtatccctttagactactaacggtatatgttgttcttatgtatttgtatttatttctattttttctatgtttatgtcatatttaaacgatatcctactgcttgttggtattaccctaaactgtttaaataaagagctctatttttaaagaaaaaaggtacaattga

SEQ ID NO: 143687 - DNA, 1476 bp, Homo sapiens
  Payload ID: 8389
  Gene Symbol: IFNLR1
  Gene Name: interferon, lambda receptor 1
  Uniprot ID: Q8IU57
  ENST ID: ENST00000327575
  CDS Start-End: 14-748
cggcaggaaggccatggcggggcccgagcgctggggccccctgctcctgtgcctgctgcaggccgctccagggaggccccgtctggcccctccccagaatgtgacgctgctctcccagaacttcagcgtgtacctgacatggctcccagggcttggcaacccccaggatgtgacctattttgtggcctatcagagctctcccacccgtagacggtggcgcgaagtggaagagtgtgcgggaaccaaggagctgctatgttctatgatgtgcctgaagaaacaggacctgtacaacaagttcaagggacgcgtgcggacggtttctcccagctccaagtccccctgggtggagtccgaatacctggattacctttttgaagtggagccggccccacctgtcctggtgctcacccagacggaggagatcctgagtgccaatgccacgtaccagctgcccccctgcatgcccccactggatctgaagtatgaggtggcattctggaaggagggggccggaaacaagaccctatttccagtcactccccatggccagccagtccagatcactctccagccagctgccagcgaacaccactgcctcagtgccagaaccatctacacgttcagtgtcccgaaatacagcaagttctctaagcccacctgcttcttgctggaggtcccaggacttttctggacacacacaccctgtggcaacctttcagcccagcagaccagagtccgtgaatgacttgttcctctgtccccaaaaggaactgaccagaggggtcaggccgacgcctcgagtcagggccccagccacccaacagacaagatggaagaaggaccttgcagaggacgaagaggaggaggatgaggaggacacagaagatggcgtcagcttccagccctacattgaaccaccttctttcctggggcaagagcaccaggctccagggcactcggaggctggtggggtggactcagggaggcccagggctcctctggtcccaagcgaaggctcctctgcttgggattcttcagacagaagctgggccagcactgtggactcctcctgggacagggctgggtcctctggctatttggctgagaaggggccaggccaagggccgggtggggatgggcaccaagaatctctcccaccacctgaattctccaaggactcgggtttcctggaagagctcccagaagataacctctcctcctgggccacctggggcaccttaccaccggagccgaatctggtccctgggggacccccagtttctcttcagacactgaccttctgctgggaaagcagccctgaggaggaagaggaggcgagggaatcagaaattgaggacagcgatgcgggcagctggggggctgagagcacccagaggaccgaggacaggggccggacattggggcattacatggccaggtgagctgtcccccgacatcccaccgaatctgatg

SEQ ID NO: 143688 - DNA, 674 bp, Homo sapiens
  Payload ID: 8389
  Gene Symbol: IFNLR1
  Gene Name: interferon, lambda receptor 1
  Uniprot ID: Q8IU57
  ENST ID: ENST00000374418
  CDS Start-End: 1-636
atggcggggcccgagcgctggggccccctgctcctgtgcctgctgcaggccgctccagggaggccccgtctggcccctccccagaatgtgacgctgctctcccagaacttcagcgtgtacctgacatggctcccagggcttggcaacccccaggatgtgacctattttgtggcctatcagagctctcccacccgtagacggtggcgcgaagtggaagagtgtgcgggaaccaaggagctgctatgttctatgatgtgcctgaagaaacaggacctgtacaacaagttcaagggacgcgtgcggacggtttctcccagctccaagtccccctgggtggagtccgaatacctggattacctttttgaagtggagccggccccacctgtcctggtgctcacccagacggaggagatcctgagtgccaatgccacgtaccagctgcccccctgcatgcccccactggatctgaagtatgaggtggcattctggaaggagggggccggaaacaaggtgggaagctcctttcctgcccccaggctaggcccgctcctccaccccttcttactcaggttcttctcaccctcccagcctgctcctgcacccctcctccaggaagtcttccctgtacactcctgacttctggcagtcagccctaataaaatctgatcaaagta

SEQ ID NO: 143689 - DNA, 953 bp, Homo sapiens
  Payload ID: 8389
  Gene Symbol: IFNLR1
  Gene Name: interferon, lambda receptor 1
  ENST ID: ENST00000374419
  CDS Start-End: 350-907
tcctcctaaagggccgcataatattgcgcgtcgtggcgtgtgccttactgggaagctactgctgtccaggtgaacaccacagccttcggggtcagaaagacagctttccccagaacaagcacctgaagctctggggcctgccgctccccgggagagaaggaggccccgtctggcccctccccagaatgtgacgctgctctcccagaacttcagcgtgtacctgacatggctcccagggcttggcaacccccaggatgtgacctattttgtggcctatcagagctctcccacccgtagacggtggcgcgaagtggaagagtgtgcgggaaccaaggagctgctatgttctatgatgtgcctgaagaaacaggacctgtacaacaagttcaagggacgcgtgcggacggtttctcccagctccaagtccccctgggtggagtccgaatacctggattacctttttgaagtggagccggccccacctgtcctggtgctcacccagacggaggagatcctgagtgccaatgccacgtaccagctgcccccctgcatgcccccactggatctgaagtatgaggtggcattctggaaggagggggccggaaacaagaccctatttccagtcactccccatggccagccagtccagatcactctccagccagctgccagcgaacaccactgcctcagtgccagaaccatctacacgttcagtgtcccgaaatacagcaagttctctaagcccacctgcttcttgctggaggtcccagaagccaactgggctttcctggtgctgccatcgcttctgatactgctgttagtaattgccgcagggggtgtgatctggaagaccctcatggggaacccctggtttcagcgggcaaagatgccacgggccctggtatagcaaatctgggggtgtgcagcaggtggggaggggttgagagtaaggg

SEQ ID NO: 143690 - DNA, 1476 bp, Homo sapiens
  Payload ID: 8389
  Gene Symbol: IFNLR1
  Gene Name: interferon, lambda receptor 1
  Uniprot ID: Q8IU57
  ENST ID: ENST00000374421
  CDS Start-End: 1-1476
atggcggggcccgagcgctggggccccctgctcctgtgcctgctgcaggccgctccagggaggccccgtctggcccctccccagaatgtgacgctgctctcccagaacttcagcgtgtacctgacatggctcccagggcttggcaacccccaggatgtgacctattttgtggcctatcagagctctcccacccgtagacggtggcgcgaagtggaagagtgtgcgggaaccaaggagctgctatgttctatgatgtgcctgaagaaacaggacctgtacaacaagttcaagggacgcgtgcggacggtttctcccagctccaagtccccctgggtggagtccgaatacctggattacctttttgaagtggagccggccccacctgtcctggtgctcacccagacggaggagatcctgagtgccaatgccacgtaccagctgcccccctgcatgcccccactggatctgaagtatgaggtggcattctggaaggagggggccggaaacaagaccctatttccagtcactccccatggccagccagtccagatcactctccagccagctgccagcgaacaccactgcctcagtgccagaaccatctacacgttcagtgtcccgaaatacagcaagttctctaagcccacctgcttcttgctggaggtcccagaagccaactgggctttcctggtgctgccatcgcttctgatactgctgttagtaattgccgcagggggtgtgatctggaagaccctcatggggaacccctggtttcagcgggcaaagatgccacgggccctggaactgaccagaggggtcaggccgacgcctcgagtcagggccccagccacccaacagacaagatggaagaaggaccttgcagaggacgaagaggaggaggatgaggaggacacagaagatggcgtcagcttccagccctacattgaaccaccttctttcctggggcaagagcaccaggctccagggcactcggaggctggtggggtggactcagggaggcccagggctcctctggtcccaagcgaaggctcctctgcttgggattcttcagacagaagctgggccagcactgtggactcctcctgggacagggctgggtcctctggctatttggctgagaaggggccaggccaagggccgggtggggatgggcaccaagaatctctcccaccacctgaattctccaaggactcgggtttcctggaagagctcccagaagataacctctcctcctgggccacctggggcaccttaccaccggagccgaatctggtccctgggggacccccagtttctcttcagacactgaccttctgctgggaaagcagccctgaggaggaagaggaggcgagggaatcagaaattgaggacagcgatgcgggcagctggggggctgagagcacccagaggaccgaggacaggggccggacattggggcattacatggccaggtga

SEQ ID NO: 143691 - DNA, 1932 bp, Homo sapiens
  Payload ID: 8390
  Gene Symbol: IFNW1
  Gene Name: interferon, omega 1
  Uniprot ID: P05000
  ENST ID: ENST00000380229
  CDS Start-End: 576-1163
gatctggtaaacctgaagcaaatatagaaacctatagggcctgacttcctacataaagtaaggagggtaaaaatggaggctagaataagggttaaaattttgcttctagaacagagaaaatgatttttttcatatatatatgaatatatattatatatacacatatatacatatattcactatagtgtgtatacataaatatataatatatatattgttagtgtagtgtgtgtctgattatttacatgcatatagtatatacacttatgactttagtacccagacgtttttcatttgattaagcattcatttgtattgacacagctgaagtttactggagtttagctgaagtctaatgcaaaattaatagattgttgtcatcctcttaaggtcatagggagaacacacaaatgaaaacagtaaaagaaactgaaagtacagagaaatgttcagaaaatgaaaaccatgtgtttcctattaaaagccatgcatacaagcaatgtcttcagaaaacctagggtccaaggttaagccatatcccagctcagtaaagccaggagcatcctcatttcccaatggccctcctgttccctctactggcagccctagtgatgaccagctatagccctgttggatctctgggctgtgatctgcctcagaaccatggcctacttagcaggaacaccttggtgcttctgcaccaaatgaggagaatctcccctttcttgtgtctcaaggacagaagagacttcaggttcccccaggagatggtaaaagggagccagttgcagaaggcccatgtcatgtctgtcctccatgagatgctgcagcagatcttcagcctcttccacacagagcgctcctctgctgcctggaacatgaccctcctagaccaactccacactggacttcatcagcaactgcaacacctggagacctgcttgctgcaggtagtgggagaaggagaatctgctggggcaattagcagccctgcactgaccttgaggaggtacttccagggaatccgtgtctacctgaaagagaagaaatacagcgactgtgcctgggaagttgtcagaatggaaatcatgaaatccttgttcttatcaacaaacatgcaagaaagactgagaagtaaagatagagacctgggctcatcttgaaatgattctcattgattaatttgccatataacacttgcacatgtgactctggtcaattcaaaagactcttatttcggctttaatcacagaattgactgaattagttctgcaaatactttgtcggtatattaagccagtatatgttaaaaagacttaggttcaggggcatcagtccctaagatgttatttatttttactcatttatttattcttacattttatcatatttatactatttatattcttatataacaaatgtttgcctttacattgtattaagataacaaaacatgttcagctttccatttggttaaatattgtattttgttatttattaaattattttcaaacaaaacttcttgaagttatttattcgaaaaccaaaatccaaacactagttttctgaaccaaatcaaggaatggacggtaatatacacttacctattcattcattccatttacataatatgtataaagtgagtatcaaagtggcatattttggaattgatgtcaagcaatgcaggtgtactcattgcatgactgtatcaaaatatctcatgtaaccaataaatatatacacttactatgtacccacaaaaattaaaaagttattttaaaaaagaaatacaggtgaataaacacagtttctttccgtgttgaagagctttcattcttacaggaaaagaaacagtaaagatgtaccaatttcgcttatatgaaacactacaaagataagtaaaagaaaatgatgttctcatactagaagctt

SEQ ID NO: 143692 - DNA, 1241 bp, Homo sapiens
  Payload ID: 8391
  Gene Symbol: IFI35
  Gene Name: interferon-induced protein 35
  Uniprot ID: P80217
  ENST ID: ENST00000415816
  CDS Start-End: 224-1084
ggcagggggcggcatgtgagcgccagaaggcagggatttcacggaaatgaaagtggaagcaaacagcctgcgagcagagcctcctgaggtgtatttcgggtcttgctggggctgagagagaccacagccctttggggggtacaaacaagagttcagttgctgtgaattctgccactgtgcccagctctgaagcctcagctcttgccaaacagacccgagacccatgtcagccccactggatgccgccctccacgcccttcaggaggagcaggccagactcaagatgaggctgtgggacctgcagcagctgagaaaggagctcggggactcccccaaagacaaggtcccattttcagtgcccaagatccccctggtattccgaggacacacccagcaggacccggaagtgcctaagtctttagtttccaatttgcggatccactgccctctgcttgcgggctctgctctgatcacctttgatgaccccaaagtggctgagcaggtgctgcaacaaaaggagcacacgatcaacatggaggagtgccggctgcgggtgcaggtccagcccttggagctgcccatggtcaccaccatccagatgtccagccagttgagtggccggagggtgttggtcactggatttcctgccagcctcaggctgagtgaggaggagctgctggacaagctagagatcttctttggcaagactaggaacggaggtggcgatgtggacgttcgggagctactgccagggagtgtcatgctggggtttgctagggatggagtggctcagcgtctgtgccaaatcggccagttcacagtgccactgggtgggcagcaagtccctctgagagtctctccgtatgtgaacggggagatccagaaggctgagatcaggtcgcagccagttccccgctcggtactggtgctcaacattcctgatatcttggatggcccggagctgcatgacgtcctggagatccacttccagaagcccacccgcgggggcggggaggtagaggccctgacagtcgtaccccaaggacagcagggcctagcagtcttcacctctgagtcaggctaggggcctccccttctcatcctccccacccccccgccaaggttctcacactggcctgggcttgggtgcccatataggaggtctgtatgttcaccaacagtgcggaggggtcacacattgcaaaacactgcccagaacagtaaaaagagcctgcatgcca

SEQ ID NO: 143693 - DNA, 1232 bp, Homo sapiens
  Payload ID: 8391
  Gene Symbol: IFI35
  Gene Name: interferon-induced protein 35
  Uniprot ID: P80217
  ENST ID: ENST00000438323
  CDS Start-End: 209-1075
gtgagcgccagaaggcagggatttcacggaaatgaaagtggaagcaaacagcctgcgagcagagcctcctgaggtgtatttcgggtcttgctggggctgagagagaccacagccctttggggggtacaaacaagagttcagttgctgtgaattctgccactgtgcccagctctgaagcctcagctcttgccaaacagacccgagacccatgtcagccccactggatgccgccctccacgcccttcaggaggagcaggccagactcaagatgaggctgtgggacctgcagcagctgagaaaggagctcggggactcccccaaagacaaggtcccattttcagtgcccaagatccccctggtattccgaggacacacccagcaggacccggaagtgcctaagtctttagtttccaatttgcggatccactgccctctgcttgcgggctctgctctgatcacctttgatgaccccaaagtggctgagcaggtgctgcaacaaaaggagcacacgatcaacatggaggagtgccggctgcgggtgcaggtccagcccttggagctgcccatggtcaccaccatccaggtgatgatgtccagccagttgagtggccggagggtgttggtcactggatttcctgccagcctcaggctgagtgaggaggagctgctggacaagctagagatcttctttggcaagactaggaacggaggtggcgatgtggacgttcgggagctactgccagggagtgtcatgctggggtttgctagggatggagtggctcagcgtctgtgccaaatcggccagttcacagtgccactgggtgggcagcaagtccctctgagagtctctccgtatgtgaacggggagatccagaaggctgagatcaggtcgcagccagttccccgctcggtactggtgctcaacattcctgatatcttggatggcccggagctgcatgacgtcctggagatccacttccagaagcccacccgcgggggcggggaggtagaggccctgacagtcgtaccccaaggacagcagggcctagcagtcttcacctctgagtcaggctaggggcctccccttctcatcctccccacccccccgccaaggttctcacactggcctgggcttgggtgcccatataggaggtctgtatgttcaccaacagtgcggaggggtcacacattgcaaaacactgcccagaacagtaaaaagagcctgcatgcca

SEQ ID NO: 143694 - DNA, 1687 bp, Homo sapiens
  Payload ID: 8392
  Gene Symbol: IFI44
  Gene Name: interferon-induced protein 44
  Uniprot ID: Q8TCB0
  ENST ID: ENST00000370747
  CDS Start-End: 86-1420
cattttgtgcctgcctagctatccagacagagcagctaccctcagctctagctgatactacagacagtacaacagatcaagaagtatggcagtgacaactcgtttgacatggttgcacgaaaagatcctgcaaaatcattttggagggaagcggcttagccttctctataagggtagtgtccatggattccgtaatggagttttgcttgacagatgttgtaatcaagggcctactctaacagtgatttatagtgaagatcatattattggagcatatgcagaagagagttaccaggaaggaaagtatgcttccatcatcctttttgcacttcaagatactaaaatttcagaatggaaactaggactatgtacaccagaaacactgttttgttgtgatgttacaaaatataactccccaactaatttccagatagatggaagaaatagaaaagtgattatggacttaaagacaatggaaaatcttggacttgctcaaaattgtactatctctattcaggattatgaagtttttcgatgcgaagattcactggatgaaagaaagataaaaggggtcattgagctcaggaagagcttactgtctgccttgagaacttatgaaccatatggatccctggttcaacaaatacgaattctgctgctgggtccaattggagctgggaagtccagctttttcaactcagtgaggtctgttttccaagggcatgtaacgcatcaggctttggtgggcactaatacaactgggatatctgagaagtataggacatactctattagagacgggaaagatggcaaatacctgccgtttattctgtgtgactcactggggctgagtgagaaagaaggcggcctgtgcagggatgacatattctatatcttgaacggtaacattcgtgatagataccagtttaatcccatggaatcaatcaaattaaatcatcatgactacattgattccccatcgctgaaggacagaattcattgtgtggcatttgtatttgatgccagctctattcaatacttctcctctcagatgatagtaaagatcaaaagaattcgaagggagttggtaaacgctggtgtggtacatgtggctttgctcactcatgtggatagcatggatttgattacaaaaggtgaccttatagaaatagagagatgtgagcctgtgaggtccaagctagaggaagtccaaagaaaacttggatttgctctttctgacatctcggtggttagcaattattcctctgagtgggagctggaccctgtaaaggatgttctaattctttctgctctgagacgaatgctatgggctgcagatgacttcttagaggatttgccttttgagcaaatagggaatctaagggaggaaattatcaactgtgcacaaggaaaaaaatagatatgtgaaaggttcacgtaaatttcctcacatcacagaagattaaaattcagaaaggagaaaacacagaccaaagagaagtatctaagaccaaagggatgtgttttattaatgtctaggatgaagaaatgcatagaacattgtagtacttgtaaataactagaaataacatgatttagtcataattgtgaaaaataataataatttttcttggatttatgttctgtatctgtgaaaaaataaatttcttataaaactcgggtctaa

SEQ ID NO: 143695 - DNA, 686 bp, Homo sapiens
  Payload ID: 8392
  Gene Symbol: IFI44
  Gene Name: interferon-induced protein 44
  ENST ID: ENST00000438486
  CDS Start-End: 102-686
attttgtgcctgcctagctatccagacagagcagctaccctcagctctagctgatactacagacagtacaacagatagatggaagaaatagaaaagtgattatggacttaaagacaatggaaaatcttggacttgctcaaaattgtactatctctattcaggattatgaagtttttcgatgcgaagattcactggatgaaagaaagataaaaggggtcattgagctcaggaagagcttactgtctgccttgagaacttatgaaccatatggatccctggttcaacaaatacgaattctgctgctgggtccaattggagctgggaagtccagctttttcaactcagtgaggtctgttttccaagggcatgtaacgcatcaggctttggtgggcactaatacaactgggatatctgagaagtataggacatactctattagagacgggaaagatggcaaatacctgccgtttattctgtgtgactcactggggctgagtgagaaagaaggcggcctgtgcagggatgacatattctatatcttgaacggtaacattcgtgatagataccagtttaatcccatggaatcaatcaaattaaatcatcatgactacattgattccccatcgctgaaggacagaattcattgtgtggcatttgtatttgatgccagctctattcaatacttc

SEQ ID NO: 143696 - DNA, 497 bp, Homo sapiens
  Payload ID: 8392
  Gene Symbol: IFI44
  Gene Name: interferon-induced protein 44
  ENST ID: ENST00000446486
  CDS Start-End: 1-230
ctctttctgacatctcggtggttagcaattattcctctgagtgggagctggaccctgtaaaggatgttctaattctttctgctctgagacgaatgctatgggctgcagatgacttcttagaggatttgccttttgagcaaataggtagatggtttggtggtgtggaagcttggaagcggtcagggaatctaagggaggaaattatcaactgtgcacaaggaaaaaaatagatatgtgaaaggttcacgtaaatttcctcacatcacagaagattaaaattcagaaaggagaaaacacagaccaaagagaagtatctaagaccaaagggatgtgttttattaatgtctaggatgaagaaatgcatagaacattgtagtacttgtaaataactagaaataacatgatttagtcataattgtgaaaaataataataatttttcttggatttatgttctgtatctgtgaaaaaataaatttcttataaaactcgggtctaa

SEQ ID NO: 143697 - DNA, 5874 bp, Homo sapiens
  Payload ID: 8393
  Gene Symbol: IFI44L
  Gene Name: interferon-induced protein 44-like
  Uniprot ID: Q53G44
  ENST ID: ENST00000370751
  CDS Start-End: 180-1538
gctgccagctgagtttttttgctgctttgagtctcagttttctttctttcctagagtctctgaagccacagatctcttaagaactttctgtctccaaaccgtggctgctcgataaatcagacagaacagttaatcctcaatttaagcctgatctaacccctagaaacagatatagaacaatggaagtgacaacaagattgacatggaatgatgaaaatcatctgcgcaagctgcttggaaatgtttctttgagtcttctctataagtctagtgttcatggaggtagcattgaagatatggttgaaagatgcagccgtcagggatgtactataacaatggcttacattgattacaatatgattgtagcctttatgcttggaaattatattaatttacatgaaagttctacagagccaaatgattccctatggttttcacttcaaaagaaaaatgacaccactgaaatagaaactttactcttaaatacagcaccaaaaattattgatgagcaactggtgtgtcgtttatcgaaaacggatattttcattatatgtcgagataataaaatttatctagataaaatgataacaagaaacttgaaactaaggttttatggccaccgtcagtatttggaatgtgaagtttttcgagttgaaggaattaaggataacctagacgacataaagaggataattaaagccagagagcacagaaataggcttctagcagacatcagagactataggccctatgcagacttggtttcagaaattcgtattcttttggtgggtccagttgggtctggaaagtccagttttttcaattcagtcaagtctatttttcatggccatgtgactggccaagccgtagtggggtctgatatcaccagcataaccgagcggtataggatatattctgttaaagatggaaaaaatggaaaatctctgccatttatgttgtgtgacactatggggctagatggggcagaaggagcaggactgtgcatggatgacattccccacatcttaaaaggttgtatgccagacagatatcagtttaattcccgtaaaccaattacacctgagcattctacttttatcacctctccatctctgaaggacaggattcactgtgtggcttatgtcttagacatcaactctattgacaatctctactctaaaatgttggcaaaagtgaagcaagttcacaaagaagtattaaactgtggtatagcatatgtggccttgcttactaaagtggatgattgcagtgaggttcttcaagacaactttttaaacatgagtagatctatgacttctcaaagccgggtcatgaatgtccataaaatgctaggcattcctatttccaatattttgatggttggaaattatgcttcagatttggaactggaccccatgaaggatattctcatcctctctgcactgaggcagatgctgcgggctgcagatgattttttagaagatttgcctcttgaggaaactggtgcaattgagagagcgttacagccctgcatttgagataagttgccttgattctgacatttggcccagcctgtactggtgtgccgcaatgagagtcaatctctattgacagcctgcttcagattttgcttttgttcgttttgccttctgtccttggaacagtcatatctcaagttcaaaggccaaaacctgagaagcggtgggctaagataggtcctactgcaaaccacccctccatatttccgtaccatttacaattcagtttctgtgacatctttttaaaccactggaggaaaaatgagatattctctaatttattcttctataacactctatatagagctatgtgagtactaatcacattgaataatagttataaaattattgtatagacatctgcttcttaaacagattgtgagttctttgagaaacagcgtggattttacttatctgtgtattcacagagcttagcacagtgcctggtaatgagcaagcatacttgccattacttttccttcccactctctccaacatcacattcactttaaatttttctgtatatagaaaggaaaactagcctgggcaacatgatgaaaccccatctccactgcaaaaaaaaaaaaaaaaaataagaaagaacaaaacaaaccccacaaaaattagctgggtatgatggcacgtgcctgtagtcccagttactcaggatgattgattgagccttggaggtggaggctacagtgagctgagattgtgccactgtactctagccagggagaaagagtgagatcctggctcaaaaaaaccaaataaaacaaaacaaacaaacgaaaaacagaaaggaagactgaaagagaatgaaaagctggggagaggaaataaaaataaagaaggaagagtgtttcatttatatctgaatgaaaatatgaatgactctaagtaattgaattaattaaaatgagccaacttttttttaacaatttacattttatttctatgggaaaaaataaatattcctcttctaacaaacccatgcttgattttcattaattgaattccaaatcatcctagccatgtgtccttccatttaggttactggggcaaatcagtaagaaagttcttatatttatgctccaaataattctgaagtcctcttactagctgtgaaagctagtactattaagaaagaaaacaaaattcccaaaagatagctttcacttttttttttccttaaagacttcctaattctcttctccaaattcttagtcttcttcaaaataatatgctttggttcaatagttatccacattctgacagtctaatttagttttaatcagaattatactcatcttttgggtagtcatagatattaagaaagcaagagtttcttatgtccagttatggaatatttcctaaagcaaggctgcaggtgaagttgtgctcaagtgaatgttcaggagacacaattcagtggaagaaattaagtctttaaaaaagacctaggaataggagaaccatggaaattgaggaggtaggcctacaagtagatattgggaacaaaattagagaggcaaccagaaaaagttattttaggctcaccagagttgttcttattgcacagtaacacaccaatataccaaaacagcaggtattgcagtagagaaagagtttaataattgaatggcagaaaaatgaggaaggttgaggaaacctcaaatctacctccctgctgagtctaagtttaggatttttaagagaaaggcaggtaaggtgctgaaggtctggagctgctgatttgttggggtatagggaatgaaatgaaacatacagagatgaaaactggaagtttttttttgtttgttttgttttttttttgttgttgtttttttttttttttgtttttttgctgagtcaattccttggagggggtcttcagactgactggtgtcagcagacccatgggattccaagatctggaaaactttttagatagaaacttgatgtttcttaacgttacatatattatcttatagaaataactaagggaagttagtgccttgtgaccacatctatgtgacttttaggcagtaagaaactataaggaaaggagctaacagtcatgctgtaagtagctacagggaattggcttaaagggcaagttggttagtacttagctgtgtttttattcaaagtctacattttatgtagtggttaatgtttgctgttcattaggatggtttcacagttaccatacaaatgtagaagcaacaggtccaaaaagtagggcatgattttctccatgtaatccagggagaaaacaagccatgaccattgttggttgggagactgaaggtgattgaaggttcaccatcatcctcaccaacttttgggccataattcacccaaccctttggtggagcctgaaaaaaatctgggcagaatgtaggacttctttattttgtttaaaggggtaacacagagtgcccttatgaaggagttggagatcctgcaaggaagagaaggagtgaaggagagatcaagagagagaaacaatgaggaacatttcatttgacccaacatcctttaggagcataaatgttgacactaagttatcccttttgtgctaaaatggacagtattggcaaaatgataccacaacttcttattctctggctctatattgctttggaaacacttaaacatcaaatggagttaaatacatatttgaaatttaggttaggaaatattggtgaggaggcctcaaaaagggggaaacatcttttgtctgggaggatattttccattttgtggatttccctgatctttttctaccaccctgaggggtggtgggaattatcattttgctacattttagaggtcatccaggatttttgaaactttacattctttacggttaagcaagatgtacagctcagtcaaagacactaaattcttcttagaaaaatagtgctaaggagtatagcagatgacctatatgtgtgttggctgggagaatatcatcttaaagtgagagtgatgttgtggagacagttgaaatgtcaatgctagagcctctgtggtgtgaatgggcacgttaggttgttgcattagaaagtgactgtttctgacagaaatttgtagctttgtgcaaactcacccaccatctacctcaataaaatatagagaaaagaaaaatagagcagtttgagttctatgaggtatgcaggcccagagagacataagtatgttcctttagtcttgcttcctgtgtgccacactgcccctccacaaccatagctgggggcaattgtttaaagtcattttgttcccgactagctgccttgcacattatcttcattttcctggaatttgatacagagagcaatttatagccaattgatagcttatgctgtttcaatgtaaattcgtggtaaataacttaggaactgcctcttctttttctttgaaaacctacttataactgttgctaataagaatgtgtattgttcaggacaacttgtctccatacagttgggttgtaaccctcatgcttggcccaaataaactctctacttatatcagtttttcctacacttcttccttttaggtcaacaataccaagaggggttactgtgctgggtaatgtgtaaacttgtgtcttgtttagaaagataaatttaaagactatcacattgctttttcataaaacaagacaggtctacaattaatttattttgacgcaaattgataggggggccaagtaagccccatatgcttaatgatcagctgatgaataatcatctcctagcaacataactcaatctaatgctaaggtacccacaagatggcaaggctgatcaaagtcgtcatggaatcctgcaaccaaaagccatgggaatttggaagccctcaaatcccattcctaatctgatgagtctatggaccaatttgtggaggacagtagattaaatagatctgatttttgccatcaatgtaaggaggataaaaacttgcataccaattgtacacccttgcaaaatctttctctgatgttggagaaaatgggccagtgagatcatggatatagaagtacagtcaatgttcagctgtaccctcccacaatcccacttccttcctcaacacaattcaaacaaatagactcagactgtttcaggctccaggacaggaagtgcagtgtaggcaaaattgcaaaaattgagggcacaggggtggaggtgggggggttgaataacaagctgtgctaaataattacgtgtaaatatattttttcatttttaaaaattgatttcttttgcacattccatgacaatatatgtcacatttttaaaataaatgcaaagaagcatacatccaa

SEQ ID NO: 143698 - DNA, 849 bp, Homo sapiens
  Payload ID: 8393
  Gene Symbol: IFI44L
  Gene Name: interferon-induced protein 44-like
  ENST ID: ENST00000450498
  CDS Start-End: 1-699
ttgagtcttctctataagtctagtgttcatggaggtagcattgaagatatggttgaaagatgcagccgtcagggatgtactataacaatggcttacattgattacaatatgattgtagcctttatgcttggaaattatattaatttacatgaaagttctacagagccaaatgattccctatggttttcacttcaaaagaaaaatgacaccactgaaatagaaactttactcttaaatacagcaccaaaaattattgatgagcaactggtgtgtcgtttatcgaaaacggatattttcattatatgtcgagataataaaatttatctagataaaatgataacaagaaacttgaaactaaggttttatggccaccgtcagtatttggaatgtgaagtttttcgagttgaaggaattaaggataacctagacgacataaagaggataattaaagccagagagcacagaaataggcttctagcagacatcagagactataggccctatgcagacttggtttcagaaattcgtattcttttggtgggtccagttgggtctggaaagtccagttttttcaattcagtcaagtctatttttcatggccatgtgactggccaagccgtagtggggtctgatatcaccagcataaccgagcggggcaatcctaatatacaattaaatgctaaatcaaatggaaaataggagtaaaattttgatcagaaccacctccattgtgctatattatacagagaagctttcaaattttatggatggaagaagcagttatataaagaatactttttagtatttgtataaaaaacaacaaaaaattaaaaaccctatgaaaatctt

SEQ ID NO: 143699 - DNA, 554 bp, Homo sapiens
  Payload ID: 8393
  Gene Symbol: IFI44L
  Gene Name: interferon-induced protein 44-like
  ENST ID: ENST00000452835
  CDS Start-End: 263-554
cagtgcagacaggcttggctttgaacagcatccagctccacgattctatcagctaaattttttttttgtactttaagaaatagggatagtcatagtgtttactgtacgcagttgttctgaggagaaattaggaaaagagtctctgaagccacagatctcttaagaactttctgtctccaaaccgtggctgctcgataaatcagacagaacagttaatcctcaatttaagcctgatctaacccctagaaacagatatagaacaatggaagtgacaacaagattgacatggaatgatgaaaatcatctgcgcaagctgcttggaaatgtttctttgagtcttctctataagtctagtgttcatggaggtagcattgaagatatggttgaaagatgcagccgtcagggatgtactataacaatggcttacattgattacaatatgattgtagcctttatgcttggaaattatattaatttacatgaaagttctacagagccaaatgattccctatggttttcacttcaaaagaaaaatgacaccactgaaatagaaa

SEQ ID NO: 143700 - DNA, 1880 bp, Homo sapiens
  Payload ID: 8394
  Gene Symbol: IFIT1
  Gene Name: interferon-induced protein with tetratricopeptide repeats 1
  Uniprot ID: P09914
  ENST ID: ENST00000371804
  CDS Start-End: 168-1604
gcaaggacacacccacagcttacaccattggctgctgtttagctcccttatataacactgtcttggggtttaaacgtaactgaaaatccacaagacagaatagccagatctcagaggagcctggctaagcaaaaccctgcagaacggctgcctaatttacagcaaccatgagtacaaatggtgatgatcatcaggtcaaggatagtctggagcaattgagatgtcactttacatgggagttatccattgatgacgatgaaatgcctgatttagaaaacagagtcttggatcagattgaattcctagacaccaaatacagtgtgggaatacacaacctactagcctatgtgaaacacctgaaaggccagaatgaggaagccctgaagagcttaaaagaagctgaaaacttaatgcaggaagaacatgacaaccaagcaaatgtgaggagtctggtgacctggggcaactttgcctggatgtattaccacatgggcagactggcagaagcccagacttacctggacaaggtggagaacatttgcaagaagctttcaaatcccttccgctatagaatggagtgtccagaaatagactgtgaggaaggatgggccttgctgaagtgtggaggaaaaaattatgaacgggccaaggcctgctttgaaaaggtgcttgaagtggaccctgaaaaccctgaatccagcgctgggtatgcgatctctgcctatcgcctggatggctttaaattagccacaaaaaatcacaagccattttctttgcttcccctaaggcaggctgtccgcttaaatccagacaatggatatattaaggttctccttgccctgaagcttcaggatgaaggacaggaagctgaaggagaaaagtacattgaagaagctctagccaacatgtcctcacagacctatgtctttcgatatgcagccaagttttaccgaagaaaaggctctgtggataaagctcttgagttattaaaaaaggccttgcaggaaacacccacttctgtcttactgcatcaccagatagggctttgctacaaggcacaaatgatccaaatcaaggaggctacaaaagggcagcctagagggcagaacagagaaaagctagacaaaatgataagatcagccatatttcattttgaatctgcagtggaaaaaaagcccacatttgaggtggctcatctagacctggcaagaatgtatatagaagcaggcaatcacagaaaagctgaagagaattttcaaaaattgttatgcatgaaaccagtggtagaagaaacaatgcaagacatacatttccactatggtcggtttcaggaatttcaaaagaaatctgacgtcaatgcaattatccattatttaaaagctataaaaatagaacaggcatcattaacaagggataaaagtatcaattctttgaagaaattggttttaaggaaacttcggagaaaggcattagatctggaaagcttgagcctccttgggttcgtctacaaattggaaggaaatatgaatgaagccctggagtactatgagcgggccctgagactggctgctgactttgagaactctgtgagacaaggtccttaggcacccagatatcagccactttcacatttcatttcattttatgctaacatttactaatcatcttttctgcttactgttttcagaaacattataattcactgtaatgatgtaattcttgaataataaatctgacaaaatattagttgtgttcaacaattagtgaaacagaatgtgtgtatgcatgtaagaaagagaaatcatttgtatgagtgctatgtagtagagaaaaaatgttagttaactttgtaggaaataaaacattggacttacactaaa

SEQ ID NO: 143701 - DNA, 4613 bp, Homo sapiens
  Payload ID: 8394
  Gene Symbol: IFIT1
  Gene Name: interferon-induced protein with tetratricopeptide repeats 1
  Uniprot ID: P09914
  ENST ID: ENST00000546318
  CDS Start-End: 496-1839
gcaaggacacacccacagcttacaccattggctgctgtttagctcccttatataacactgtcttggggtttaaacgtaactgaaaatccacaagacagaatagccagatctcagaggagcctggctaagcaaaaccctgcagaacggctgcctaatttacagcaaccatgaggttctttaccacagagaaaaagcaggacccacaagaatgtgaaagcctcagtcttgcagcctctctgatgtcttgtgggtaatacagtggagatgtggtaggaaaagctcacagccttcctccataggcttctggtctcactttctgcactgctggcctcttacaacaggttttcgcaatcaggctgagcttaagataaacagattgcctcctccctggaaaatctaggctcttgtacaaatggtgatgatcatcaggtcaaggatagtctggagcaattgagatgtcactttacatgggagttatccattgatgacgatgaaatgcctgatttagaaaacagagtcttggatcagattgaattcctagacaccaaatacagtgtgggaatacacaacctactagcctatgtgaaacacctgaaaggccagaatgaggaagccctgaagagcttaaaagaagctgaaaacttaatgcaggaagaacatgacaaccaagcaaatgtgaggagtctggtgacctggggcaactttgcctggatgtattaccacatgggcagactggcagaagcccagacttacctggacaaggtggagaacatttgcaagaagctttcaaatcccttccgctatagaatggagtgtccagaaatagactgtgaggaaggatgggccttgctgaagtgtggaggaaaaaattatgaacgggccaaggcctgctttgaaaaggtgcttgaagtggaccctgaaaaccctgaatccagcgctgggtatgcgatctctgcctatcgcctggatggctttaaattagccacaaaaaatcacaagccattttctttgcttcccctaaggcaggctgtccgcttaaatccagacaatggatatattaaggttctccttgccctgaagcttcaggatgaaggacaggaagctgaaggagaaaagtacattgaagaagctctagccaacatgtcctcacagacctatgtctttcgatatgcagccaagttttaccgaagaaaaggctctgtggataaagctcttgagttattaaaaaaggccttgcaggaaacacccacttctgtcttactgcatcaccagatagggctttgctacaaggcacaaatgatccaaatcaaggaggctacaaaagggcagcctagagggcagaacagagaaaagctagacaaaatgataagatcagccatatttcattttgaatctgcagtggaaaaaaagcccacatttgaggtggctcatctagacctggcaagaatgtatatagaagcaggcaatcacagaaaagctgaagagaattttcaaaaattgttatgcatgaaaccagtggtagaagaaacaatgcaagacatacatttccactatggtcggtttcaggaatttcaaaagaaatctgacgtcaatgcaattatccattatttaaaagctataaaaatagaacaggcatcattaacaagggataaaagtatcaattctttgaagaaattggttttaaggaaacttcggagaaaggcattagatctggaaagcttgagcctccttgggttcgtctacaaattggaaggaaatatgaatgaagccctggagtactatgagcgggccctgagactggctgctgactttgagaactctgtgagacaaggtccttaggcacccagatatcagccactttcacatttcatttcattttatgctaacatttactaatcatcttttctgcttactgttttcagaaacattataattcactgtaatgatgtaattcttgaataataaatctgacaaaatattagttgtgttcaacaattagtgaaacagaatgtgtgtatgcatgtaagaaagagaaatcatttgtatgagtgctatgtagtagagaaaaaatgttagttaactttgtaggaaataaaacattggacttacactaaatgtttaattcattcattttattgtgaaataaaaataaaatccttagctcctccaccaactgaacagaccctcttggccaaggagaccccagaaaccttaaaaactaagtttcccaaccatgacaagatgagagatcattcacacctcattatattccctcccttgctaactgccattggactttttccactgagttaaacagaaacccatggaaaacaaagaacagaagactcactccttggctgacttcacctagctcactccacgtagcgccacagccagactcccctcccctcttgcggtttccacatgacaactgatcagccttccctcctgataagtgaccactgcccacagactggttctggccagtccatggaggctgcacacagggtgcctctatgtcctttgtttcaccttttgatatagaaaggctaattttgctgtattttaatgttaagtctccaccacagagtgaacacagaatgcatgtgacatacatgtttacataccactattgtgtgactgcccctcatgaatattcatagccccccataacctgttaactatgtgtgtctagccaatccaccaaccataaaacttctgtaataccctcccttcctccaagagcctgcttttggttgctgtggtaggctctgcttcccaggctgcaggttgcaggagaggaggctgcagtggctcacgcctgtaatctcagcacttcgatgggacgaggcaggcagatcacctgaacccaggagttcgagagcagccttggcaatggcaaaaccaaccgtctctacaaaaaatgcaaaaacttagctgggtgtggtggcatgcacctgtagcttcagttccagctactcaggaggctgaggtgagtggactgctggagccagggagttcgaggctgcagtgtcgagatcttgccactgcactccattctggatgatagaacgagaccccatctcaaaaaaaaaaaaagttctctccaattgtatatagcttgtgattttatgtcaacactatcaataaatagctttcagtgcaagaaaccaaaaatactgtaataaacaggcacatattcttcccaaacctcatgcagtttacaatctagtgagagacacagatagcagtacagagtcaattaaaggttagttttcttcatgaagatgttttaattttaattcaatgtgaaagggttccaaggagtttatcttgttttatgccattttatttgaagcactacttactaagtcatttgctgatattaatctagttaaatcaagaaatattacatgaaaatgttgctaaatcagagatcatgggtaacaatcacctttgattatgaataatcatattttattgaaaggcaaggcacaacaaataataagaaggaaaaaataaataagcaatgttattgatctttcattctgtatatgttttggggggaatatactagtttcttttagtggctgtaacaaattaccacaaacttggtgacttaaaatttcacagatttactctttcttacagttctggaggtcagaagtctgaaatgggtttcaatgagccaaagtcaaggtattgatgacgctacactcctccggaggctctaggcagatagccttttccagcttccagaggctgcctgaattctttcatccatcttaaaaaccaacagtgtagtagcctcaaatctctctctctgcttccttcttcacatctccttctctcctctgactcttttgcctctttcttctaaggacgcaccaggtccacctgcataatccagaataattgccccatccgcaaatccttaatttaataacatctgcaaagtcccttttgctatgtaaagtagcatgttcacaggttctggagacttggccatggatacgattgcggggggggcattattcttaccacagagcaccccaagaaaatctccaaattttgggcttccaatccattttgcttcaattatttaatatttttactccttccagtagatactgatttcatccattgcccttaagaaggtaggacagagattatggcacatctcacattaaatgctatattttcgttggaaatacattttttgcttcaacttttattttaaattcaagggtacatgtgcaggatgttcaggtttgttacacaggtaaacgtgtgccatggcggtttgctgaacagatcatcccatcaccaacagatcatcccattgagaggtgaagccggctgggcttctgggttgggtggggacttggagaacttttctgtctagctaaagtattgtaaaatggaccagtcaacactctgtaaaatggaccaatcagctctctgtaaaatggaccaatcagcaggatgtgggtggggccaagtaagggaataaaagcaggccacccgagctggcagcggcaacccgctcgggtccccttccatgctgtggaagttttgttctttcgctctttcaataaatcttgctgctgctc

SEQ ID NO: 143702 - DNA, 1972 bp, Homo sapiens
  Payload ID: 8395
  Gene Symbol: IFIT1B
  Gene Name: interferon-induced protein with tetratricopeptide repeats 1B
  Uniprot ID: Q5T764
  ENST ID: ENST00000371809
  CDS Start-End: 81-1505
agaactctgtggatgaaccttgaaggagcctccaagcctgaaccaaagcactacagatcacctgctatcttcatagcaccatgagtgaagaatctgatggaaagcttattgaagacagcctgattcagctgagatgtcactttacatggaagttgttaattgaagcccctgaaattcctgatttagaaaacaggatctgggaagagattcagttcctggacaccaaatacaatgtgggaatacacaacctactagcctatgtgaaacacctgaaaggccagaatgaggaagccctggtcagcttgaaaaaggctgaagacttaattcagaaagaacatgccaaccaagcagatattagaagtctggtgacctggggcaactttgcctgggtgtattaccacatgggcagattggcagaagcccagacttacctggacaaggtggagaacacttgcaagaagtttgcaaatccttcccgctatagaatggagtgtccagaggtggactgtgaggaaggatgggccttggcgaagtgtggtggaaagaattatgaacgggccaagacctgctttgaaaaggctctggaagggaaccctgaaaaccctgaattcaatactgggtacgcaatcaccgtctatcgcctggataaatttaacacagcatcagggaggaataaggcattttctctgcacgtcctaaaacgagctgtcaggctaaatccagatgatgtatatattagggttctccttgccctgaagcttcaggatgaaggacaggaagctgaaggagaaaagtacattgaagaagctctgaccagtatatcttcacaggcctatgtctttcaatatgcagccaagttttatcgaagaaaagggtctgtggataaagctcttgagctcttaaaaatggccttggagacaacacccacttctgccttcctgcatcaccaaatggggctttgctacagggcacaaatgatccaaatcaaggaagctacaaactggcagcctagagggcaagatagggaaactgtggacagattggttcaattggctatatgcaaatttgaaaagactataatgttaaagcgaacatttgagatggcctatgttgacctggctgaaacgtatgcagaaataggccaccacagaaaggctgaggaacattttcagaaagggttacgcatgaagatctttgaagatcagctaaagcaagagattcattaccactacggccgtttccaagaacatcatgggaaatctcaagataaagcaattacccattatttaaaaggtttgaaaatagaaaaaatgtcccattccagggaaaaacttctcaatgctttagagaaattggctaaaagatgtattcaccagaatgtacgggttgtggaaagtgtcagcctccttgggcttatccacaaattgaaaggagaagtaagtgatgctttgctgtgctatgagagggctctgaggctggctgctgacctgaaccctatattttaacatagaggtcaccattatccatttaatggtcttataactaaatagaatgactatgaaattaaataatgcaaacttaaagctgttggaaatttaccttattttgagccttgagaggaatgtggctgtgtggcctgagttatgtagcatgcaactgcaacttctgctttttcctgtaaatgatcaggaaaggccttgtggcaccagacataagaccccctgaaagtatcatccctcctgatggaatggtaaagcaatctttcttggaacatagcaagtagtaaccgatcaaattgctataacgtgtgtactgaccttatgtggaaaatgctgcaaccctgtttactgcctatgtaagtgaaatcttaacttccccattttggaatgctgactccagtcattaggtgtctgtatttcctgagtggttaccctcaagctttgtgctcaaataaactctatacttaatcata

SEQ ID NO: 143703 - DNA, 3489 bp, Homo sapiens
  Payload ID: 8396
  Gene Symbol: IFIT2
  Gene Name: interferon-induced protein with tetratricopeptide repeats 2
  Uniprot ID: P09913
  ENST ID: ENST00000371826
  CDS Start-End: 170-1588
actttcccttttgtaacgtcagctgaagggaaacaaacaaaaaggaaccagaggccacttgtatatataggtctcttcagcatttattggtggcagaagaggaagatttctgaagagtgcagctgcctgaaccgagccctgccgaacagctgagaattgcactgcaaccatgagtgagaacaataagaattccttggagagcagcctacggcaactaaaatgccatttcacctggaacttgatggagggagaaaactccttggatgattttgaagacaaagtattttaccggactgagtttcagaatcgtgaattcaaagccacaatgtgcaacctactggcctatctaaagcacctcaaagggcaaaacgaggcagccctggaatgcttacgtaaagctgaagagttaatccagcaagagcatgctgaccaggcagaaatcagaagtctggtcacctggggaaactatgcctgggtctactatcacatgggccgactctcagacgttcagatttatgtagacaaggtgaaacatgtctgtgagaagttttccagtccctatagaattgagagtccagagcttgactgtgaggaagggtggacacggttaaagtgtggaggaaaccaaaatgaaagagcgaaggtgtgctttgagaaggctctggaaaagaagccaaagaacccagaattcacctctggactggcaatagcaagctaccgtctggacaactggccaccatctcagaacgccattgaccctctgaggcaagccattcggctgaatcctgacaaccagtaccttaaagtcctcctggctctgaagcttcataagatgcgtgaagaaggtgaagaggaaggtgaaggagagaagttagttgaagaagccttggagaaagccccaggtgtaacagatgttcttcgcagtgcagccaagttttatcgaagaaaagatgagccagacaaagcgattgaactgcttaaaaaggctttagaatacataccaaacaatgcctacctgcattgccaaattgggtgctgctatagggcaaaagtcttccaagtaatgaatctaagagagaatggaatgtatgggaaaagaaagttactggaactaataggacacgctgtggctcatctgaagaaagctgatgaggccaatgataatctcttccgtgtctgttccattcttgccagcctccatgctctagcagatcagtatgaagacgcagagtattacttccaaaaggaattcagtaaagagcttactcctgtagcgaaacaactgctccatctgcggtatggcaactttcagctgtaccaaatgaagtgtgaagacaaggccatccaccactttatagagggtgtaaaaataaaccagaaatcaagggagaaagaaaagatgaaagacaaactgcaaaaaattgccaaaatgcgactttctaaaaatggagcagattctgaggctttgcatgtcttggcattccttcaggagctgaatgaaaaaatgcaacaagcagatgaagactctgagaggggtttggagtctggaagcctcatcccttcagcatcaagctggaatggggaatgaagaatagagatgtggtgcccactaggctactgctgaaagggagctgaaattcctccaccaagttggtattcaaaatatgtaatgactggtatggcaaaagattggactaagacactggccataccactggacagggttatgttaacacctgaattgctgggtcttgagagagcccaaggagttctgggagagggaccagattggggggtaggtccacgggcttggtgatagaattatttctcgattgacttcttgagtgcaatttgaactgtaacatttgcttagtcacctttagtggagtaatctactgggcttgtttctatatttatataaagcagccaaatccttcatgtaatattgaagtccatttttgcaatgttgttccatacttggagtcattttgcatcccatagaggttagtcctgcatagccagtaatgtgctaagttcatccaaaagctggcggaccaaagtctaaatagggctcagtatcccccatcgcttatctctgcctccttcctcctccttcccagtctatcatcaaccttgagtattctacacaatgtgaattcaagtgcctgattaattgaggtggcaacatagtttgagacgagggcagagaacaggaagatacatagctagaagcgacgggtacaaaaagcaatgtgtacaagaagactttcagcaagtatacagagagttcacctctactctgccctcctcatagtcataatgtagcaagtaaagaatgagaatggattctgtacaatacactagaaaccaacataatgtatttctttaaaacctgtgtgaaaaaataaatgttccaccagtagggataggggaaaagtaaccaaaagagagaaagagaaaggaatgctggtttatctttgtagattgtaatcgaatggagaaatttgcagtattttagccactattaggaattttttttttttgtaaaatgaagactgaactctgttcaaatgctttcatgaacctggtttgagacggtaggaaagcaacaaaacgtgggaacctggtgactaagggcctggtgcaaggacttgggaaatgtcattgataatagatggtggggttttcccccctttagaaatgttggatattaagtgatataaacacttcttttaactccgaaaatcttctgagaaatcacaaaattcacggtatgcttggaacgattgagattttctaggtagatgctgaatagcctagacatcaaagttggtgtgaaccaaaatagagtcagctgacccagcatcagccacactctgggttggaaaatgtttgcctgttggaattaatttaagcttaagtatatatcaacattattttattgtgcaattaaaacaatacaaattcatggttttttaaagttaaaaattctaaccactgtaacaacagtttttgtgttattttctgtattaaacatcttgttgcacgcatttgaggtcatcagggtgcaaaatttgtattcctgaaaatgtcatatattttcattaataaataacctaaatatgataaaacataaagcagtgttctggttcatctggaattttgctgtactttaaatctttcagactcagctactgataaatgaaacgttacacaggtgtgaaccaaatccaaataacctcgactggtctactatcataatcacctgaacagaacaaaactttttcctcagctttaagagtccagggcttcggataacagctgccatctgccacctgctaccattgacctacgtgaacacagacattctgtctccaccttgatggtgggtgggctgctccccttttctttgttaaattttgtgctttcatcacattttctctattctgacctctgttatgagaaataaaagtcactgattccatttta

SEQ ID NO: 143704 - DNA, 3038 bp, Homo sapiens
  Payload ID: 8396
  Gene Symbol: IFIT2
  Gene Name: interferon-induced protein with tetratricopeptide repeats 2
  ENST ID: ENST00000611722
  CDS Start-End: 79-1530
ggcagaagaggaagatttctgaagagtgcagctgcctgaaccgagccctgccgaacagctgagaattgcactgcaaccatgagtgagaacaataagaattccttggagagcagcctacggcaactaaaatgccatttcacctggaacttgatggagggagaaaactccttggatgattttgaagacaaagtattttaccggactgagtttcagaatcgtgaattcaaagccacaatgtgcaacctactggcctatctaaagcacctcaaagggcaaaacgaggcagccctggaatgcttacgtaaagctgaagagttaatccagcaagagcatgctgaccaggcagaaatcagaagtctggtcacctggggaaactatgcctgggtctactatcacatgggccgactctcagacgttcagatttatgtagacaaggtgaaacatgtctgtgagaagttttccagtccctatagaattgagagtccagagcttgactgtgaggaagggtggacacggttaaagtgtggaggaaaccaaaatgaaagagcgaaggtgtgctttgagaaggctctggaaaagaagccaaagaacccagaattcacctctggactggcaatagcaagctaccgtctggacaactggccaccatctcagaacgccattgaccctctgaggcaagccattcggctgaatcctgacaaccagtaccttaaagtcctcctggctctgaagcttcataagatgcgtgaagaaggtgaagaggaaggtgaaggagagaagttagttgaagaagccttggagaaagccccaggtgtaacagatgttcttcgcagtgcagccaagttttatcgaagaaaagatgagccagacaaagcgattgaactgcttaaaaaggctttagaatacataccaaacaatgcctacctgcattgccaaattgggtgctgctatagggcaaaagtcttccaagtaatgaatctaagagagaatggaatgtatgggaaaagaaagttactggaactaataggacacgctgtggctcatctgaagaaagctgatgaggccaatgataatctcttccgtgtctgttccattcttgccagcctccatgctctagcagatcagtatgaagacgcagagtattacttccaaaaggaattcagtaaagagcttactcctgtagcgaaacaactgctccatctgcggtatggcaactttcagctgtaccaaatgaagtgtgaagacaaggccatccaccactttatagagggtgtaaaaataaaccagaaatcaagggagaaagaaaagatgaaagacaaactgcaaaaaattgccaaaatgcgactttctaaaaatggagcagattctgaggctttgcatgtcttggcattccttcaggagctgaatgaaaaaatgcaacaagcagatgaagactctgagaggggtttggagtctggaagcctcatcccttcagcatcaagctggaatggggaaagaatagagatgtggtgcccactaggctactgctgaaagggagctgaaattcctccaccaagttggtattcaaaatatgtaatgactggtatggcaaaagattggactaagacactggccataccactggacagggttatgttaacacctgaattgctgggtcttgagagagcccaaggagttctgggagagggaccagattggggggtaggtccacgggcttggtgatagaattatttctcgattgacttcttgagtgcaatttgaactgtaacatttgcttagtcacctttagtggagtaatctactgggcttgtttctatatttatataaagcagccaaatccttcatgtaatattgaagtccatttttgcaatgttgttccatacttggagtcattttgcatcccatagaggttagtcctgcatagccagtaatgtgctaagttcatccaaaagctggcggaccaaagtctaaatagggctcagtatcccccatcgcttatctctgcctccttcctcctccttcccagtctatcatcaaccttgagtattctacacaatgtgaattcaagtgcctgattaattgaggtggcaacatagtttgagacgagggcagagaacaggaagatacatagctagaagcgacgggtacaaaaagcaatgtgtacaagaagactttcagcaagtatacagagagttcacctctactctgccctcctcatagtcataatgtagcaagtaaagaatgagaatggattctgtacaatacactagaaaccaacataatgtatttctttaaaacctgtgtgaaaaaataaatgttccaccagtagggataggggaaaagtaaccaaaagagagaaagagaaaggaatgctggtttatctttgtagattgtaatcgaatggagaaatttgcagtattttagccactattaggaattttttttttttgtaaaatgaagactgaactctgttcaaatgctttcatgaacctggtttgagacggtaggaaagcaacaaaacgtgggaacctggtgactaagggcctggtgcaaggacttgggaaatgtcattgataatagatggtggggttttcccccctttagaaatgttggatattaagtgatataaacacttcttttaactccgaaaatcttctgagaaatcacaaaattcacggtatgcttggaacgattgagattttctaggtagatgctgaatagcctagacatcaaagttggtgtgaaccaaaatagagtcagctgacccagcatcagccacactctgggttggaaaatgtttgcctgttggaattaatttaagcttaagtatatatcaacattattttattgtgcaattaaaacaatacaaattcatggttttttaaagttaaaaattctaaccactgtaacaacagtttttgtgttattttctgtattaaacatcttgttgcacgcatttgaggtcatcagggtgcaaaatttgtattcctgaaaatgtcatatattttcattaataaataacctaaatatgataaaac

SEQ ID NO: 143705 - DNA, 2455 bp, Homo sapiens
  Payload ID: 8397
  Gene Symbol: IFIT3
  Gene Name: interferon-induced protein with tetratricopeptide repeats 3
  Uniprot ID: O14879
  ENST ID: ENST00000371811
  CDS Start-End: 140-1612
tttcctttcccctttcataaaagcacagacctaacagcaccctgggtggaaacctcttcagcatttgcttggaatcagtaagctaaaaacaaaatcaaccgggaccccagcttttcagaactgcagggaaacagccatcatgagtgaggtcaccaagaattccctggagaaaatccttccacagctgaaatgccatttcacctggaacttattcaaggaagacagtgtctcaagggatctagaagatagagtgtgtaaccagattgaatttttaaacactgagttcaaagctacaatgtacaacttgttggcctacataaaacacctagatggtaacaacgaggcagccctggaatgcttacggcaagctgaagagttaatccagcaagaacatgctgaccaagcagaaatcagaagtctagtcacttggggaaactacgcctgggtctactatcacttgggcagactctcagatgctcagatttatgtagataaggtgaaacaaacctgcaagaaattttcaaatccatacagtattgagtattctgaacttgactgtgaggaagggtggacacaactgaagtgtggaagaaatgaaagggcgaaggtgtgttttgagaaggctctggaagaaaagcccaacaacccagaattctcctctggactggcaattgcgatgtaccatctggataatcacccagagaaacagttctctactgatgttttgaagcaggccattgagctgagtcctgataaccaatacgtcaaggttctcttgggcctgaaactgcagaagatgaataaagaagctgaaggagagcagtttgttgaagaagccttggaaaagtctccttgccaaacagatgtcctccgcagtgcagccaaattttacagaagaaaaggtgacctagacaaagctattgaactgtttcaacgggtgttggaatccacaccaaacaatggctacctctatcaccagattgggtgctgctacaaggcaaaagtaagacaaatgcagaatacaggagaatctgaagctagtggaaataaagagatgattgaagcactaaagcaatatgctatggactattcgaataaagctcttgagaagggactgaatcctctgaatgcatactccgatctcgctgagttcctggagacggaatgttatcagacaccattcaataaggaagtccctgatgctgaaaagcaacaatcccatcagcgctactgcaaccttcagaaatataatgggaagtctgaagacactgctgtgcaacatggtttagagggtttgtccataagcaaaaaatcaactgacaaggaagagatcaaagaccaaccacagaatgtatctgaaaatctgcttccacaaaatgcaccaaattattggtatcttcaaggattaattcataagcagaatggagatctgctgcaagcagccaaatgttatgagaaggaactgggccgcctgctaagggatgccccttcaggcataggcagtattttcctgtcagcatctgagcttgaggatggtagtgaggaaatgggccagggcgcagtcagctccagtcccagagagctcctctctaactcagagcaactgaactgagacagaggaggaaaacagagcatcagaagcctgcagtggtggttgtgacgggtaggacgataggaagacagggggccccaacctgggattgctgagcagggaagctttgcatgttgctctaaggtacatttttaaagagttgttttttggccgggcgcagtggctcatgcctgtaatcccagcactttgggaggccgaggtgggcggatcacgaggtctggagtttgagaccatcctggctaacacagtgaaatcccgtctctactaaaaatacaaaaaattagccaggcgtggtggctggcacctgtagtcccagctacttgggaggctgaggcaggagaatggcgtgaacctggaaggaagaggttgcagtgagccaagattgcgcccctgcactccagcctgggcaacagagcaagactccatctcaaaaaaaaaaaaaaaaaaaaaaaagagttgttttctcatgttcattatagttcattacagttacatagtccgaaggtcttacaactaatcactggtagcaataaatgcttcaggcccacatgatgctgattagttctcagttttcattcagttcacaatataaccaccattcctgccctccctgccaagggtcataaatggtgactgcctaacaacaaaatttgcagtctcatctcattttcatccagacttctggaactcaaagattaacttttgactaaccctggaatatctcttatctcacttatagcttcaggcatgtatttatatgtattcttgatagcaataccataatcaatgtgtattcctgatagtaatgctacaataaatccaaacatttcaactctgttagaa

SEQ ID NO: 143706 - DNA, 2496 bp, Homo sapiens
  Payload ID: 8397
  Gene Symbol: IFIT3
  Gene Name: interferon-induced protein with tetratricopeptide repeats 3
  Uniprot ID: O14879
  ENST ID: ENST00000371818
  CDS Start-End: 181-1653
cttccttcccctaaaagcaattactcaaaaacggagaaaacatcagctgatgcgtgccctactctcccacccctttatatagttccttcagtatttacttgaggcagacaggaagacttctgaagaacaaatcagcctggtcaccagcttttcggaacagcagagacacagagggcagtcatgagtgaggtcaccaagaattccctggagaaaatccttccacagctgaaatgccatttcacctggaacttattcaaggaagacagtgtctcaagggatctagaagatagagtgtgtaaccagattgaatttttaaacactgagttcaaagctacaatgtacaacttgttggcctacataaaacacctagatggtaacaacgaggcagccctggaatgcttacggcaagctgaagagttaatccagcaagaacatgctgaccaagcagaaatcagaagtctagtcacttggggaaactacgcctgggtctactatcacttgggcagactctcagatgctcagatttatgtagataaggtgaaacaaacctgcaagaaattttcaaatccatacagtattgagtattctgaacttgactgtgaggaagggtggacacaactgaagtgtggaagaaatgaaagggcgaaggtgtgttttgagaaggctctggaagaaaagcccaacaacccagaattctcctctggactggcaattgcgatgtaccatctggataatcacccagagaaacagttctctactgatgttttgaagcaggccattgagctgagtcctgataaccaatacgtcaaggttctcttgggcctgaaactgcagaagatgaataaagaagctgaaggagagcagtttgttgaagaagccttggaaaagtctccttgccaaacagatgtcctccgcagtgcagccaaattttacagaagaaaaggtgacctagacaaagctattgaactgtttcaacgggtgttggaatccacaccaaacaatggctacctctatcaccagattgggtgctgctacaaggcaaaagtaagacaaatgcagaatacaggagaatctgaagctagtggaaataaagagatgattgaagcactaaagcaatatgctatggactattcgaataaagctcttgagaagggactgaatcctctgaatgcatactccgatctcgctgagttcctggagacggaatgttatcagacaccattcaataaggaagtccctgatgctgaaaagcaacaatcccatcagcgctactgcaaccttcagaaatataatgggaagtctgaagacactgctgtgcaacatggtttagagggtttgtccataagcaaaaaatcaactgacaaggaagagatcaaagaccaaccacagaatgtatctgaaaatctgcttccacaaaatgcaccaaattattggtatcttcaaggattaattcataagcagaatggagatctgctgcaagcagccaaatgttatgagaaggaactgggccgcctgctaagggatgccccttcaggcataggcagtattttcctgtcagcatctgagcttgaggatggtagtgaggaaatgggccagggcgcagtcagctccagtcccagagagctcctctctaactcagagcaactgaactgagacagaggaggaaaacagagcatcagaagcctgcagtggtggttgtgacgggtaggacgataggaagacagggggccccaacctgggattgctgagcagggaagctttgcatgttgctctaaggtacatttttaaagagttgttttttggccgggcgcagtggctcatgcctgtaatcccagcactttgggaggccgaggtgggcggatcacgaggtctggagtttgagaccatcctggctaacacagtgaaatcccgtctctactaaaaatacaaaaaattagccaggcgtggtggctggcacctgtagtcccagctacttgggaggctgaggcaggagaatggcgtgaacctggaaggaagaggttgcagtgagccaagattgcgcccctgcactccagcctgggcaacagagcaagactccatctcaaaaaaaaaaaaaaaaaaaaaaaagagttgttttctcatgttcattatagttcattacagttacatagtccgaaggtcttacaactaatcactggtagcaataaatgcttcaggcccacatgatgctgattagttctcagttttcattcagttcacaatataaccaccattcctgccctccctgccaagggtcataaatggtgactgcctaacaacaaaatttgcagtctcatctcattttcatccagacttctggaactcaaagattaacttttgactaaccctggaatatctcttatctcacttatagcttcaggcatgtatttatatgtattcttgatagcaataccataatcaatgtgtattcctgatagtaatgctacaataaatccaaacatttcaactctgttagaa

SEQ ID NO: 143707 - DNA, 4015 bp, Homo sapiens
  Payload ID: 8398
  Gene Symbol: IFIT5
  Gene Name: interferon-induced protein with tetratricopeptide repeats 5
  Uniprot ID: Q13325
  ENST ID: ENST00000371795
  CDS Start-End: 214-1662
atctgattcaatctccagtttcctgttcttgctggggctggggtctctcctttaacaaagacacgccgcgcggccgagtccaggggctgcagaggcctggcgcgcgcacgcgcacgcgcacgcccaccgcgcggcttcccgcggtccccggtgctgaggagagagcgatccgagggactgcgccgcccggacggcctgcagagcgctgccatcatgagtgaaattcgtaaggacaccttgaaggccattctgttggagttagaatgtcattttacatggaatttacttaaggaagacattgatctgtttgaggtagaagatacaattgggcaacagcttgaatttcttaccacaaaatctagacttgctctttataacctattggcctatgtgaaacacctaaaaggccaaaataaagacgcccttgagtgcttggaacaagcagaagaaataatccagcaagaacactcagacaaagaagaagtacgaagcctggtcacttggggaaactatgcctgggtgtattatcacatggaccagcttgaagaagctcagaagtatacaggtaagatagggaatgtctgtaagaaattgtccagtccttctaactacaagttggagtgtcctgagactgactgtgagaaaggctgggcactcttgaaatttggaggaaagtattatcaaaaggctaaagcggcttttgagaaggctctggaagtggagcctgacaatccagaatttaacatcggctatgctatcacagtgtatcggctggatgattctgatagagaagggtctgtaaagagcttttctctggggcctttgagaaaggctgttaccctgaacccagataacagctatattaaggtttttctggcactgaagcttcaagatgtacatgcagaagctgaaggggaaaagtatattgaagaaatcctggaccaaatatcatcccagccttacgtccttcgttatgcagccaagttctataggagaaaaaattcctggaacaaagctctcgaacttttaaaaaaggccttggaggtgacaccaacttcttctttcctgcatcaccagatgggactttgctacagggcacaaatgatccaaatcaagaaggccacacacaacagacctaaaggaaaggataaactaaaggttgatgagctgatttcatctgctatatttcatttcaaagcagccatggaacgagactctatgtttgcatttgcctacacagacctggccaacatgtacgctgaaggaggccagtatagcaatgctgaggacattttccggaaagctcttcgtctggagaacataaccgatgatcacaaacatcagatccattaccactatggccgctttcaggaatttcaccgtaaatcagaaaatactgccatccatcattatttagaagccttaaaggtcaaagacagatcaccccttcgcaccaaactgacaagtgctctgaagaaattgtctaccaagagactttgtcacaatgctttagatgtgcagagtttaagtgccctagggtttgtttacaagctggaaggagaaaagaggcaagctgctgagtactatgagaaggcacaaaagatagatccagaaaatgcagaattcctgactgctctctgtgagctccgactttccatttaaatacatactctaggaaattagctctaagtttttcccttcattttgggttctcctgtttgttttttttttattattttaatcccttgtttattatagagctaatatttattgaatagttattgtgtaccaagcattgtgctaaatactttatatgcattatgatgaatcttgtgcggttttctttctttttttctttttaattaaaatactataatccattgagaaatagcaatattctagctattgtaacttctaaaaatggtatggccattagatctgtgctttttatctctgctctttgaatttctcatattatatagtaaatatattcctacgtaaacctttgatacctagatcaggaatactcttccaggagtacaaaattacattattgatagttaagctcttaattgtgtagcttgcaaaagacagcactttttagttacagatgttttgactttgatgaggatatttagctatcaatctaatagtcacctaaaatatcttttttgttggaaaaaagtttataataaaaaagtttgtcatctctagtgacttcaataaagaaaaaactagaagaggagaaaaaggatttcctcaaattttaaatatgtaacttcagggattcaatccccaaatgtttattaagtagctagaaataattatgtggaaaaaaatgaataatggaaaatagtgagtctcaaattgttctctttttttttttaactaaaacaaatctgcaatgaatctagatgcaattaattttattccttccaactaaaattacaatatttttaggttaaaattattgagatataaagcagccattgggaaattgggagaaatgataaacaaatggaaaaagaagatgtccctaacctacacccatagattaccaaggtttcagtgtactagttttgaatctgttctgaatggagtttttataccctcaatttctggcctttggctattttagcatttcaaagtgacttctatgaagctttttttttaatgtgaaattttcagaatgttgtttttttcatgtagatactccaggaagagttaagcactgctttcagttttaatatccaccttgaggggtcgctgcttgagggctcttatcccaggggactttttaattcggatgttacttaatgtggcttctctaatgtagtttctttgattaccgactacacaattatgtaccatcacagtattagtggaaaagtaccatgtgatttaattctccattcctccaatgtaactcttaaaattattatgtatgtgtgtgtgttttactttttgttttttatcatctttaaaatttctattatggtttgattattataaaaataatgaattctcactgtaaatttcaaaaaaaaattacaaaagtatgtgaatttaaaaatgagagcagtcctctcaccctaccacagttccacaccctcaaggtaaacttataacttataatttgatatgtaaacttccagatcttttttctatgcgtaatcagacatacatatatactgcagtgtatctcacgtattaatttttaaaaatcttttgttttacttaattctgtttttattattattattattttgtttgatctattaaggaagaacaaggaagggaatgatctttactcaagaatttcagaaagtcagcactgaagtcctgacctatcagtagacacatttgtccctttcagatattttaggatattctagcaaagcaggccatttctcccacctgaaagtacataacttctatcacttgccacataattaaaagaactcacattaagcggttactcagacagttaatcatagaaaagattatttgcttcatcagttcatagaaaagattatttgcttcatcagttaacttgtttttataaatcagggctgtgttcatacacagaaggggcctgagatttctgcactttaaacaagctcctcctaggtgaggatgctgtggctgttctaattacattttgagtagtaaggtctacagcattgttcctcaaacttggctacgtattggaatcacctaaaaagttaaaacaaaacatggatgtctgggtcccgccccatagagaatgacttaattggcatggggtgcagtccaggcatcatgatttttagatttcccagttggaacttgtgcagcaaagtttgggagctactgatggacatgtgaaaagtaagtataaatggaataaaattaattaggctaataggcttaacccaggaaatcctaagttccttgaatatccagtttgcatttggactcctcatcatatacttggtatataatactctaataaaagctgcctgagttgaattgt

SEQ ID NO: 143708 - DNA, 1834 bp, Homo sapiens
  Payload ID: 8399
  Gene Symbol: IFRD1
  Gene Name: interferon-related developmental regulator 1
  Uniprot ID: O00458
  ENST ID: ENST00000005558
  CDS Start-End: 471-1826
gttaaaaccagactgcactccttctggctcctggttcattcaaggtctacatagttaaaggttgttccagagggatgtgtgtaattcctcccagtatttgatgttcctttattacttattttcacttgagccaacagcctgaactggtcaggctttgggctgatgccagctgctttatctggtagcactgttacataaaattaacatttattggtgatcactaggtgccaacattatgcgaagaactttacgtggacatcccatttaattctcagaagccgatcacaagctcttcacggggatttctgctgccgccaccgcccactcttacccccgccgcttctcgactctgttgttagccgaagactcgcctctcagccgcccgccgcacagacgcacgagtaaaaagtgcagctccatcggctgatcctcgctaagctccgactctgggcggcaccgggcgtcccacgatgccgaagaacaagaagcggaacactccccaccgcggtagcagtgctggcggcggcgggtcaggagcagccgcagcgacggcggcgacagcaggtggccagcatcgaaatgttcagccttttagtgatgaagatgcatcaattgaaacaatgagccattgcagtggttatagcgatccttccagttttgctgaagatggaccagaagtccttgatgaggaaggaactcaagaagacctagagtacaagttgaagggattaattgacctaaccctggataagagtgcgaagacaaggcaagcagctcttgaaggtattaaaaatgcactggcttcaaaaatgctgtatgaatttattctggaaaggagaatgactttaactgatagcattgaacgctgcctgaaaaaaggtaagagtgatgagcaacgtgcagctgcagcgttagcatctgttctttgtattcagctgggccctggaattgaaagtgaagagattttgaaaactcttggaccaatcctaaagaaaatcatttgtgatgggtcagctagtatgcaggctaggcaaacttgtgcaacttgctttggtgtttgctgttttattgccacagatgacattactgaactatactcaactctggaatgtttggaaaatatcttcactaaatcctatctcaaagagaaagacactactgttatttgcagcactcctaatacagtgcttcatatcagctctcttcttgcatggacactactgctgaccatatgcccaatcaatgaagtgaagaaaaagcttgagatgcatttccataagcttccaagcctcctctcttgtgatgatgtaaacatgagaatagctgctggtgaatctttggcacttctctttgaattggccagaggaatagagagtgactttttttatgaagacatggagtccttgacgcagatgcttagggccttggcaacagatggaaataaacaccgggccaaagtggacaagagaaagcagcggtcagttttcagagatgtcctgagggcagtggaggaacgggattttccaacagaaaccattaaatttggtcctgaacgcatgtatattgattgctgggtaaaaaaacacacctatgacacctttaaggaggttcttggatcagggatgcagtaccacttgcagtcaaatgaattccttcgaaatgtatttgaacttggacccccagtgatgcttgatgctgcaacgcttaaaacgatgaagatttctcgtttcgaaaggcatttatataactctgcagccttcaaagctcgaaccaaagctagaagcaaatgtcgagataagagagcagatgttggagaattcttctagattttcag

SEQ ID NO: 143709 - DNA, 2290 bp, Homo sapiens
  Payload ID: 8399
  Gene Symbol: IFRD1
  Gene Name: interferon-related developmental regulator 1
  Uniprot ID: O00458
  ENST ID: ENST00000403825
  CDS Start-End: 262-1617
gctacttaaggcgtcgtggcctcccctgccccgccttagctcccgcgctagagagaaacatgtatcgttttcgatcacagctcttcacggggatttctgctgccgccaccgcccactcttacccccgccgcttctcgactctgttgttagccgaagactcgcctctcagccgcccgccgcacagacgcacgagtaaaaagtgcagctccatcggctgatcctcgctaagctccgactctgggcggcaccgggcgtcccacgatgccgaagaacaagaagcggaacactccccaccgcggtagcagtgctggcggcggcgggtcaggagcagccgcagcgacggcggcgacagcaggtggccagcatcgaaatgttcagccttttagtgatgaagatgcatcaattgaaacaatgagccattgcagtggttatagcgatccttccagttttgctgaagatggaccagaagtccttgatgaggaaggaactcaagaagacctagagtacaagttgaagggattaattgacctaaccctggataagagtgcgaagacaaggcaagcagctcttgaaggtattaaaaatgcactggcttcaaaaatgctgtatgaatttattctggaaaggagaatgactttaactgatagcattgaacgctgcctgaaaaaaggtaagagtgatgagcaacgtgcagctgcagcgttagcatctgttctttgtattcagctgggccctggaattgaaagtgaagagattttgaaaactcttggaccaatcctaaagaaaatcatttgtgatgggtcagctagtatgcaggctaggcaaacttgtgcaacttgctttggtgtttgctgttttattgccacagatgacattactgaactatactcaactctggaatgtttggaaaatatcttcactaaatcctatctcaaagagaaagacactactgttatttgcagcactcctaatacagtgcttcatatcagctctcttcttgcatggacactactgctgaccatatgcccaatcaatgaagtgaagaaaaagcttgagatgcatttccataagcttccaagcctcctctcttgtgatgatgtaaacatgagaatagctgctggtgaatctttggcacttctctttgaattggccagaggaatagagagtgactttttttatgaagacatggagtccttgacgcagatgcttagggccttggcaacagatggaaataaacaccgggccaaagtggacaagagaaagcagcggtcagttttcagagatgtcctgagggcagtggaggaacgggattttccaacagaaaccattaaatttggtcctgaacgcatgtatattgattgctgggtaaaaaaacacacctatgacacctttaaggaggttcttggatcagggatgcagtaccacttgcagtcaaatgaattccttcgaaatgtatttgaacttggacccccagtgatgcttgatgctgcaacgcttaaaacgatgaagatttctcgtttcgaaaggcatttatataactctgcagccttcaaagctcgaaccaaagctagaagcaaatgtcgagataagagagcagatgttggagaattcttctagattttcagaacttgaagactattttctaatttctatttttttttctatttcaatgtatttaaactctagacacagtttttatcctggattaacttagataacttttgtagcagtggttatattgcttataatttaatgtacaatactattgaaactggtgagttctgattattaaatattctctgtaaatcagtaaacatgtataaagtatttgtaatgtttggtcataatttatttatgaagacagcaaaagactgatttcatgatggggaaaacaattagccaaagtttaatttcttacactgtggttgtcaagaatactgatttactataatgatatatacatgcaagatatttaacttaatatcttagacaagagttctgggtacaattttgggatctagttcccctggaaaagctgctgtatttttaatttttaatggaatgtagcttttaaaatcctgtcactggcatcaacaaaaggaattataccatgagaccttatagctgtacttaaaagccattcagttcagctattgggagttcatgatgaattagcatatgccagaaaggttgctaaccttaacatctgagagcagtaacactgattttatctgctgtatgagactttgtgcattttactttgaaataaagatttttttccacactgaaa

SEQ ID NO: 143710 - DNA, 574 bp, Homo sapiens
  Payload ID: 8399
  Gene Symbol: IFRD1
  Gene Name: interferon-related developmental regulator 1
  ENST ID: ENST00000432734
  CDS Start-End: 483-574
agctgtaaatgggtcaggagaccagagtggacagagtaggccctggaatgcttgctcggaggcctgccatgaaggatttctgcttgcttccccaccctaccccgggggcaggatgactcagcacttcctattgttgtgaaggccaaccccaggaggccctaccaaggctgactgctgttaaaaccagactgcactccttctggctcctggttcattcaaggtctacatagttaaaggtgccaacattatgcgaagaactttacgtggacatcccatttaattctcagaagccgatcacaagctcttcacggggatttctgctgccgccaccgcccactcttacccccgccgcttctcgactctgttgttagccgaagactcgcctctcagccgcccgccgcacagacgcacgagtaaaaagtgcagctccatcggctgatcctcgctaagctccgactctgggcggcaccgggcgtcccacgatgccgaagaacaagaagcggaacactccccaccgcggtagcagtgctggcggcggcgggtcaggagcagccgcagcgacggcggcgacagc

SEQ ID NO: 143711 - DNA, 1938 bp, Homo sapiens
  Payload ID: 8399
  Gene Symbol: IFRD1
  Gene Name: interferon-related developmental regulator 1
  ENST ID: ENST00000429071
  CDS Start-End: 232-678
ccgccttagctcccgcgctagagagaaacatgtatcgttttcgatcacagctcttcacggggatttctgctgccgccaccgcccactcttacccccgccgcttctcgactctgttgttagccgaagactcgcctctcagccgcccgccgcacagacgcacgagtaaaaagtgcagctccatcggctgatcctcgctaagctccgactctgggcggcaccgggcgtcccacgatgccgaagaacaagaagcggaacactccccaccgcggtagcagtgctggcggcggcgggtcaggagcagccgcagcgacggcggcgacagcaggtggccagcatcgaaatgttcagccttttagtgatgaagatgcatcaattgaaacaatgagccattgcagtggttatagcgatccttccagttttgctgaagatggaccagaagtccttgatgaggaaggaactcaagaagacctagagtacaagttgaagggattaattgacctaaccctggataagagtgcgaagacaaggcaagcagctcttgaaggtattaaaaatgcactggcttcaaaaatgctgtatgaatttattctggaaaggagaatgactttaactgatagcattgaacgctgcctgaaaaaaggtaatgcccttatttttgagtcacagacgtacaactaataaggagtgtgttatcttcttttcagtaacatttagtaatagcactggaacactggcccactcttaaaattttctaatagtcaaggagtgcaccatcttgttatggctcaaaatgagacttgttagaactttgtttttgtattacgtaaaccaaaaaaaaatagcttgaaactaagaaggattagggtagattgtcatcaaccttttttgtatcagaagaggtgatggtcattctcttgttataccagaaaagcttgaaagtgtgtgtcagacatctagctcattttcccttgcacttatataaaacattgattgtacctgtaaattacatcattttcaggatatcccttggaatacttgaattctagaactttgtaatagaaattctggaattcaaattgttacagtgatagaacttttaagaccaaagagaaatcttaaagataattttatcagaccttaaagtccagtgttagtaggcttactagatttaggaaccaccaaatttaaaaagacttgtgactcggcatggtggttcacatctgtaattgtggcactttgggagaccgaggtgggaggattgctggaagccaggagttggagaccacctgggcaacaaagcgatacttggtttctattataacaaacaaaacaaaacgagatttggtgtctgccaacttattcagccaagtaagaacattatgaaaataattatcctccactatcattattttattagcaaaatattatagcaccaaaaatgtagaaatgcacttttaaaaaattgaatgaactaataagctttatatccttatttttctcattttacctgagagtaaaaattttgttgtaagtgaaacctttgatcaaattcactcttccattgaatagaataaagaaaggcctaggaaaactgaggtgggtctaagctgatatatcttgttattggtatagttgatagcagacccaactttttaaagataacacaatggcgctattaaaggtgttttacattcaaactatatgctataatggttgttggactagatgacctttaaaaattccattttagtttgcgtattttttacatttttaatttatcaggtaataatttaagctcagtatttgccccacacttgtggtgtatacagttctcaagagttaatttatatgtacctttatataaatgtattttttgtaccactgcattccagcttgggcgacagagtgagaccctgtctcaaaaaaaaaaaaaaataa

SEQ ID NO: 143712 - DNA, 440 bp, Homo sapiens
  Payload ID: 8399
  Gene Symbol: IFRD1
  Gene Name: interferon-related developmental regulator 1
  ENST ID: ENST00000443101
  CDS Start-End: 320-440
tagccaggggctgtcttcaatttcacagactatgtcatgaaactgtcatgttaaacatttatttttctagctgaatgtcatctttaagggatattatttcactggagaatttgctgagaggagactgacttggattttatcagtccaaaactgagccagaggaatctgctacaggcaatcaggagccagtgaggagttataagccaagcagtaacctgatgattcaatcaaaaaatatgtatggagtgtctcctacttttcaggtggccagcatcgaaatgttcagccttttagtgatgaagatgcatcaattgaaacaatgagccattgcagtggttatagcgatccttccagttttgctgaagatggaccagaagtccttgatgaggaaggaactcaagaagacctagagtacaagttgaagggattaattgacctaa

SEQ ID NO: 143713 - DNA, 891 bp, Homo sapiens
  Payload ID: 8399
  Gene Symbol: IFRD1
  Gene Name: interferon-related developmental regulator 1
  ENST ID: ENST00000440625
  CDS Start-End: 511-891
tttgaatgctctccatgttgatgaaattcattctttatcaagatgtaaaatatgtaatttattgtggcctctggttgctctatgtgaattgaggatactttttttttttttgttaagggaaagagggagtctggctctgtcgcccaggctggagtgcggtgtggtgtgatcatagctcactgcaacctcttaactcctgggctcaagcagctctccctcctcagcctcctgtagctaggactacaggcatgtgacaccattcctggctattttttacattttttgtggagacaaggtctatgttggccaggctggtcacgagtccctcgtccccagggatcttcctgcctaagcctcccacaatgctgggacggtgcctggtctgaggatatttcttaccactgtgtttcagcttttcctcatctgaatcaaacatttgaattctttctagaaggtggccagcatcgaaatgttcagccttttagtgatgaagatgcatcaattgaaacaatgagccattgcagtggttatagcgatccttccagttttgctgaagatggaccagaagtccttgatgaggaaggaactcaagaagacctagagtacaagttgaagggattaattgacctaaccctggataagagtgcgaagacaaggcaagcagctcttgaaggtattaaaaatgcactggcttcaaaaatgctgtatgaatttattctggaaaggagaatgactttaactgatagcattgaacgctgcctgaaaaaaggtaagagtgatgagcaacgtgcagctgcagcgttagcatctgttctttgtattcagctgggccctggaattgaaagtgaagagattttgaaaactcttggaccaatcctaaagaaaatcatt

SEQ ID NO: 143714 - DNA, 570 bp, Homo sapiens
  Payload ID: 8399
  Gene Symbol: IFRD1
  Gene Name: interferon-related developmental regulator 1
  ENST ID: ENST00000445335
  CDS Start-End: 384-570
atagctgccagctggaagccgactctcgtcatagggcatactcgccccactgtgcatcgccggtgcctacctcacccagttccaaggcgggggcgcgccgaggcaggggtggggtcaccaggagaaaagcaagtgggcagaaaagcccgttgggaagagacggctgggaggaggccccggccccagccttactacgtttcccagaattcagtgaggccacgaagacaggctccctgggcgcggacggaagactggccgcatgggatttgtagccgaagactcgcctctcagccgcccgccgcacagacgcacgagtaaaaagtgcagctccatcggctgatcctcgctaagctccgactctgggcggcaccgggcgtcccacgatgccgaagaacaagaagcggaacactccccaccgcggtagcagtgctggcggcggcgggtcaggagcagccgcagcgacggcggcgacagcaggtggccagcatcgaaatgttcagccttttagtgatgaagatgcatcaattgaaacaatgagccattgcagtggttatagcgatccttccagtt

SEQ ID NO: 143715 - DNA, 1034 bp, Homo sapiens
  Payload ID: 8399
  Gene Symbol: IFRD1
  Gene Name: interferon-related developmental regulator 1
  ENST ID: ENST00000421296
  CDS Start-End: 763-1034
attgtaatgtgttttaaaggctttttgatagagggtaggcttctttagctcatatgtctaagctttctatctttgaattacagttgaagtttaatgatctagtaagcacctgtaaagcatacagaaaggaaacaaggggatagttcaccctttcagaatgctttactgacatagactcataaaaatgattcaataatttaaattatagattatggagctgcaattgtttcagaaattatgtaattcttttgcatgcttttgattttatggatcaataaaagaagactgaagaggaacagaatcactttgttaaagtcatgctgtgaatttagtagcagagcttgagctgaaacgcacttcctttgatcttagttcaatattctttctctcctcacctcttttatgtataatgtttgggacctaatatattatgctgctgagaacattttcacgttgaattataaaagcaggaagatgtagaattaataagaaataaaatcattaatgtctatatatatatatttttttttttagtgtgcaacttgctttggtgtttgctgttttattgccacagatgacattactgaactatactcaactctggaatgtttggaaaatatcttcactaaatcctatctcaaagagaaagacactactgttatttgcagcactcctaatacagtgcttcatatcagctctcttcttgcatggacactactgctgaccatatgcccaatcaatgaagtgaagaaaaagcttgagatgcatttccataagcttccaagcctcctctcttgtgatgatgtaaacatgagaatagctgctggtgaatctttggcacttctctttgaattggccagaggaatagagagtgactttttttatgaagacatggagtccttgacgcagatgcttagggccttggcaacagatggaaataaacaccgggccaaagtggacaagagaaagcagcggtcagttttcagagatgtcctgagggcagtggaggaacgggattttccaacagaaaccat

SEQ ID NO: 143716 - DNA, 429 bp, Homo sapiens
  Payload ID: 8399
  Gene Symbol: IFRD1
  Gene Name: interferon-related developmental regulator 1
  ENST ID: ENST00000417662
  CDS Start-End: 377-429
agttccaaggcgggggcgcgccgaggcaggggtggggtcaccaggagaaaagcaagtgggcagaaaagcccgttgggaagagacggctgggaggaggccccggccccagccttactacgtttcccagaattcagtgaggccacgaagacaggctccctgggcgcggacggaagactggccgcatgggatttgtagctcttcacggggatttctgctgccgccaccgcccactcttacccccgccgcttctcgactctgttgttagccgaagactcgcctctcagccgcccgccgcacagacgcacgagtaaaaagtgcagctccatcggctgatcctcgctaagctccgactctgggcggcaccgggcgtcccacgatgccgaagaacaagaagcggaacactccccaccgcggtagcagtgctggcgg

SEQ ID NO: 143717 - DNA, 437 bp, Homo sapiens
  Payload ID: 8399
  Gene Symbol: IFRD1
  Gene Name: interferon-related developmental regulator 1
  ENST ID: ENST00000462155
  CDS Start-End: 1-297
gttttcagagatgtcctgagggcagtggaggaacgggattttccaacagaaaccattaaatttggtcctgaacgcatgtatattgattgctgggtaaaaaaacacacctatgacacctttaaggaggttcttggatcagggatgcagtaccacttgcagtcaaatgaattccttcgaaatgtatttgaacttggacccccagtgatgcttgatgctgcaacgcttaaaacgatgaagatttctcgtttcgaaaggttctctggtttgtctggagtgtttgcaagtcagtcatcatagtggcagcttccgcctgctacaggatatttatatatggaagcataccatggcaggagtgctggaaaggtggtgtcagctaacagttgcttcagccagataaggacggtaacttcagtccaataaaaacctcatcagttacc

SEQ ID NO: 143718 - DNA, 486 bp, Homo sapiens
  Payload ID: 8399
  Gene Symbol: IFRD1
  Gene Name: interferon-related developmental regulator 1
  ENST ID: ENST00000476927
  CDS Start-End: 176-486
gggtccttgggcctgagagtgtgtcgggacaggggctgaccgggagctgggcgggaaaggaaccattgtcagagttcctttctcggcggcgatctcgcccgatctctccccgaccacgggtggccagcatcgaaatgttcagccttttagtgatgaagatgcatcaattgaaacaatgagccattgcagtggttatagcgatccttccagttttgctgaagatggaccagaagtccttgatgaggaaggaactcaagaagacctagagtacaagttgaagggattaattgacctaaccctggataagagtgcgaagacaaggcaagcagctcttgaaggtattaaaaatgcactggcttcaaaaatgctgtatgaatttattctggaaaggagaatgactttaactgatagcattgaacgctgcctgaaaaaaggtaagagtgatgagcaacgtgcagctgcagcgttagcatctgttctttgtat

SEQ ID NO: 143719 - DNA, 3397 bp, Homo sapiens
  Payload ID: 8399
  Gene Symbol: IFRD1
  Gene Name: interferon-related developmental regulator 1
  Uniprot ID: O00458
  ENST ID: ENST00000535603
  CDS Start-End: 511-1716
tttgaatgctctccatgttgatgaaattcattctttatcaagatgtaaaatatgtaatttattgtggcctctggttgctctatgtgaattgaggatactttttttttttttgttaagggaaagagggagtctggctctgtcgcccaggctggagtgcggtgtggtgtgatcatagctcactgcaacctcttaactcctgggctcaagcagctctccctcctcagcctcctgtagctaggactacaggcatgtgacaccattcctggctattttttacattttttgtggagacaaggtctatgttggccaggctggtcacgagtccctcgtccccagggatcttcctgcctaagcctcccacaatgctgggacggtgcctggtctgaggatatttcttaccactgtgtttcagcttttcctcatctgaatcaaacatttgaattctttctagaaggtggccagcatcgaaatgttcagccttttagtgatgaagatgcatcaattgaaacaatgagccattgcagtggttatagcgatccttccagttttgctgaagatggaccagaagtccttgatgaggaaggaactcaagaagacctagagtacaagttgaagggattaattgacctaaccctggataagagtgcgaagacaaggcaagcagctcttgaaggtattaaaaatgcactggcttcaaaaatgctgtatgaatttattctggaaaggagaatgactttaactgatagcattgaacgctgcctgaaaaaaggtaagagtgatgagcaacgtgcagctgcagcgttagcatctgttctttgtattcagctgggccctggaattgaaagtgaagagattttgaaaactcttggaccaatcctaaagaaaatcatttgtgatgggtcagctagtatgcaggctaggcaaacttgtgcaacttgctttggtgtttgctgttttattgccacagatgacattactgaactatactcaactctggaatgtttggaaaatatcttcactaaatcctatctcaaagagaaagacactactgttatttgcagcactcctaatacagtgcttcatatcagctctcttcttgcatggacactactgctgaccatatgcccaatcaatgaagtgaagaaaaagcttgagatgcatttccataagcttccaagcctcctctcttgtgatgatgtaaacatgagaatagctgctggtgaatctttggcacttctctttgaattggccagaggaatagagagtgactttttttatgaagacatggagtccttgacgcagatgcttagggccttggcaacagatggaaataaacaccgggccaaagtggacaagagaaagcagcggtcagttttcagagatgtcctgagggcagtggaggaacgggattttccaacagaaaccattaaatttggtcctgaacgcatgtatattgattgctgggtaaaaaaacacacctatgacacctttaaggaggttcttggatcagggatgcagtaccacttgcagtcaaatgaattccttcgaaatgtatttgaacttggacccccagtgatgcttgatgctgcaacgcttaaaacgatgaagatttctcgtttcgaaaggcatttatataactctgcagccttcaaagctcgaaccaaagctagaagcaaatgtcgagataagagagcagatgttggagaattcttctagattttcagaacttgaagactattttctaatttctatttttttttctatttcaatgtatttaaactctagacacagtttttatcctggattaacttagataacttttgtagcagtggttatattgcttataatttaatgtacaatactattgaaactggtgagttctgattattaaatattctctgtaaatcagtaaacatgtataaagtatttgtaatgtttggtcataatttatttatgaagacagcaaaagactgatttcatgatggggaaaacaattagccaaagtttaatttcttacactgtggttgtcaagaatactgatttactataatgatatatacatgcaagatatttaacttaatatcttagacaagagttctgggtacaattttgggatctagttcccctggaaaagctgctgtatttttaatttttaatggaatgtagcttttaaaatcctgtcactggcatcaacaaaaggaattataccatgagaccttatagctgtacttaaaagccattcagttcagctattgggagttcatgatgaattagcatatgccagaaaggttgctaaccttaacatctgagagcagtaacactgattttatctgctgtatgagactttgtgcattttactttgaaataaagatttttttccacactgaaagtgcttctcttctaatagaagaaatattatttatggctttgaggtacagagtccaaaatgactaggccaggtgggcagggagacaaagctttatgtgtatatttacaaacattaaagtagatgaaaagaatgtagcaatacataattgggattaaggtttctgactttcaagaatatttctgcttggcaacatgcagtgtggctcatgcctataatcagcactctggggaggctgaggcgggaggatggcatgagcccagtttgagaccagcctgggcaacatagcgagaccctgtctctaccagaaatttaaaaaatgagtgtggtggtgtgtgcttctactctttatctacttgggtgctgaggcaagagggtaacttgagcccaggaggtcaaagctgcagtgagccgtgattgtgccactccagcctgggtgacgagtgagaccttgtctcaaaagcaaaacaaaaaagaatattgctgcttgtttgcccatgaggtatatttctttcattttatgaaaagcattttgacaacacgttaacatttaataaactttagattaaaatatatagtgcaagcaacatgccatttcaaatccgtagacttgtttctttgatactcttgctgtaggtcgccgtgaggggtagggaagcatatatactgtagggagaagtatcaaaatcatttaaggtcttttttccaaactagtgttcccctcccacatcccaacaactcttggaagtctggtgctccctctaggtgaaaatcatttgctggcttatggagtcactgttgctgagtcccatcccccagttacagtgcagtggaaaacaggtttagaatctagaacttgtttgtatgttgtcacttggttatgttccaagtaggttagaaccatggaaaagagattgcaaatggtagtttcttctagatattcaaatgcatatatgtatgtacatgtaattataaataaataatgaatttttattaaagtgttgtatgaac

SEQ ID NO: 143720 - DNA, 3232 bp, Homo sapiens
  Payload ID: 8399
  Gene Symbol: IFRD1
  Gene Name: interferon-related developmental regulator 1
  Uniprot ID: O00458
  ENST ID: ENST00000621379
  CDS Start-End: 346-1551
gttaaaaccagactgcactccttctggctcctggttcattcaaggtctacatagttaaaggttgttccagagggatgtgtgtaattcctcccagtatttgatgttcctttattacttattttcacttgagccaacagcctgaactggtcaggctttgggctgatgccagctgctttatctggtagcactgttacataaaattaacatttattggtgatcactaggtgccaacattatgcgaagaactttacgtggacatcccatttaattctcagaagccgatcacaaggtggccagcatcgaaatgttcagccttttagtgatgaagatgcatcaattgaaacaatgagccattgcagtggttatagcgatccttccagttttgctgaagatggaccagaagtccttgatgaggaaggaactcaagaagacctagagtacaagttgaagggattaattgacctaaccctggataagagtgcgaagacaaggcaagcagctcttgaaggtattaaaaatgcactggcttcaaaaatgctgtatgaatttattctggaaaggagaatgactttaactgatagcattgaacgctgcctgaaaaaaggtaagagtgatgagcaacgtgcagctgcagcgttagcatctgttctttgtattcagctgggccctggaattgaaagtgaagagattttgaaaactcttggaccaatcctaaagaaaatcatttgtgatgggtcagctagtatgcaggctaggcaaacttgtgcaacttgctttggtgtttgctgttttattgccacagatgacattactgaactatactcaactctggaatgtttggaaaatatcttcactaaatcctatctcaaagagaaagacactactgttatttgcagcactcctaatacagtgcttcatatcagctctcttcttgcatggacactactgctgaccatatgcccaatcaatgaagtgaagaaaaagcttgagatgcatttccataagcttccaagcctcctctcttgtgatgatgtaaacatgagaatagctgctggtgaatctttggcacttctctttgaattggccagaggaatagagagtgactttttttatgaagacatggagtccttgacgcagatgcttagggccttggcaacagatggaaataaacaccgggccaaagtggacaagagaaagcagcggtcagttttcagagatgtcctgagggcagtggaggaacgggattttccaacagaaaccattaaatttggtcctgaacgcatgtatattgattgctgggtaaaaaaacacacctatgacacctttaaggaggttcttggatcagggatgcagtaccacttgcagtcaaatgaattccttcgaaatgtatttgaacttggacccccagtgatgcttgatgctgcaacgcttaaaacgatgaagatttctcgtttcgaaaggcatttatataactctgcagccttcaaagctcgaaccaaagctagaagcaaatgtcgagataagagagcagatgttggagaattcttctagattttcagaacttgaagactattttctaatttctatttttttttctatttcaatgtatttaaactctagacacagtttttatcctggattaacttagataacttttgtagcagtggttatattgcttataatttaatgtacaatactattgaaactggtgagttctgattattaaatattctctgtaaatcagtaaacatgtataaagtatttgtaatgtttggtcataatttatttatgaagacagcaaaagactgatttcatgatggggaaaacaattagccaaagtttaatttcttacactgtggttgtcaagaatactgatttactataatgatatatacatgcaagatatttaacttaatatcttagacaagagttctgggtacaattttgggatctagttcccctggaaaagctgctgtatttttaatttttaatggaatgtagcttttaaaatcctgtcactggcatcaacaaaaggaattataccatgagaccttatagctgtacttaaaagccattcagttcagctattgggagttcatgatgaattagcatatgccagaaaggttgctaaccttaacatctgagagcagtaacactgattttatctgctgtatgagactttgtgcattttactttgaaataaagatttttttccacactgaaagtgcttctcttctaatagaagaaatattatttatggctttgaggtacagagtccaaaatgactaggccaggtgggcagggagacaaagctttatgtgtatatttacaaacattaaagtagatgaaaagaatgtagcaatacataattgggattaaggtttctgactttcaagaatatttctgcttggcaacatgcagtgtggctcatgcctataatcagcactctggggaggctgaggcgggaggatggcatgagcccagtttgagaccagcctgggcaacatagcgagaccctgtctctaccagaaatttaaaaaatgagtgtggtggtgtgtgcttctactctttatctacttgggtgctgaggcaagagggtaacttgagcccaggaggtcaaagctgcagtgagccgtgattgtgccactccagcctgggtgacgagtgagaccttgtctcaaaagcaaaacaaaaaagaatattgctgcttgtttgcccatgaggtatatttctttcattttatgaaaagcattttgacaacacgttaacatttaataaactttagattaaaatatatagtgcaagcaacatgccatttcaaatccgtagacttgtttctttgatactcttgctgtaggtcgccgtgaggggtagggaagcatatatactgtagggagaagtatcaaaatcatttaaggtcttttttccaaactagtgttcccctcccacatcccaacaactcttggaagtctggtgctccctctaggtgaaaatcatttgctggcttatggagtcactgttgctgagtcccatcccccagttacagtgcagtggaaaacaggtttagaatctagaacttgtttgtatgttgtcacttggttatgttccaagtaggttagaaccatggaaaagagattgcaaatggtagtttcttctagatattcaaatgcatatatgtatgtacatgtaattataaataaataatgaatttttattaaagtgttgtatgaac

SEQ ID NO: 143721 - DNA, 2275 bp, Homo sapiens
  Payload ID: 8400
  Gene Symbol: IFRD2
  Gene Name: interferon-related developmental regulator 2
  ENST ID: ENST00000436390
  CDS Start-End: 499-1827
atgggccccaaaaaatcttggcgaagtcacttttttccactgcctgaggtttggctgttgctcctgttatcccaagctctaagcccttcccatggtccccagacccaggcaggggtaggtctcgtctggagtgtcccgctgccaagtgccctgagaagccagtcctgccttggtgctccactgagggacgcttcggagttaaccaccgtgcacttgttcccgacgcggggctggggcgcgcgcagggcattgtgggtgcatagttcagccagcgcgtcgtcggctgctagccgccgtcgcctgcgcgctcaggcctctgggattagtagttttagcctcgtggatggcggggcgcctcgcgaagatggtggcgcgcgtggcgtgtggctcccgtcgtctggccaagtctcagcgcagcgcaccggccggcgtctcgttggcctggagcccacacccaccgggtccctgaccccgcgccccccgcgcccggttcccggcatgcctcgcgcccgtaagggcaacacgctccggaagggtggtcagcgccgtggaggaggtgcccggagcagtgcccaagctgactcgggttccagtgacgatgaggcagccagtgaggcccgcagcaccgccagtgaatgccccagccttctcagcaccactgcagaggacagccttgggggggatgtcgtggatgagcagggccagcaggaagaccttgaggaaaagctgaaggagtatgtggactgtctcacagacaagagtgccaagacccggcagggtgctcttgagagcctgcgcctggccctagcgtcccgcctactccccgacttcttgctggagcgccgcctcacgctagccgatgccctggaaaagtgcctcaagaaagggaagggcgaggaacaagccctggctgctgctgtgctaggcctgctctgcgtgcagctgggccctggacctaagggtgaggagctgtttcacagcctgcagcctctgctggtctctgtgctcagtgacagcacagctagccctgctgcccggctccactgtgcttctgcccttggcctgggctgctacgtggctgccgctgacatccaggacctggtctcttgccttgcctgcttagaaagtgttttcagccggttctatggcttggggggcagctccacaagtcctgtggttcctgccagcctgcacggcctgctctctgctgccctgcaggcctgggcattgctgctcaccatctgccctagcacccaaatcagccacatccttgacaggcagctgccccggctgccccagctcttgtccagtgaaagtgtgaacctgcggatcgctgccggtgaaaccattgcactgctctttgagcttgcccgggaccttgaggaggagtttgtttacgaggacatggaggccctctgcagtgtcctgcgcactctggccactgacagtaacaagtaccgtgccaaggctgatcgtcggcgccagcgctctactttccgcgccgtgctgcactccgtggagggcggtgaatgcgaagaagagatagtgcgcttcggctttgaggtgctctacatggacagctgggctcggcaccggatctacgctgccttcaaggaagtgctgggttcgggcatgcaccaccacctccagaacaatgagctactccgtgacatctttggcctgggccctgtgctgttgctggatgccactgccctgaaggcctgcaaggttccacgctttgagaagcacctgtacaatgctgctgccttcaaagcccggaccaaggctcgaagccgtgtgcgggacaagcgggcagacatcctgtgaagcaggacctgctgaagaggagactttctatgcccttggtccgtatttttaacagaagacagtgcaacaactggtctccaccagtatttgtcactttattttttttaatgacaaaaccaaaaacagacatggggtgggtagctgggggcccggacacttgggaccctgacccctttgtccctgcactcagccctgtggccccttcctgtcctgtctcaggccaggctaaatatgtgccttcctcagggctgtggggcaggcactagggggcctttcccttcctttcctttctcaggccttgctcccccaggatgacccactcttaggggggtggtggcatctggacaaatgccaccacagcaggtggggtggcaaagctacctggaatggatttgtgtgctgatttttaaggattattacagataattaaacagaacggtcagccttc

SEQ ID NO: 143722 - DNA, 2109 bp, Homo sapiens
  Payload ID: 8400
  Gene Symbol: IFRD2
  Gene Name: interferon-related developmental regulator 2
  Uniprot ID: Q12894
  ENST ID: ENST00000417626
  CDS Start-End: 130-1650
gtcggctggtgggccccaggcgtggactaccattcccatggtgctctacgcgcagctagccgccgtcgcctgcgcgctcaggcctctgggattagtagttttagcctcgtggatgtgggcctgaatcggatggcctggaactcgccttcccggcgacctgtttggcagggcggggcgcctcgcgaagatggtggcgcgcgtggcgtgtggctcccgtcgtctggccaagtctcagcgcagcgcaccggccggcgtctcgttggcctggagcccacacccaccgggtccctgaccccgcgccccccgcgcccggttcccggcatgcctcgcgcccgtaagggcaacacgctccggaagggtggtcagcgccgtggaggaggtgcccggagcagtgcccaagctgactcgggttccagtgacgatgaggcagccagtgaggcccgcagcaccgccagtgaatgccccagccttctcagcaccactgcagaggacagccttgggggggatgtcgtggatgagcagggccagcaggaagaccttgaggaaaagctgaaggagtatgtggactgtctcacagacaagagtgccaagacccggcagggtgctcttgagagcctgcgcctggccctagcgtcccgcctactccccgacttcttgctggagcgccgcctcacgctagccgatgccctggaaaagtgcctcaagaaagggaagggcgaggaacaagccctggctgctgctgtgctaggcctgctctgcgtgcagctgggccctggacctaagggtgaggagctgtttcacagcctgcagcctctgctggtctctgtgctcagtgacagcacagctagccctgctgcccggctccactgtgcttctgcccttggcctgggctgctacgtggctgccgctgacatccaggacctggtctcttgccttgcctgcttagaaagtgttttcagccggttctatggcttggggggcagctccacaagtcctgtggttcctgccagcctgcacggcctgctctctgctgccctgcaggcctgggcattgctgctcaccatctgccctagcacccaaatcagccacatccttgacaggcagctgccccggctgccccagctcttgtccagtgaaagtgtgaacctgcggatcgctgccggtgaaaccattgcactgctctttgagcttgcccgggaccttgaggaggagtttgtttacgaggacatggaggccctctgcagtgtcctgcgcactctggccactgacagtaacaagtaccgtgccaaggctgatcgtcggcgccagcgctctactttccgcgccgtgctgcactccgtggagggcggtgaatgcgaagaagagatagtgcgcttcggctttgaggtgctctacatggacagctgggctcggcaccggatctacgctgccttcaaggaagtgctgggttcgggcatgcaccaccacctccagaacaatgagctactccgtgacatctttggcctgggccctgtgctgttgctggatgccactgccctgaaggcctgcaaggttccacgctttgagaagcacctgtacaatgctgctgccttcaaagcccggaccaaggctcgaagccgtgtgcgggacaagcgggcagacatcctgtgaagcaggacctgctgaagaggagactttctatgcccttggtccgtatttttaacagaagacagtgcaacaactggtctccaccagtatttgtcactttattttttttaatgacaaaaccaaaaacagacatggggtgggtagctgggggcccggacacttgggaccctgacccctttgtccctgcactcagccctgtggccccttcctgtcctgtctcaggccaggctaaatatgtgccttcctcagggctgtggggcaggcactagggggcctttcccttcctttcctttctcaggccttgctcccccaggatgacccactcttaggggggtggtggcatctggacaaatgccaccacagcaggtggggtggcaaagctacctggaatggatttgtgtgctgatttttaaggattattacagataattaaacagaacggtcagccttctgtggtcttaa

SEQ ID NO: 143723 - DNA, 664 bp, Homo sapiens
  Payload ID: 8400
  Gene Symbol: IFRD2
  Gene Name: interferon-related developmental regulator 2
  ENST ID: ENST00000426499
  CDS Start-End: 1-216
cggatctacgctgccttcaaggaagtgctgggttcgggcatgcaccaccacctccagaacaatgagctactccgtgacatctttggcctgggccctgtgctgttgctggatgccactgccctgaaggcctgcaagcacctgtacaatgctgctgccttcaaagcccggaccaaggctcgaagccgtgtgcgggacaagcgggcagacatcctgtgaagcaggacctgctgaagaggagactttctatgcccttggtccgtatttttaacagaagacagtgcaacaactggtctccaccagtatttgtcactttattttttttaatgacaaaaccaaaaacagacatggggtgggtagctgggggcccggacacttgggaccctgacccctttgtccctgcactcagccctgtggccccttcctgtcctgtctcaggccaggctaaatatgtgccttcctcagggctgtggggcaggcactagggggcctttcccttcctttcctttctcaggccttgctcccccaggatgacccactcttaggggggtggtggcatctggacaaatgccaccacagcaggtggggtggcaaagctacctggaatggatttgtgtgctgatttttaaggattattacagataattaaacagaacggtcagccttc

SEQ ID NO: 143724 - DNA, 1137 bp, Homo sapiens
  Payload ID: 8400
  Gene Symbol: IFRD2
  Gene Name: interferon-related developmental regulator 2
  ENST ID: ENST00000414734
  CDS Start-End: 116-340
gtggctcccgtcgtctggccaagtctcagcgcagcgcaccggccggcgtctcgttggcctggagcccacacccaccgggtccctgaccccgcgccccccgcgcccggttcccggcatgcctcgcgcccgtaagggcaacacgctccggaagggtggtcagcgccgtggaggaggtgcccggagcagtgcccaagctgactcgggttccagtgacgatgaggcagccagtgaggcccgcagcaccgccagtgaatgccccagccttctcagcaccactgcagaggacagccttgtgccaagacccggcagggtgctcttgagagcctgcgcctggccctagcgtcccgcctactccccgacttcttgctggagcgccgcctcacgctagccgatgccctggaaaagtgcctcaagaaagggaagggcgaggaacaagccctggctgctgctgtgctaggcctgctctgcgtgcagctgggccctggacctaagggtgaggagctgtttcacagcctgcagcctctgctggtctctgtgctcagtgacagcacagctagccctgctgcccggctccactgtgcttctgcccttggcctgggctgctacgtggctgccgctgacatccaggtgaggggtctttgggcacaggtggtagagcatctagggctgtaactctgcctctgagctcccctgcctctctgtgctcctaggacctggtctcttgccttgcctgcttagaaagtgttttcagccggttctatggcttggggggcagctccacaagtcctgtggttcctgccagcctgcacggcctgctctctgctgccctgcaggcctgggcattgctgctcaccatctgccctagcacccaaatcagccacatccttgacaggcagctgccccggctgccccagctcttgtccagtgaaagtgtgaacctgcggatcgctgccggtgaaaccattgcactgctctttgagcttgcccgggaccttgaggaggagtttgtttacgaggacatggaggccctctgcagtgtcctgcgcactctggccactgacagtaacaagtaccgtgccaaggctgatcgtcggcgccagcgctctactttccgcgccgtgctgcactccgtggagg

SEQ ID NO: 143725 - DNA, 917 bp, Homo sapiens
  Payload ID: 8400
  Gene Symbol: IFRD2
  Gene Name: interferon-related developmental regulator 2
  ENST ID: ENST00000438296
  CDS Start-End: 1-513
ctagcgtcccgcctactccccgacttcttgctggagcgccgcctcacgctagccgatgccctggaaaagtgcctcaagaaagggaagggcgaggaacaagccctggctgctgctgtgctaggcctgctctgcgtgcagctgggccctggacctaagggtgaggagctgtttcacagcctgcagcctctgctggtctctgtgctcagtgacagcacagctagccctgctgcccggctccactgtgcttctgcccttggcctgggctgctacgtggctgccgctgacatccaggacctggtctcttgccttgcctgcttagaaagtgttttcagccggttctatggcttggggggcagctccacaagtcctgtggttcctgccagcctgcacggcctgctctctgctgccctgcaggcctgggcattgctgctcaccatctgccctagcacccaaatcagccacatccttgacagctgccccggctgccccagctcttgtccagtgaaagtgtgaacctgcggatcgctgccggtgaaaccattgcactgctctttgagcttgcccgggaccttgaggaggagtttgtttacgaggacatggaggccctctgcagtgtcctgcgcactctggccactgacagtaacaagtaccgtgccaaggctgatcgtcggcgccagcgctctactttccgcgccgtgctgcactccgtggagggcggtgaatgcgaagaagagatagtgcgcttcggctttgaggtgctctacatggacagctgggctcggcaccggatctacgctgccttcaaggaagtgctgggttcgggcatgcaccaccacctccagaacaatgagctactccgtgacatctttggcctgggccctgtgctgttgctggatgccactgccctgaaggcctgc

SEQ ID NO: 143726 - DNA, 1013 bp, Homo sapiens
  Payload ID: 8401
  Gene Symbol: IL1F10
  Gene Name: interleukin 1 family, member 10 (theta)
  Uniprot ID: Q8WWZ1
  ENST ID: ENST00000341010
  CDS Start-End: 76-534
agttggagtctccagggatcagggttccaggaactcaggatctgcagtgaggaccagacaccactgattgcaggaatgtgttccctccccatggcaagatactacataattaaatatgcagaccagaaggctctatacacaagagatggccagctgctggtgggagatcctgttgcagacaactgctgtgcagagaagatctgcatacttcctaacagaggcttggcccgcaccaaggtccccattttcctggggatccagggagggagccgctgcctggcatgtgtggagacagaagaggggccttccctacagctggaggatgtgaacattgaggaactgtacaaaggtggtgaagaggccacacgcttcaccttcttccagagcagctcaggctccgccttcaggcttgaggctgctgcctggcctggctggttcctgtgtggcccggcagagccccagcagccagtacagctcaccaaggagagtgagccctcagcccgtaccaagttttactttgaacagagctggtagggagacaggaaactgcgttttagccttgtgcccccaaaccaagctcatcctgctcagggtctatggtaggcagaataatgtcccccgaaatatgtccacatcctaatcccaagatctgtgcatatgttaccatacatgtccaaagaggttttgcaaatgtgattatgttaaggatcttgaaatgaggagacaatcctgggttatccttgtgggctcagtttaatcacaagaaggaggcaggaagggagagtcagagagagaatggaagataccatgcttctaattttgaagatggagtgaggggccttgagccaacaaatgcaggtgtttttagaaggtggaaaagccaagggaacggattctcctctagagtctccggaaggaacacagctcttgacacatggatttcagctcagtgacacccatttcagacttctgacctccacaactataaaataataaacttgtgttattgtaaa

SEQ ID NO: 143727 - DNA, 1366 bp, Homo sapiens
  Payload ID: 8401
  Gene Symbol: IL1F10
  Gene Name: interleukin 1 family, member 10 (theta)
  Uniprot ID: Q8WWZ1
  ENST ID: ENST00000393197
  CDS Start-End: 422-880
ggcagtgggactgggtttgagctgggcttatcctccaactgtgagggaggctacagcacactccaccccactctcagggctgggaattgttgtggctcagctatttgggggaatctgttttccagtttctcagaaccagcgcaagcacacacatcccaggctcacacccctggtggctggacttgctcccggatagcctcagtcagggagaggcagagctgcctggagcctgctgggctggtggaagccttggtggattctggcaggccaattatagacgaatggcctggggaacccgtgcagcccttggctgagtggttctaagccccagcacgtctgcctctggcttcacccagcctccttttctaactgcccttctctcctccccatcagtgaggaccagacaccactgattgcaggaatgtgttccctccccatggcaagatactacataattaaatatgcagaccagaaggctctatacacaagagatggccagctgctggtgggagatcctgttgcagacaactgctgtgcagagaagatctgcatacttcctaacagaggcttggcccgcaccaaggtccccattttcctggggatccagggagggagccgctgcctggcatgtgtggagacagaagaggggccttccctacagctggaggatgtgaacattgaggaactgtacaaaggtggtgaagaggccacacgcttcaccttcttccagagcagctcaggctccgccttcaggcttgaggctgctgcctggcctggctggttcctgtgtggcccggcagagccccagcagccagtacagctcaccaaggagagtgagccctcagcccgtaccaagttttactttgaacagagctggtagggagacaggaaactgcgttttagccttgtgcccccaaaccaagctcatcctgctcagggtctatggtaggcagaataatgtcccccgaaatatgtccacatcctaatcccaagatctgtgcatatgttaccatacatgtccaaagaggttttgcaaatgtgattatgttaaggatcttgaaatgaggagacaatcctgggttatccttgtgggctcagtttaatcacaagaaggaggcaggaagggagagtcagagagagaatggaagataccatgcttctaattttgaagatggagtgaggggccttgagccaacaaatgcaggtgtttttagaaggtggaaaagccaagggaacggattctcctctagagtctccggaaggaacacagctcttgacacatggatttcagctcagtgacacccatttcagacttctgacctccacaactataaaataataaacttgtgttattgtaaacctctaa

SEQ ID NO: 143728 - DNA, 4697 bp, Homo sapiens
  Payload ID: 8402
  Gene Symbol: IL1RAP
  Gene Name: interleukin 1 receptor accessory protein
  Uniprot ID: Q9NPH3
  ENST ID: ENST00000072516
  CDS Start-End: 171-1883
aaagggggaaaagaaagtgcggcggaaagtaagaggctcactggggaagactgccgggatccaggtctccggggtccgctttggccagaggcgcggaaggaagcagtgcccggcgacactgcacccatcccggctgcttttgctgcgccctctcagcttcccaagaaaggatgacacttctgtggtgtgtagtgagtctctacttttatggaatcctgcaaagtgatgcctcagaacgctgcgatgactggggactagacaccatgaggcaaatccaagtgtttgaagatgagccagctcgcatcaagtgcccactctttgaacacttcttgaaattcaactacagcacagcccattcagctggccttactctgatctggtattggactaggcaggaccgggaccttgaggagccaattaacttccgcctccccgagaaccgcattagtaaggagaaagatgtgctgtggttccggcccactctcctcaatgacactggcaactatacctgcatgttaaggaacactacatattgcagcaaagttgcatttcccttggaagttgttcaaaaagacagctgtttcaattcccccatgaaactcccagtgcataaactgtatatagaatatggcattcagaggatcacttgtccaaatgtagatggatattttccttccagtgtcaaaccgactatcacttggtatatgggctgttataaaatacagaattttaataatgtaatacccgaaggtatgaacttgagtttcctcattgccttaatttcaaataatggaaattacacatgtgttgttacatatccagaaaatggacgtacgtttcatctcaccaggactctgactgtaaaggtagtaggctctccaaaaaatgcagtgccccctgtgatccattcacctaatgatcatgtggtctatgagaaagaaccaggagaggagctactcattccctgtacggtctattttagttttctgatggattctcgcaatgaggtttggtggaccattgatggaaaaaaacctgatgacatcactattgatgtcaccattaacgaaagtataagtcatagtagaacagaagatgaaacaagaactcagattttgagcatcaagaaagttacctctgaggatctcaagcgcagctatgtctgtcatgctagaagtgccaaaggcgaagttgccaaagcagccaaggtgaagcagaaagtgccagctccaagatacacagtggaactggcttgtggttttggagccacagtcctgctagtggtgattctcattgttgtttaccatgtttactggctagagatggtcctattttaccgggctcattttggaacagatgaaaccattttagatggaaaagagtatgatatttatgtatcctatgcaaggaatgcggaagaagaagaatttgtattactgaccctccgtggagttttggagaatgaatttggatacaagctgtgcatctttgaccgagacagtctgcctgggggaattgtcacagatgagactttgagcttcattcagaaaagcagacgcctcctggttgttctaagccccaactacgtgctccagggaacccaagccctcctggagctcaaggctggcctagaaaatatggcctctcggggcaacatcaacgtcattttagtacagtacaaagctgtgaaggaaacgaaggtgaaagagctgaagagggctaagacggtgctcacggtcattaaatggaaaggggaaaaatccaagtatccacagggcaggttctggaagcagctgcaggtggccatgccagtgaagaaaagtcccaggcggtctagcagtgatgagcagggcctctcgtattcatctttgaaaaatgtatgaaaggaataatgaaaagggtaaaaagaacaaggggtgctccaggaagaaagagtccccccagtcttcattcgcagtttatggtttcataggcaaaaataatggtctaagcctcccaatagggataaatttagggtgactgtgtggctgactattctgcttcctcaggcaacactaaagtttagaaagatatcatcaacgttctgtcaccagtctctgatgccactatgttctttgcaggcaaagacttgttcaatgcgaatttccccttctacattgtctatccctgtttttatatgtctccattctttttaaaatcttaacatatggagcagcctttcctatgaatttaaatatgcctttaaaataagtcactgttgacagggtcatgagtttccgagtatagttttctttttatcttatttttactcgtccgttgaaaagataatcaaggcctacattttagctgaggataatgaacttttttcctcattcggctgtataatacataaccacagcaagactgacatccacttaggatgatacaaagcagtgtaactgaaaatgtttcttttaattgatttaaaggacttgtcttctataccacccttgtcctcatctcaggtaatttatgaaatctatgtaaacttgaaaaatatttcttaatttttgtttttgctccagtcaattcctgattatccacaggtcaacccacattttttcattccttctccctatctgcttatatcgcattgctcatttagagtttgcaggaggctccatactaggttcagtctgaaagaaatctcctaatggtgctatagagagggaggtaacagaaagactcttttagggcatttttctgactcatgaaaagagcacagaaaaggatgtttggcaatttgtcttttaagtcttaaccttgctaatgtgaatactgggaaagtgattttttctcactcgtttttgttgctccattgtaaagggcggaggtcagtcttagtggccttgagagttgcttttggcattaatattctaagagaattaactgtatttcctgtcacctattcactagtgcaggaaatatacttgctccaaataagtcagtatgagaagtcactgtcaatgaaagttgttttgtttgttttcagtaatattttgctgtttttaagacttggaaaactaagtgcagagtttacagagtggtaaatatctatgttacatgtagattatacatatatatacacacgtgtatatgagatatatatcttatatctccacaaacacaaattatatatatacatatccacacacatacattacatatatctgtgtatataaatccacatgcacatgaaatatatatatatatataatttgtgtgtgtgtatgtgtatgtatatgactttaaatagctatgggtacaatattaaaaaccactggaactcttgtccagtttttaaattatgtttttactggaatgtttttgtgtcagtgttttctgtacatattatttgttaattcacagctcacagagtgatagttgtcatagttcttgccttccctaagtttatataaataacttaagtattgctacagtttatctaggttgcagtggcatctgctgtgcacagagcttccatggtcactgctaagcagtagccagccatcgggcattaattgatttcctactatattcccagcagacacatttagaaactaagctatgttaacctcagtgctcaactatttgaactgttgagtgataaaggaaacaaatataactgtaaatgaatcttggtatcctgtgaaacagaataattcgtaatttaagaaagcccttatcccggtaacatgaatgttgatgaacaaatgtaaaattatatcctatatttaagtacccataataaatcatttccctctataagtgttattgattattttaaattgaaaaaagtttcacttggatgaaaaaagtagaaaagtaggtcattcttggatctacttttttttagccttattaatatttttccctattagaaaccacaattactccctctattaacccttcacttactagaccagaaaagaacttattccagataagctttgaatatcaattcttacataaactttaggcaaacagggaatagtctagtcaccaaaggaccattctcttgccaatgctgcattccttttgcacttttggattccatatttatcccaaatgctgttgggcacccctagaaataccttgatgttttttctatttatatgcctgcctttggtacttaattttacaaatgctgtaatataaagcatatcaagtttatgtgatacgtatcattgcaagagaatttgtttcaagatttttttttaatgttccagaagatggccaatagagaacattcaagggaaatggggaaacataatttagagaacaagaacaaaccatgtctcaaatttttttaaaaaaaattaatggttttaaatatatgctatagggacgttccatgcccaggttaacaaagaactgtgatatatagagtgtctaattacaaaatcatatacgatttatttaattctcttctgtattgtaacttagatgattcccaaggactctaataaaaaatcacttcattgtatttggaaacaaaaacatcattcattaattacttattttctttccataggttttaatattttgagagtgtcttttttatttcattcatgaacttttgtatttttcatttttcatttgatttgtaaatttacttatgttaaaaataaaccatttattttcagctttgaatttta

SEQ ID NO: 143729 - DNA, 5413 bp, Homo sapiens
  Payload ID: 8402
  Gene Symbol: IL1RAP
  Gene Name: interleukin 1 receptor accessory protein
  Uniprot ID: Q9NPH3
  ENST ID: ENST00000317757
  CDS Start-End: 207-2270
tgccgggatccaggtctccggggtccgctttggccagaggcgcggaaggaagcagtgcccggcgacactgcacccatcccggctgcttttgctgcgccctctcagcttcccaagaaaggcatcgtcatgtgatcatcacctaagaactagaacatcagcaggccctagaagcctcactcttgcccctccctttaatatctcaaaggatgacacttctgtggtgtgtagtgagtctctacttttatggaatcctgcaaagtgatgcctcagaacgctgcgatgactggggactagacaccatgaggcaaatccaagtgtttgaagatgagccagctcgcatcaagtgcccactctttgaacacttcttgaaattcaactacagcacagcccattcagctggccttactctgatctggtattggactaggcaggaccgggaccttgaggagccaattaacttccgcctccccgagaaccgcattagtaaggagaaagatgtgctgtggttccggcccactctcctcaatgacactggcaactatacctgcatgttaaggaacactacatattgcagcaaagttgcatttcccttggaagttgttcaaaaagacagctgtttcaattcccccatgaaactcccagtgcataaactgtatatagaatatggcattcagaggatcacttgtccaaatgtagatggatattttccttccagtgtcaaaccgactatcacttggtatatgggctgttataaaatacagaattttaataatgtaatacccgaaggtatgaacttgagtttcctcattgccttaatttcaaataatggaaattacacatgtgttgttacatatccagaaaatggacgtacgtttcatctcaccaggactctgactgtaaaggtagtaggctctccaaaaaatgcagtgccccctgtgatccattcacctaatgatcatgtggtctatgagaaagaaccaggagaggagctactcattccctgtacggtctattttagttttctgatggattctcgcaatgaggtttggtggaccattgatggaaaaaaacctgatgacatcactattgatgtcaccattaacgaaagtataagtcatagtagaacagaagatgaaacaagaactcagattttgagcatcaagaaagttacctctgaggatctcaagcgcagctatgtctgtcatgctagaagtgccaaaggcgaagttgccaaagcagccaaggtgaagcagaaagtgccagctccaagatacacagtggaactggcttgtggttttggagccacagtcctgctagtggtgattctcattgttgtttaccatgtttactggctagagatggtcctattttaccgggctcattttggaacagatgaaaccattttagatggaaaagagtatgatatttatgtatcctatgcaaggaatgcggaagaagaagaatttgtattactgaccctccgtggagttttggagaatgaatttggatacaagctgtgcatctttgaccgagacagtctgcctgggggaaatacagtggaagcagtttttgatttcattcagagaagcagaaggatgattgttgttctgagccctgactatgtgacagaaaagagcatcagcatgctggagtttaaactgggtgtcatgtgccagaactccattgccaccaagctcattgtggttgagtaccgtccccttgagcacccgcacccaggcattcttcagctcaaagagtctgtgtcttttgtgagctggaagggagaaaagtccaaacattctggctctaaattctggaaagctttgcggttggctcttcccctgagaagtctgagtgccagttctggctggaatgagagctgctcttcccagtctgacatcagtctggatcacgttcaaaggaggagaagtcgtttgaaagagcccccagaacttcagagctcagagagggctgcaggtagccctccagccccaggcacaatgtccaagcaccgagggaagtcctccgccacctgccgctgttgtgtcacctactgtgaaggagagaatcaccttaggaacaagagccgggcagagattcataaccagccccagtgggagacacacctctgtaagcctgttccccaagagtcagaaactcaatggatacaaaatggcaccagattggaaccccctgctccccagatctcagcccttgctcttcatcatttcacggacttatccaataacaacgacttttatatcctataattactgtgtgtggtgggtggtggctactatctctaccaaccctctgtatgtcatgaacctgtgggaaaatctgacatttttatcatctaatggactatcagatttctgtcccctttattgatttttaaaaactatttatttctaggagacaaaagacctgaaggacctgaatccagaattattgcctctaaaggcctcagaagagcacactcttcttgggccctagaaggtcagtatgtgaaagttgcctaaagtctgatcctctatcttgtccaatggtttaaaactgagctaagaatttaaatgtgtttcttttcagtgagttgatcaacctcacattataagtcagtcaggtgtacttgggctatgatgcttacagggtgtatgcattcccagggagcagcatggaaaggagctggttctggtggaagctgtaggacgaagctcaacagaaaacctacagcacatttttcctcaaagaaccaaacatacccacccagggatacatggcgttctctgtctcactgtaaactagtgttctctaaactgcctaacattgttagcatcaataaaattctatttttacgtcattttatttgtactaacaaatttttacatctctctcacccttctacttcctatgattgttgtattcttatctggagagtattccatttcagaaaatggagatttggtttaggtaccagaaaaactaagatgccttttttgtttctctctgatatgtaatgggagagatgtggaaaataaccaaaagagagggagaatgtgacttaaatgaaatggaagtttacaacaatctcatatttttagaactgacagatgaaaaattccgtattgtaagtgatgtagcgtagaaataggtgccttcgtcccattcaggcttctgagaagggataataaattcaagtgcctacaaggatcagaaggtaagagaaaagagaaaatatggccagataccagcttattttacatgctctccatctagaactgatgtgaatagggacataggcacagatagttatttcttctctgtaaacattttcataaactcatataaggcacatggcatttgatttccaagtcaggtagatcattggccctctaagcaactgaagaacacatatttcttaaaaagggtcagcttcaggccgggtgtggtggctcatgcctataatcccagcactttgggaagtcaagacttgtggatcaactgaggtcagttgttcaagagcagcctggccaacattgtgaaaccccatctctacaaaaatacaaaattagccaggtatggtggtgggcacctgtaatcccagctactcaggaggctgaggcaggagaaactcttgaacctaggaggtggaggttgcagtgagccgagatcgtgccactgcactccagacttggtgacagagcaagactccatcttaaaaaaaaaaaaaaaaatgggtagcttctactcagttccatttgatttttgtcactaattgagccccaatgttgccatattgtccatttttttctaaagaatctaaaaaattcagatttttatgtataatgtcaattatgggatggcttaaagttaagaaggaaaaaacaaagagccaaacaaattatatctgtgggacatagttagcctgagggcaactagtttgtaatttcataactaaagtattcagccaaagaacatatctccaaatggaattttagtgtccctgataataccagaactggaagacacaggttggctctaaggacatagtggagcatgtttatcctctcctcaaattgaagacatctgggctgttacaattgagctgatctgacctaaccctccattagaaaagaaaaatctggaaaattcggtgccttccatttactctttagaggtttcttgcctgcttactgtcagaaaataagaagaacgaagtctgctactcctgaacatgagcagaaccaaaaaagcaagagaccacaccttacatgagaagtcacctttaatacattagctgtggctgttagtgagttgtggcccaatgagtgtcagtggctcccggtcagtaacagtgaatgggcagtggggaaagaaagaaagcagtttcatctcactacccctcttgaaaatgttctcagaagatcctttctttgtcgaaacaaacaaacaaacaaaaaactagaagattcctactccaaagatgggggaacaagggccccctagagtaaatgtgaactcaccctgaaacttgtaatcagaaaacgacaggccaccctaactaaatatccagtagaaaatgacttagcacaacccaaaggccttgtcctctattaaatcccttcttgtaaagaataatccatccttgatgtatattcaagaaccttcagttggaagacagatagcagtttctctccaaatctattaataatgggtaatgtaagcggctccgaagctcaaggagggagaagattctctgacccactatcagtgttatgccttattaacacagcatctcaaagtgtaaaatatctttggaagaaaatgagaaattaaatttttcatttatacattattttctgttttagtgaagacaaagaaatgaaagaactattggcagagtcatggaaaattaaatatgagctcatattatatgagtagctagaaaattttggtgctctcaaaactacattttggcaagtatcaatttccttggacaatataagtgtagtggaagcagtaaaagtcttagttttcagtattagttatacagcggtcagaaagataatagactatacttctactgtatggagaaaggatcagaggttatattattatttcttgacctgacatgccaaattgaatgtgatgttcagtaccatacatttcaatgaagcaaattataataagaaagaaatttttttcatgggccatgcatatccataatagaaataacaggattgtagggtaaatggatatatcattgcataagaaatattgtctacttagttgcatgagttttaaatcaaatagagatggatgtgagtcctacttctctcctatctgtttgaacatggtctctctgagcctcaatttcctactagctaaaataaagatactattatcaacctca

SEQ ID NO: 143730 - DNA, 4490 bp, Homo sapiens
  Payload ID: 8402
  Gene Symbol: IL1RAP
  Gene Name: interleukin 1 receptor accessory protein
  Uniprot ID: Q9NPH3
  ENST ID: ENST00000342550
  CDS Start-End: 120-1160
tgccgggatccaggtctccggggtccgctttggccagaggcgcggaaggaagcagtgcccggcgacactgcacccatcccggctgcttttgctgcgccctctcagcttcccaagaaaggatgacacttctgtggtgtgtagtgagtctctacttttatggaatcctgcaaagtgatgcctcagaacgctgcgatgactggggactagacaccatgaggcaaatccaagtgtttgaagatgagccagctcgcatcaagtgcccactctttgaacacttcttgaaattcaactacagcacagcccattcagctggccttactctgatctggtattggactaggcaggaccgggaccttgaggagccaattaacttccgcctccccgagaaccgcattagtaaggagaaagatgtgctgtggttccggcccactctcctcaatgacactggcaactatacctgcatgttaaggaacactacatattgcagcaaagttgcatttcccttggaagttgttcaaaaagacagctgtttcaattcccccatgaaactcccagtgcataaactgtatatagaatatggcattcagaggatcacttgtccaaatgtagatggatattttccttccagtgtcaaaccgactatcacttggtatatgggctgttataaaatacagaattttaataatgtaatacccgaaggtatgaacttgagtttcctcattgccttaatttcaaataatggaaattacacatgtgttgttacatatccagaaaatggacgtacgtttcatctcaccaggactctgactgtaaaggtagtaggctctccaaaaaatgcagtgccccctgtgatccattcacctaatgatcatgtggtctatgagaaagaaccaggagaggagctactcattccctgtacggtctattttagttttctgatggattctcgcaatgaggtttggtggaccattgatggaaaaaaacctgatgacatcactattgatgtcaccattaacgaaagtgccagctccaagatacacagtggaactggcttgtggttttggagccacagtcctgctagtggtgattctcattgttgtttaccatgtttactggctagagatggtcctattttaccgggctcattttggaacagatgaaaccattttagatggaaaagagtatgatatttatgtatcctatgcaaggaatgcggaagaagaagaatttgtattactgaccctccgtggagttttggagaatgaatttggatacaagctgtgcatctttgaccgagacagtctgcctgggggaattgtcacagatgagactttgagcttcattcagaaaagcagacgcctcctggttgttctaagccccaactacgtgctccagggaacccaagccctcctggagctcaaggctggcctagaaaatatggcctctcggggcaacatcaacgtcattttagtacagtacaaagctgtgaaggaaacgaaggtgaaagagctgaagagggctaagacggtgctcacggtcattaaatggaaaggggaaaaatccaagtatccacagggcaggttctggaagcagctgcaggtggccatgccagtgaagaaaagtcccaggcggtctagcagtgatgagcagggcctctcgtattcatctttgaaaaatgtatgaaaggaataatgaaaagggtaaaaagaacaaggggtgctccaggaagaaagagtccccccagtcttcattcgcagtttatggtttcataggcaaaaataatggtctaagcctcccaatagggataaatttagggtgactgtgtggctgactattctgcttcctcaggcaacactaaagtttagaaagatatcatcaacgttctgtcaccagtctctgatgccactatgttctttgcaggcaaagacttgttcaatgcgaatttccccttctacattgtctatccctgtttttatatgtctccattctttttaaaatcttaacatatggagcagcctttcctatgaatttaaatatgcctttaaaataagtcactgttgacagggtcatgagtttccgagtatagttttctttttatcttatttttactcgtccgttgaaaagataatcaaggcctacattttagctgaggataatgaacttttttcctcattcggctgtataatacataaccacagcaagactgacatccacttaggatgatacaaagcagtgtaactgaaaatgtttcttttaattgatttaaaggacttgtcttctataccacccttgtcctcatctcaggtaatttatgaaatctatgtaaacttgaaaaatatttcttaatttttgtttttgctccagtcaattcctgattatccacaggtcaacccacattttttcattccttctccctatctgcttatatcgcattgctcatttagagtttgcaggaggctccatactaggttcagtctgaaagaaatctcctaatggtgctatagagagggaggtaacagaaagactcttttagggcatttttctgactcatgaaaagagcacagaaaaggatgtttggcaatttgtcttttaagtcttaaccttgctaatgtgaatactgggaaagtgattttttctcactcgtttttgttgctccattgtaaagggcggaggtcagtcttagtggccttgagagttgcttttggcattaatattctaagagaattaactgtatttcctgtcacctattcactagtgcaggaaatatacttgctccaaataagtcagtatgagaagtcactgtcaatgaaagttgttttgtttgttttcagtaatattttgctgtttttaagacttggaaaactaagtgcagagtttacagagtggtaaatatctatgttacatgtagattatacatatatatacacacgtgtatatgagatatatatcttatatctccacaaacacaaattatatatatacatatccacacacatacattacatatatctgtgtatataaatccacatgcacatgaaatatatatatatatataatttgtgtgtgtgtatgtgtatgtatatgactttaaatagctatgggtacaatattaaaaaccactggaactcttgtccagtttttaaattatgtttttactggaatgtttttgtgtcagtgttttctgtacatattatttgttaattcacagctcacagagtgatagttgtcatagttcttgccttccctaagtttatataaataacttaagtattgctacagtttatctaggttgcagtggcatctgctgtgcacagagcttccatggtcactgctaagcagtagccagccatcgggcattaattgatttcctactatattcccagcagacacatttagaaactaagctatgttaacctcagtgctcaactatttgaactgttgagtgataaaggaaacaaatataactgtaaatgaatcttggtatcctgtgaaacagaataattcgtaatttaagaaagcccttatcccggtaacatgaatgttgatgaacaaatgtaaaattatatcctatatttaagtacccataataaatcatttccctctataagtgttattgattattttaaattgaaaaaagtttcacttggatgaaaaaagtagaaaagtaggtcattcttggatctacttttttttagccttattaatatttttccctattagaaaccacaattactccctctattaacccttcacttactagaccagaaaagaacttattccagataagctttgaatatcaattcttacataaactttaggcaaacagggaatagtctagtcaccaaaggaccattctcttgccaatgctgcattccttttgcacttttggattccatatttatcccaaatgctgttgggcacccctagaaataccttgatgttttttctatttatatgcctgcctttggtacttaattttacaaatgctgtaatataaagcatatcaagtttatgtgatacgtatcattgcaagagaatttgtttcaagatttttttttaatgttccagaagatggccaatagagaacattcaagggaaatggggaaacataatttagagaacaagaacaaaccatgtctcaaatttttttaaaaaaaattaatggttttaaatatatgctatagggacgttccatgcccaggttaacaaagaactgtgatatatagagtgtctaattacaaaatcatatacgatttatttaattctcttctgtattgtaacttagatgattcccaaggactctaataaaaaatcacttcattgtatttggaaacaaaaacatcattcattaattacttattttctttccataggttttaatattttgagagtgtcttttttatttcattcatgaacttttgtatttttcatttttcatttgatttgtaaatttacttatgttaaaaataaaccatttattttcagctttg

SEQ ID NO: 143731 - DNA, 1957 bp, Homo sapiens
  Payload ID: 8402
  Gene Symbol: IL1RAP
  Gene Name: interleukin 1 receptor accessory protein
  Uniprot ID: Q9NPH3
  ENST ID: ENST00000422940
  CDS Start-End: 120-1190
tgccgggatccaggtctccggggtccgctttggccagaggcgcggaaggaagcagtgcccggcgacactgcacccatcccggctgcttttgctgcgccctctcagcttcccaagaaaggatgacacttctgtggtgtgtagtgagtctctacttttatggaatcctgcaaagtgatgcctcagaacgctgcgatgactggggactagacaccatgaggcaaatccaagtgtttgaagatgagccagctcgcatcaagtgcccactctttgaacacttcttgaaattcaactacagcacagcccattcagctggccttactctgatctggtattggactaggcaggaccgggaccttgaggagccaattaacttccgcctccccgagaaccgcattagtaaggagaaagatgtgctgtggttccggcccactctcctcaatgacactggcaactatacctgcatgttaaggaacactacatattgcagcaaagttgcatttcccttggaagttgttcaaaaagacagctgtttcaattcccccatgaaactcccagtgcataaactgtatatagaatatggcattcagaggatcacttgtccaaatgtagatggatattttccttccagtgtcaaaccgactatcacttggtatatgggctgttataaaatacagaattttaataatgtaatacccgaaggtatgaacttgagtttcctcattgccttaatttcaaataatggaaattacacatgtgttgttacatatccagaaaatggacgtacgtttcatctcaccaggactctgactgtaaaggtagtaggctctccaaaaaatgcagtgccccctgtgatccattcacctaatgatcatgtggtctatgagaaagaaccaggagaggagctactcattccctgtacggtctattttagttttctgatggattctcgcaatgaggtttggtggaccattgatggaaaaaaacctgatgacatcactattgatgtcaccattaacgaaagtataagtcatagtagaacagaagatgaaacaagaactcagattttgagcatcaagaaagttacctctgaggatctcaagcgcagctatgtctgtcatgctagaagtgccaaaggcgaagttgccaaagcagccaaggtgaagcagaaaggtaatagatgcggtcagtgatgaatctctcagctccaaattaacattgtggtgaataaggacaaaaggagagattgagaacaagagagctccagcacctagcccgacggcatctaacccatagtaatgaatcaaacttaaatgaaaaatatgaaagttttcatctatgtaagatactcaaaatattgtttctgatattgttagtaccgtaatgcccaaatgtagctaaaaaaatcgacgtgagtacagtgagacacaattttgtgtctgtacaattatgaaaaattaaaaacaaagaaaatattcaaagctaccaaagatagaaaaaactggtagagccacatattgttggtgaattattaagacccttttaaaaatcattcatggtagacttcaagagtcataaaaaagattgcatcatctgacctaagactttcggaatttttcctgaacaaataacagaaagggaattatataccttttaatattattagaagcattatctgtagttgtaaaacattattaatagcagccatccaattgtatgcaactaattaaggtattgaatgtttattttccaaaaatgcataattataatattattttaaacactatgtatcaatatttaagcaggtttataatataccagcagccacaattgctaaaatgaaaatcatttaaattatgattttaaatggtataaacatgatttctatgttgatagtactatattattctacaataaatggaaattataaagccttcttgtcagaagtgctgctcctaaa

SEQ ID NO: 143732 - DNA, 534 bp, Homo sapiens
  Payload ID: 8402
  Gene Symbol: IL1RAP
  Gene Name: interleukin 1 receptor accessory protein
  ENST ID: ENST00000422625
  CDS Start-End: 196-534
ctcactggggaagactgccgggatccaggtctccggggtccgctttggccagaggcgcggaaggaagcagtgcccggcgacactgcacccatcccggctgcttttgctgcgccctctcagcttcccaagaaagtccttttgcagattgctcagcacaggacatgataattttcatctcggattttggaggaattgatgacacttctgtggtgtgtagtgagtctctacttttatggaatcctgcaaagtgatgcctcagaacgctgcgatgactggggactagacaccatgaggcaaatccaagtgtttgaagatgagccagctcgcatcaagtgcccactctttgaacacttcttgaaattcaactacagcacagcccattcagctggccttactctgatctggtattggactaggcaggaccgggaccttgaggagccaattaacttccgcctccccgagaaccgcattagtaaggagaaagatgtgctgtggttccggcccactctcctcaatgacactggcaactatacc

SEQ ID NO: 143733 - DNA, 4769 bp, Homo sapiens
  Payload ID: 8402
  Gene Symbol: IL1RAP
  Gene Name: interleukin 1 receptor accessory protein
  Uniprot ID: Q9NPH3
  ENST ID: ENST00000447382
  CDS Start-End: 250-1962
aaaagaaagtgcggcggaaagtaagaggctcactggggaagactgccgggatccaggtctccggggtccgctttggccagaggcgcggaaggaagcagtgcccggcgacactgcacccatcccggctgcttttgctgcgccctctcagcttcccaagaaaggcatcgtcatgtgatcatcacctaagaactagaacatcagcaggccctagaagcctcactcttgcccctccctttaatatctcaaaggatgacacttctgtggtgtgtagtgagtctctacttttatggaatcctgcaaagtgatgcctcagaacgctgcgatgactggggactagacaccatgaggcaaatccaagtgtttgaagatgagccagctcgcatcaagtgcccactctttgaacacttcttgaaattcaactacagcacagcccattcagctggccttactctgatctggtattggactaggcaggaccgggaccttgaggagccaattaacttccgcctccccgagaaccgcattagtaaggagaaagatgtgctgtggttccggcccactctcctcaatgacactggcaactatacctgcatgttaaggaacactacatattgcagcaaagttgcatttcccttggaagttgttcaaaaagacagctgtttcaattcccccatgaaactcccagtgcataaactgtatatagaatatggcattcagaggatcacttgtccaaatgtagatggatattttccttccagtgtcaaaccgactatcacttggtatatgggctgttataaaatacagaattttaataatgtaatacccgaaggtatgaacttgagtttcctcattgccttaatttcaaataatggaaattacacatgtgttgttacatatccagaaaatggacgtacgtttcatctcaccaggactctgactgtaaaggtagtaggctctccaaaaaatgcagtgccccctgtgatccattcacctaatgatcatgtggtctatgagaaagaaccaggagaggagctactcattccctgtacggtctattttagttttctgatggattctcgcaatgaggtttggtggaccattgatggaaaaaaacctgatgacatcactattgatgtcaccattaacgaaagtataagtcatagtagaacagaagatgaaacaagaactcagattttgagcatcaagaaagttacctctgaggatctcaagcgcagctatgtctgtcatgctagaagtgccaaaggcgaagttgccaaagcagccaaggtgaagcagaaagtgccagctccaagatacacagtggaactggcttgtggttttggagccacagtcctgctagtggtgattctcattgttgtttaccatgtttactggctagagatggtcctattttaccgggctcattttggaacagatgaaaccattttagatggaaaagagtatgatatttatgtatcctatgcaaggaatgcggaagaagaagaatttgtattactgaccctccgtggagttttggagaatgaatttggatacaagctgtgcatctttgaccgagacagtctgcctgggggaattgtcacagatgagactttgagcttcattcagaaaagcagacgcctcctggttgttctaagccccaactacgtgctccagggaacccaagccctcctggagctcaaggctggcctagaaaatatggcctctcggggcaacatcaacgtcattttagtacagtacaaagctgtgaaggaaacgaaggtgaaagagctgaagagggctaagacggtgctcacggtcattaaatggaaaggggaaaaatccaagtatccacagggcaggttctggaagcagctgcaggtggccatgccagtgaagaaaagtcccaggcggtctagcagtgatgagcagggcctctcgtattcatctttgaaaaatgtatgaaaggaataatgaaaagggtaaaaagaacaaggggtgctccaggaagaaagagtccccccagtcttcattcgcagtttatggtttcataggcaaaaataatggtctaagcctcccaatagggataaatttagggtgactgtgtggctgactattctgcttcctcaggcaacactaaagtttagaaagatatcatcaacgttctgtcaccagtctctgatgccactatgttctttgcaggcaaagacttgttcaatgcgaatttccccttctacattgtctatccctgtttttatatgtctccattctttttaaaatcttaacatatggagcagcctttcctatgaatttaaatatgcctttaaaataagtcactgttgacagggtcatgagtttccgagtatagttttctttttatcttatttttactcgtccgttgaaaagataatcaaggcctacattttagctgaggataatgaacttttttcctcattcggctgtataatacataaccacagcaagactgacatccacttaggatgatacaaagcagtgtaactgaaaatgtttcttttaattgatttaaaggacttgtcttctataccacccttgtcctcatctcaggtaatttatgaaatctatgtaaacttgaaaaatatttcttaatttttgtttttgctccagtcaattcctgattatccacaggtcaacccacattttttcattccttctccctatctgcttatatcgcattgctcatttagagtttgcaggaggctccatactaggttcagtctgaaagaaatctcctaatggtgctatagagagggaggtaacagaaagactcttttagggcatttttctgactcatgaaaagagcacagaaaaggatgtttggcaatttgtcttttaagtcttaaccttgctaatgtgaatactgggaaagtgattttttctcactcgtttttgttgctccattgtaaagggcggaggtcagtcttagtggccttgagagttgcttttggcattaatattctaagagaattaactgtatttcctgtcacctattcactagtgcaggaaatatacttgctccaaataagtcagtatgagaagtcactgtcaatgaaagttgttttgtttgttttcagtaatattttgctgtttttaagacttggaaaactaagtgcagagtttacagagtggtaaatatctatgttacatgtagattatacatatatatacacacgtgtatatgagatatatatcttatatctccacaaacacaaattatatatatacatatccacacacatacattacatatatctgtgtatataaatccacatgcacatgaaatatatatatatatataatttgtgtgtgtgtatgtgtatgtatatgactttaaatagctatgggtacaatattaaaaaccactggaactcttgtccagtttttaaattatgtttttactggaatgtttttgtgtcagtgttttctgtacatattatttgttaattcacagctcacagagtgatagttgtcatagttcttgccttccctaagtttatataaataacttaagtattgctacagtttatctaggttgcagtggcatctgctgtgcacagagcttccatggtcactgctaagcagtagccagccatcgggcattaattgatttcctactatattcccagcagacacatttagaaactaagctatgttaacctcagtgctcaactatttgaactgttgagtgataaaggaaacaaatataactgtaaatgaatcttggtatcctgtgaaacagaataattcgtaatttaagaaagcccttatcccggtaacatgaatgttgatgaacaaatgtaaaattatatcctatatttaagtacccataataaatcatttccctctataagtgttattgattattttaaattgaaaaaagtttcacttggatgaaaaaagtagaaaagtaggtcattcttggatctacttttttttagccttattaatatttttccctattagaaaccacaattactccctctattaacccttcacttactagaccagaaaagaacttattccagataagctttgaatatcaattcttacataaactttaggcaaacagggaatagtctagtcaccaaaggaccattctcttgccaatgctgcattccttttgcacttttggattccatatttatcccaaatgctgttgggcacccctagaaataccttgatgttttttctatttatatgcctgcctttggtacttaattttacaaatgctgtaatataaagcatatcaagtttatgtgatacgtatcattgcaagagaatttgtttcaagatttttttttaatgttccagaagatggccaatagagaacattcaagggaaatggggaaacataatttagagaacaagaacaaaccatgtctcaaatttttttaaaaaaaattaatggttttaaatatatgctatagggacgttccatgcccaggttaacaaagaactgtgatatatagagtgtctaattacaaaatcatatacgatttatttaattctcttctgtattgtaacttagatgattcccaaggactctaataaaaaatcacttcattgtatttggaaacaaaaacatcattcattaattacttattttctttccataggttttaatattttgagagtgtcttttttatttcattcatgaacttttgtatttttcatttttcatttgatttgtaaatttacttatgttaaaaataaaccatttattttcagctttg

SEQ ID NO: 143734 - DNA, 1565 bp, Homo sapiens
  Payload ID: 8402
  Gene Symbol: IL1RAP
  Gene Name: interleukin 1 receptor accessory protein
  ENST ID: ENST00000434491
  CDS Start-End: 192-839
tgccgggatccaggtctccggggtccgctttggccagaggcgcggaaggaagcagtgcccggcgacactgcacccatcccggctgcttttgctgcgccctctcagcttcccaagaaaggaacactacatattgcagcaaagttgcatttcccttggaagttgttcaaaaagacagctgtttcaattcccccatgaaactcccagtgcataaactgtatatagaatatggcattcagaggatcacttgtccaaatgtagatggatattttccttccagtgtcaaaccgactatcacttggtatatgggctgttataaaatacagaattttaataatgtaatacccgaaggtatgaacttgagtttcctcattgccttaatttcaaataatggaaattacacatgtgttgttacatatccagaaaatggacgtacgtttcatctcaccaggactctgactgtaaaggtagtaggctctccaaaaaatgcagtgccccctgtgatccattcacctaatgatcatgtggtctatgagaaagaaccaggagaggagctactcattccctgtacggtctattttagttttctgatggattctcgcaatgaggtttggtggaccattgatggaaaaaaacctgatgacatcactattgatgtcaccattaacgaaagtataagtcatagtagaacagaagatgaaacaagaactcagattttgagcatcaagaaagttacctctgaggatctcaagcgcagctatgtctgtcatgctagaagtgccaaaggcgaagttgccaaagcagccaaggtgaagcagaaaggtaatagatgcggtcagtgatgaatctctcagctccaaattaacattgtggtgaataaggacaaaaggagagattgagaacaagagagctccagcacctagcccgacggcatctaacccatagtaatgaatcaaacttaaatgaaaaatatgaaagttttcatctatgtaagatactcaaaatattgtttctgatattgttagtaccgtaatgcccaaatgtagctaaaaaaatcgacgtgagtacagtgagacacaattttgtgtctgtacaattatgaaaaattaaaaacaaagaaaatattcaaagctaccaaagatagaaaaaactggtagagccacatattgttggtgaattattaagacccttttaaaaatcattcatggtagacttcaagagtcataaaaaagattgcatcatctgacctaagactttcggaatttttcctgaacaaataacagaaagggaattatataccttttaatattattagaagcattatctgtagttgtaaaacattattaatagcagccatccaattgtatgcaactaattaaggtattgaatgtttattttccaaaaatgcataattataatattattttaaacactatgtatcaatatttaagcaggtttataatataccagcagccacaattgctaaaatgaaaatcatttaaattatgattttaaatggtataaacatgatttctatgttgatagtactatattattctacaataaat

SEQ ID NO: 143735 - DNA, 2244 bp, Homo sapiens
  Payload ID: 8402
  Gene Symbol: IL1RAP
  Gene Name: interleukin 1 receptor accessory protein
  Uniprot ID: Q9NPH3
  ENST ID: ENST00000439062
  CDS Start-End: 414-2126
aaaagaaagtgcggcggaaagtaagaggctcactggggaagactgccgggatccaggtctccggggtccgctttggccagaggcgcggaaggaagcagtgcccggcgacactgcacccatcccggctgcttttgctgcgccctctcagcttcccaagaaagggctttgacctgaagcttgaaattgagtttgggacaataatgtgtctcatggggaattgcatggactccttatcataagccaaatgctgaggtaaagctgcggaattgagtcgtcctccaagaagggagagaaaatgatgtcttgtgacatttccagataactggcatcgtcatgtgatcatcacctaagaactagaacatcagcaggccctagaagcctcactcttgcccctccctttaatatctcaaaggatgacacttctgtggtgtgtagtgagtctctacttttatggaatcctgcaaagtgatgcctcagaacgctgcgatgactggggactagacaccatgaggcaaatccaagtgtttgaagatgagccagctcgcatcaagtgcccactctttgaacacttcttgaaattcaactacagcacagcccattcagctggccttactctgatctggtattggactaggcaggaccgggaccttgaggagccaattaacttccgcctccccgagaaccgcattagtaaggagaaagatgtgctgtggttccggcccactctcctcaatgacactggcaactatacctgcatgttaaggaacactacatattgcagcaaagttgcatttcccttggaagttgttcaaaaagacagctgtttcaattcccccatgaaactcccagtgcataaactgtatatagaatatggcattcagaggatcacttgtccaaatgtagatggatattttccttccagtgtcaaaccgactatcacttggtatatgggctgttataaaatacagaattttaataatgtaatacccgaaggtatgaacttgagtttcctcattgccttaatttcaaataatggaaattacacatgtgttgttacatatccagaaaatggacgtacgtttcatctcaccaggactctgactgtaaaggtagtaggctctccaaaaaatgcagtgccccctgtgatccattcacctaatgatcatgtggtctatgagaaagaaccaggagaggagctactcattccctgtacggtctattttagttttctgatggattctcgcaatgaggtttggtggaccattgatggaaaaaaacctgatgacatcactattgatgtcaccattaacgaaagtataagtcatagtagaacagaagatgaaacaagaactcagattttgagcatcaagaaagttacctctgaggatctcaagcgcagctatgtctgtcatgctagaagtgccaaaggcgaagttgccaaagcagccaaggtgaagcagaaagtgccagctccaagatacacagtggaactggcttgtggttttggagccacagtcctgctagtggtgattctcattgttgtttaccatgtttactggctagagatggtcctattttaccgggctcattttggaacagatgaaaccattttagatggaaaagagtatgatatttatgtatcctatgcaaggaatgcggaagaagaagaatttgtattactgaccctccgtggagttttggagaatgaatttggatacaagctgtgcatctttgaccgagacagtctgcctgggggaattgtcacagatgagactttgagcttcattcagaaaagcagacgcctcctggttgttctaagccccaactacgtgctccagggaacccaagccctcctggagctcaaggctggcctagaaaatatggcctctcggggcaacatcaacgtcattttagtacagtacaaagctgtgaaggaaacgaaggtgaaagagctgaagagggctaagacggtgctcacggtcattaaatggaaaggggaaaaatccaagtatccacagggcaggttctggaagcagctgcaggtggccatgccagtgaagaaaagtcccaggcggtctagcagtgatgagcagggcctctcgtattcatctttgaaaaatgtatgaaaggaataatgaaaagggtaaaaagaacaaggggtgctccaggaagaaagagtccccccagtcttcattcgcagtttatggtttcataggcaaaaataatggtctaagcctcccaata

SEQ ID NO: 143736 - DNA, 2760 bp, Homo sapiens
  Payload ID: 8402
  Gene Symbol: IL1RAP
  Gene Name: interleukin 1 receptor accessory protein
  Uniprot ID: Q9NPH3
  ENST ID: ENST00000443369
  CDS Start-End: 108-2171
agaacagtccctagtctatagtcagcaggcatgaatgctagttattattatttaagcccttgaaagtagtaagtgatttcccttacctttgtatttatggttacaggatgacacttctgtggtgtgtagtgagtctctacttttatggaatcctgcaaagtgatgcctcagaacgctgcgatgactggggactagacaccatgaggcaaatccaagtgtttgaagatgagccagctcgcatcaagtgcccactctttgaacacttcttgaaattcaactacagcacagcccattcagctggccttactctgatctggtattggactaggcaggaccgggaccttgaggagccaattaacttccgcctccccgagaaccgcattagtaaggagaaagatgtgctgtggttccggcccactctcctcaatgacactggcaactatacctgcatgttaaggaacactacatattgcagcaaagttgcatttcccttggaagttgttcaaaaagacagctgtttcaattcccccatgaaactcccagtgcataaactgtatatagaatatggcattcagaggatcacttgtccaaatgtagatggatattttccttccagtgtcaaaccgactatcacttggtatatgggctgttataaaatacagaattttaataatgtaatacccgaaggtatgaacttgagtttcctcattgccttaatttcaaataatggaaattacacatgtgttgttacatatccagaaaatggacgtacgtttcatctcaccaggactctgactgtaaaggtagtaggctctccaaaaaatgcagtgccccctgtgatccattcacctaatgatcatgtggtctatgagaaagaaccaggagaggagctactcattccctgtacggtctattttagttttctgatggattctcgcaatgaggtttggtggaccattgatggaaaaaaacctgatgacatcactattgatgtcaccattaacgaaagtataagtcatagtagaacagaagatgaaacaagaactcagattttgagcatcaagaaagttacctctgaggatctcaagcgcagctatgtctgtcatgctagaagtgccaaaggcgaagttgccaaagcagccaaggtgaagcagaaagtgccagctccaagatacacagtggaactggcttgtggttttggagccacagtcctgctagtggtgattctcattgttgtttaccatgtttactggctagagatggtcctattttaccgggctcattttggaacagatgaaaccattttagatggaaaagagtatgatatttatgtatcctatgcaaggaatgcggaagaagaagaatttgtattactgaccctccgtggagttttggagaatgaatttggatacaagctgtgcatctttgaccgagacagtctgcctgggggaaatacagtggaagcagtttttgatttcattcagagaagcagaaggatgattgttgttctgagccctgactatgtgacagaaaagagcatcagcatgctggagtttaaactgggtgtcatgtgccagaactccattgccaccaagctcattgtggttgagtaccgtccccttgagcacccgcacccaggcattcttcagctcaaagagtctgtgtcttttgtgagctggaagggagaaaagtccaaacattctggctctaaattctggaaagctttgcggttggctcttcccctgagaagtctgagtgccagttctggctggaatgagagctgctcttcccagtctgacatcagtctggatcacgttcaaaggaggagaagtcgtttgaaagagcccccagaacttcagagctcagagagggctgcaggtagccctccagccccaggcacaatgtccaagcaccgagggaagtcctccgccacctgccgctgttgtgtcacctactgtgaaggagagaatcaccttaggaacaagagccgggcagagattcataaccagccccagtgggagacacacctctgtaagcctgttccccaagagtcagaaactcaatggatacaaaatggcaccagattggaaccccctgctccccagatctcagcccttgctcttcatcatttcacggacttatccaataacaacgacttttatatcctataattactgtgtgtggtgggtggtggctactatctctaccaaccctctgtatgtcatgaacctgtgggaaaatctgacatttttatcatctaatggactatcagatttctgtcccctttattgatttttaaaaactatttatttctaggagacaaaagacctgaaggacctgaatccagaattattgcctctaaaggcctcagaagagcacactcttcttgggccctagaaggtcagtatgtgaaagttgcctaaagtctgatcctctatcttgtccaatggtttaaaactgagctaagaatttaaatgtgtttcttttcagtgagttgatcaacctcacattataagtcagtcaggtgtacttgggctatgatgcttacagggtgtatgcattcccagggagcagcatggaaaggagctggttctggtggaagctgtaggacgaagctcaacagaaaacctacagcacatttttcctcaaagaaccaaacatacccacccagggatacatggcgttctctgtctcactgtaaactagtgttctctaaactgcctaacattgttagcatcaataaaattctatttttacgtc

SEQ ID NO: 143737 - DNA, 2048 bp, Homo sapiens
  Payload ID: 8402
  Gene Symbol: IL1RAP
  Gene Name: interleukin 1 receptor accessory protein
  Uniprot ID: Q9NPH3
  ENST ID: ENST00000422485
  CDS Start-End: 211-1281
agactgccgggatccaggtctccggggtccgctttggccagaggcgcggaaggaagcagtgcccggcgacactgcacccatcccggctgcttttgctgcgccctctcagcttcccaagaaaggcatcgtcatgtgatcatcacctaagaactagaacatcagcaggccctagaagcctcactcttgcccctccctttaatatctcaaaggatgacacttctgtggtgtgtagtgagtctctacttttatggaatcctgcaaagtgatgcctcagaacgctgcgatgactggggactagacaccatgaggcaaatccaagtgtttgaagatgagccagctcgcatcaagtgcccactctttgaacacttcttgaaattcaactacagcacagcccattcagctggccttactctgatctggtattggactaggcaggaccgggaccttgaggagccaattaacttccgcctccccgagaaccgcattagtaaggagaaagatgtgctgtggttccggcccactctcctcaatgacactggcaactatacctgcatgttaaggaacactacatattgcagcaaagttgcatttcccttggaagttgttcaaaaagacagctgtttcaattcccccatgaaactcccagtgcataaactgtatatagaatatggcattcagaggatcacttgtccaaatgtagatggatattttccttccagtgtcaaaccgactatcacttggtatatgggctgttataaaatacagaattttaataatgtaatacccgaaggtatgaacttgagtttcctcattgccttaatttcaaataatggaaattacacatgtgttgttacatatccagaaaatggacgtacgtttcatctcaccaggactctgactgtaaaggtagtaggctctccaaaaaatgcagtgccccctgtgatccattcacctaatgatcatgtggtctatgagaaagaaccaggagaggagctactcattccctgtacggtctattttagttttctgatggattctcgcaatgaggtttggtggaccattgatggaaaaaaacctgatgacatcactattgatgtcaccattaacgaaagtataagtcatagtagaacagaagatgaaacaagaactcagattttgagcatcaagaaagttacctctgaggatctcaagcgcagctatgtctgtcatgctagaagtgccaaaggcgaagttgccaaagcagccaaggtgaagcagaaaggtaatagatgcggtcagtgatgaatctctcagctccaaattaacattgtggtgaataaggacaaaaggagagattgagaacaagagagctccagcacctagcccgacggcatctaacccatagtaatgaatcaaacttaaatgaaaaatatgaaagttttcatctatgtaagatactcaaaatattgtttctgatattgttagtaccgtaatgcccaaatgtagctaaaaaaatcgacgtgagtacagtgagacacaattttgtgtctgtacaattatgaaaaattaaaaacaaagaaaatattcaaagctaccaaagatagaaaaaactggtagagccacatattgttggtgaattattaagacccttttaaaaatcattcatggtagacttcaagagtcataaaaaagattgcatcatctgacctaagactttcggaatttttcctgaacaaataacagaaagggaattatataccttttaatattattagaagcattatctgtagttgtaaaacattattaatagcagccatccaattgtatgcaactaattaaggtattgaatgtttattttccaaaaatgcataattataatattattttaaacactatgtatcaatatttaagcaggtttataatataccagcagccacaattgctaaaatgaaaatcatttaaattatgattttaaatggtataaacatgatttctatgttgatagtactatattattctacaataaatggaaattataaagccttcttgtcagaagtgctgctcctaaa

SEQ ID NO: 143738 - DNA, 523 bp, Homo sapiens
  Payload ID: 8402
  Gene Symbol: IL1RAP
  Gene Name: interleukin 1 receptor accessory protein
  ENST ID: ENST00000453359
  CDS Start-End: 89-523
agatatttcttgggtagtagaaaaagaaatacttcacagagctgtcaaatctccacatcttcagcattaaatatcatgcaaccaaatgatgacacttctgtggtgtgtagtgagtctctacttttatggaatcctgcaaagtgatgcctcagaacgctgcgatgactggggactagacaccatgaggcaaatccaagtgtttgaagatgagccagctcgcatcaagtgcccactctttgaacacttcttgaaattcaactacagcacagcccattcagctggccttactctgatctggtattggactaggcaggaccgggaccttgaggagccaattaacttccgcctccccgagaaccgcattagtaaggagaaagatgtgctgtggttccggcccactctcctcaatgacactggcaactatacctgcatgttaaggaacactacatattgcagcaaagttgcatttcccttggaagttgttcaaaaagacagctgtttcaattcccccatgaaactccca

SEQ ID NO: 143739 - DNA, 4875 bp, Homo sapiens
  Payload ID: 8402
  Gene Symbol: IL1RAP
  Gene Name: interleukin 1 receptor accessory protein
  Uniprot ID: Q9NPH3
  ENST ID: ENST00000412504
  CDS Start-End: 350-2062
gccagaaagctggagtttgatcatagctctaccactctctagccaaaggatcgtggtgatgttattgaaacttgtctctagccaaaggatcttagttatgttatttaaacctgtgtattaaacttctttatctgcatgtaatatgggaattgaaaaacaaacaacaaaaaaacagaaacaaaataaaacctgtcttattggttggttctgacaatgaaatttgttaatattgtaaaattcttagaacagtccctagtctatagtcagcaggcatgaatgctagttattattatttaagcccttgaaagtagtaagtgatttcccttacctttgtatttatggttacaggatgacacttctgtggtgtgtagtgagtctctacttttatggaatcctgcaaagtgatgcctcagaacgctgcgatgactggggactagacaccatgaggcaaatccaagtgtttgaagatgagccagctcgcatcaagtgcccactctttgaacacttcttgaaattcaactacagcacagcccattcagctggccttactctgatctggtattggactaggcaggaccgggaccttgaggagccaattaacttccgcctccccgagaaccgcattagtaaggagaaagatgtgctgtggttccggcccactctcctcaatgacactggcaactatacctgcatgttaaggaacactacatattgcagcaaagttgcatttcccttggaagttgttcaaaaagacagctgtttcaattcccccatgaaactcccagtgcataaactgtatatagaatatggcattcagaggatcacttgtccaaatgtagatggatattttccttccagtgtcaaaccgactatcacttggtatatgggctgttataaaatacagaattttaataatgtaatacccgaaggtatgaacttgagtttcctcattgccttaatttcaaataatggaaattacacatgtgttgttacatatccagaaaatggacgtacgtttcatctcaccaggactctgactgtaaaggtagtaggctctccaaaaaatgcagtgccccctgtgatccattcacctaatgatcatgtggtctatgagaaagaaccaggagaggagctactcattccctgtacggtctattttagttttctgatggattctcgcaatgaggtttggtggaccattgatggaaaaaaacctgatgacatcactattgatgtcaccattaacgaaagtataagtcatagtagaacagaagatgaaacaagaactcagattttgagcatcaagaaagttacctctgaggatctcaagcgcagctatgtctgtcatgctagaagtgccaaaggcgaagttgccaaagcagccaaggtgaagcagaaagtgccagctccaagatacacagtggaactggcttgtggttttggagccacagtcctgctagtggtgattctcattgttgtttaccatgtttactggctagagatggtcctattttaccgggctcattttggaacagatgaaaccattttagatggaaaagagtatgatatttatgtatcctatgcaaggaatgcggaagaagaagaatttgtattactgaccctccgtggagttttggagaatgaatttggatacaagctgtgcatctttgaccgagacagtctgcctgggggaattgtcacagatgagactttgagcttcattcagaaaagcagacgcctcctggttgttctaagccccaactacgtgctccagggaacccaagccctcctggagctcaaggctggcctagaaaatatggcctctcggggcaacatcaacgtcattttagtacagtacaaagctgtgaaggaaacgaaggtgaaagagctgaagagggctaagacggtgctcacggtcattaaatggaaaggggaaaaatccaagtatccacagggcaggttctggaagcagctgcaggtggccatgccagtgaagaaaagtcccaggcggtctagcagtgatgagcagggcctctcgtattcatctttgaaaaatgtatgaaaggaataatgaaaagggtaaaaagaacaaggggtgctccaggaagaaagagtccccccagtcttcattcgcagtttatggtttcataggcaaaaataatggtctaagcctcccaatagggataaatttagggtgactgtgtggctgactattctgcttcctcaggcaacactaaagtttagaaagatatcatcaacgttctgtcaccagtctctgatgccactatgttctttgcaggcaaagacttgttcaatgcgaatttccccttctacattgtctatccctgtttttatatgtctccattctttttaaaatcttaacatatggagcagcctttcctatgaatttaaatatgcctttaaaataagtcactgttgacagggtcatgagtttccgagtatagttttctttttatcttatttttactcgtccgttgaaaagataatcaaggcctacattttagctgaggataatgaacttttttcctcattcggctgtataatacataaccacagcaagactgacatccacttaggatgatacaaagcagtgtaactgaaaatgtttcttttaattgatttaaaggacttgtcttctataccacccttgtcctcatctcaggtaatttatgaaatctatgtaaacttgaaaaatatttcttaatttttgtttttgctccagtcaattcctgattatccacaggtcaacccacattttttcattccttctccctatctgcttatatcgcattgctcatttagagtttgcaggaggctccatactaggttcagtctgaaagaaatctcctaatggtgctatagagagggaggtaacagaaagactcttttagggcatttttctgactcatgaaaagagcacagaaaaggatgtttggcaatttgtcttttaagtcttaaccttgctaatgtgaatactgggaaagtgattttttctcactcgtttttgttgctccattgtaaagggcggaggtcagtcttagtggccttgagagttgcttttggcattaatattctaagagaattaactgtatttcctgtcacctattcactagtgcaggaaatatacttgctccaaataagtcagtatgagaagtcactgtcaatgaaagttgttttgtttgttttcagtaatattttgctgtttttaagacttggaaaactaagtgcagagtttacagagtggtaaatatctatgttacatgtagattatacatatatatacacacgtgtatatgagatatatatcttatatctccacaaacacaaattatatatatacatatccacacacatacattacatatatctgtgtatataaatccacatgcacatgaaatatatatatatatataatttgtgtgtgtgtatgtgtatgtatatgactttaaatagctatgggtacaatattaaaaaccactggaactcttgtccagtttttaaattatgtttttactggaatgtttttgtgtcagtgttttctgtacatattatttgttaattcacagctcacagagtgatagttgtcatagttcttgccttccctaagtttatataaataacttaagtattgctacagtttatctaggttgcagtggcatctgctgtgcacagagcttccatggtcactgctaagcagtagccagccatcgggcattaattgatttcctactatattcccagcagacacatttagaaactaagctatgttaacctcagtgctcaactatttgaactgttgagtgataaaggaaacaaatataactgtaaatgaatcttggtatcctgtgaaacagaataattcgtaatttaagaaagcccttatcccggtaacatgaatgttgatgaacaaatgtaaaattatatcctatatttaagtacccataataaatcatttccctctataagtgttattgattattttaaattgaaaaaagtttcacttggatgaaaaaagtagaaaagtaggtcattcttggatctacttttttttagccttattaatatttttccctattagaaaccacaattactccctctattaacccttcacttactagaccagaaaagaacttattccagataagctttgaatatcaattcttacataaactttaggcaaacagggaatagtctagtcaccaaaggaccattctcttgccaatgctgcattccttttgcacttttggattccatatttatcccaaatgctgttgggcacccctagaaataccttgatgttttttctatttatatgcctgcctttggtacttaattttacaaatgctgtaatataaagcatatcaagtttatgtgatacgtatcattgcaagagaatttgtttcaagatttttttttaatgttccagaagatggccaatagagaacattcaagggaaatggggaaacataatttagagaacaagaacaaaccatgtctcaaatttttttaaaaaaaattaatggttttaaatatatgctatagggacgttccatgcccaggttaacaaagaactgtgatatatagagtgtctaattacaaaatcatatacgatttatttaattctcttctgtattgtaacttagatgattcccaaggactctaataaaaaatcacttcattgtatttggaaacaaaaacatcattcattaattacttattttctttccataggttttaatattttgagagtgtcttttttatttcattcatgaacttttgtatttttcatttttcatttgatttgtaaatttacttatgttaaaaataaaccatttattttcagctttgaatttt

SEQ ID NO: 143740 - DNA, 795 bp, Homo sapiens
  Payload ID: 8402
  Gene Symbol: IL1RAP
  Gene Name: interleukin 1 receptor accessory protein
  ENST ID: ENST00000412080
  CDS Start-End: 1-581
tgtttattcacataggaacctccaaacatatagaagtaaagacacagggctgttataaaatacagaattttaataatgtaatacccgaaggtatgaacttgagtttcctcattgccttaatttcaaataatggaaattacacatgtgttgttacatatccagaaaatggacgtacgtttcatctcaccaggactctgactgtaaaggtagtaggctctccaaaaaatgcagtgccccctgtgatccattcacctaatgatcatgtggtctatgagaaagaaccaggagaggagctactcattccctgtacggtctattttagttttctgatggattctcgcaatgaggtttggtggaccattgatggaaaaaaacctgatgacatcactattgatgtcaccattaacgaaagtataagtcatagtagaacagaagatgaaacaagaactcagattttgagcatcaagaaagttacctctgaggatctcaagcgcagctatgtctgtcatgctagaagtgccaaaggcgaagttgccaaagcagccaaggtgaagcagaaaggtaatagatgcggtcagtgatgaatctctcagctccaaattaacattgtggtgaataaggacaaaaggagagattgagaacaagagagctccagcacctagcccgacggcatctaacccatagtaatgaatcaaacttaaatgaaaaatatgaaagttttcatctatgtaagatactcaaaatattgtttctgatattgttagtaccgtaatgcccaaatgtagctaaaaaaat

SEQ ID NO: 143741 - DNA, 4577 bp, Homo sapiens
  Payload ID: 8402
  Gene Symbol: IL1RAP
  Gene Name: interleukin 1 receptor accessory protein
  Uniprot ID: Q9NPH3
  ENST ID: ENST00000413869
  CDS Start-End: 207-1247
tgccgggatccaggtctccggggtccgctttggccagaggcgcggaaggaagcagtgcccggcgacactgcacccatcccggctgcttttgctgcgccctctcagcttcccaagaaaggcatcgtcatgtgatcatcacctaagaactagaacatcagcaggccctagaagcctcactcttgcccctccctttaatatctcaaaggatgacacttctgtggtgtgtagtgagtctctacttttatggaatcctgcaaagtgatgcctcagaacgctgcgatgactggggactagacaccatgaggcaaatccaagtgtttgaagatgagccagctcgcatcaagtgcccactctttgaacacttcttgaaattcaactacagcacagcccattcagctggccttactctgatctggtattggactaggcaggaccgggaccttgaggagccaattaacttccgcctccccgagaaccgcattagtaaggagaaagatgtgctgtggttccggcccactctcctcaatgacactggcaactatacctgcatgttaaggaacactacatattgcagcaaagttgcatttcccttggaagttgttcaaaaagacagctgtttcaattcccccatgaaactcccagtgcataaactgtatatagaatatggcattcagaggatcacttgtccaaatgtagatggatattttccttccagtgtcaaaccgactatcacttggtatatgggctgttataaaatacagaattttaataatgtaatacccgaaggtatgaacttgagtttcctcattgccttaatttcaaataatggaaattacacatgtgttgttacatatccagaaaatggacgtacgtttcatctcaccaggactctgactgtaaaggtagtaggctctccaaaaaatgcagtgccccctgtgatccattcacctaatgatcatgtggtctatgagaaagaaccaggagaggagctactcattccctgtacggtctattttagttttctgatggattctcgcaatgaggtttggtggaccattgatggaaaaaaacctgatgacatcactattgatgtcaccattaacgaaagtgccagctccaagatacacagtggaactggcttgtggttttggagccacagtcctgctagtggtgattctcattgttgtttaccatgtttactggctagagatggtcctattttaccgggctcattttggaacagatgaaaccattttagatggaaaagagtatgatatttatgtatcctatgcaaggaatgcggaagaagaagaatttgtattactgaccctccgtggagttttggagaatgaatttggatacaagctgtgcatctttgaccgagacagtctgcctgggggaattgtcacagatgagactttgagcttcattcagaaaagcagacgcctcctggttgttctaagccccaactacgtgctccagggaacccaagccctcctggagctcaaggctggcctagaaaatatggcctctcggggcaacatcaacgtcattttagtacagtacaaagctgtgaaggaaacgaaggtgaaagagctgaagagggctaagacggtgctcacggtcattaaatggaaaggggaaaaatccaagtatccacagggcaggttctggaagcagctgcaggtggccatgccagtgaagaaaagtcccaggcggtctagcagtgatgagcagggcctctcgtattcatctttgaaaaatgtatgaaaggaataatgaaaagggtaaaaagaacaaggggtgctccaggaagaaagagtccccccagtcttcattcgcagtttatggtttcataggcaaaaataatggtctaagcctcccaatagggataaatttagggtgactgtgtggctgactattctgcttcctcaggcaacactaaagtttagaaagatatcatcaacgttctgtcaccagtctctgatgccactatgttctttgcaggcaaagacttgttcaatgcgaatttccccttctacattgtctatccctgtttttatatgtctccattctttttaaaatcttaacatatggagcagcctttcctatgaatttaaatatgcctttaaaataagtcactgttgacagggtcatgagtttccgagtatagttttctttttatcttatttttactcgtccgttgaaaagataatcaaggcctacattttagctgaggataatgaacttttttcctcattcggctgtataatacataaccacagcaagactgacatccacttaggatgatacaaagcagtgtaactgaaaatgtttcttttaattgatttaaaggacttgtcttctataccacccttgtcctcatctcaggtaatttatgaaatctatgtaaacttgaaaaatatttcttaatttttgtttttgctccagtcaattcctgattatccacaggtcaacccacattttttcattccttctccctatctgcttatatcgcattgctcatttagagtttgcaggaggctccatactaggttcagtctgaaagaaatctcctaatggtgctatagagagggaggtaacagaaagactcttttagggcatttttctgactcatgaaaagagcacagaaaaggatgtttggcaatttgtcttttaagtcttaaccttgctaatgtgaatactgggaaagtgattttttctcactcgtttttgttgctccattgtaaagggcggaggtcagtcttagtggccttgagagttgcttttggcattaatattctaagagaattaactgtatttcctgtcacctattcactagtgcaggaaatatacttgctccaaataagtcagtatgagaagtcactgtcaatgaaagttgttttgtttgttttcagtaatattttgctgtttttaagacttggaaaactaagtgcagagtttacagagtggtaaatatctatgttacatgtagattatacatatatatacacacgtgtatatgagatatatatcttatatctccacaaacacaaattatatatatacatatccacacacatacattacatatatctgtgtatataaatccacatgcacatgaaatatatatatatatataatttgtgtgtgtgtatgtgtatgtatatgactttaaatagctatgggtacaatattaaaaaccactggaactcttgtccagtttttaaattatgtttttactggaatgtttttgtgtcagtgttttctgtacatattatttgttaattcacagctcacagagtgatagttgtcatagttcttgccttccctaagtttatataaataacttaagtattgctacagtttatctaggttgcagtggcatctgctgtgcacagagcttccatggtcactgctaagcagtagccagccatcgggcattaattgatttcctactatattcccagcagacacatttagaaactaagctatgttaacctcagtgctcaactatttgaactgttgagtgataaaggaaacaaatataactgtaaatgaatcttggtatcctgtgaaacagaataattcgtaatttaagaaagcccttatcccggtaacatgaatgttgatgaacaaatgtaaaattatatcctatatttaagtacccataataaatcatttccctctataagtgttattgattattttaaattgaaaaaagtttcacttggatgaaaaaagtagaaaagtaggtcattcttggatctacttttttttagccttattaatatttttccctattagaaaccacaattactccctctattaacccttcacttactagaccagaaaagaacttattccagataagctttgaatatcaattcttacataaactttaggcaaacagggaatagtctagtcaccaaaggaccattctcttgccaatgctgcattccttttgcacttttggattccatatttatcccaaatgctgttgggcacccctagaaataccttgatgttttttctatttatatgcctgcctttggtacttaattttacaaatgctgtaatataaagcatatcaagtttatgtgatacgtatcattgcaagagaatttgtttcaagatttttttttaatgttccagaagatggccaatagagaacattcaagggaaatggggaaacataatttagagaacaagaacaaaccatgtctcaaatttttttaaaaaaaattaatggttttaaatatatgctatagggacgttccatgcccaggttaacaaagaactgtgatatatagagtgtctaattacaaaatcatatacgatttatttaattctcttctgtattgtaacttagatgattcccaaggactctaataaaaaatcacttcattgtatttggaaacaaaaacatcattcattaattacttattttctttccataggttttaatattttgagagtgtcttttttatttcattcatgaacttttgtatttttcatttttcatttgatttgtaaatttacttatgttaaaaataaaccatttattttcagctttg

SEQ ID NO: 143742 - DNA, 1314 bp, Homo sapiens
  Payload ID: 8403
  Gene Symbol: IL1RAPL1
  Gene Name: interleukin 1 receptor accessory protein-like 1
  ENST ID: ENST00000302196
  CDS Start-End: 1-1314
ggtgactctgctaatctaacctgcagagctttctttgggtacagcggagatgtcagtcctttaatttactggatgaaaggagaaaaatttattgaagatctggatgaaaatcgagtttgggaaagtgacattagaattcttaaggagcatcttggggaacaggaagtttccatctcattaattgtggactctgtggaagaaggtgacttgggaaattactcctgttatgttgaaaatggaaatggacgtcgacacgccagcgttctccttcataaacgagagctaatgtacacagtggaacttgctggaggccttggtgctatactcttgctgcttgtatgtttggtgaccatctacaagtgttacaagatagaaatcatgctcttctacaggaatcattttggagctgaagagctcgatggagacaataaagattatgatgcatacttatcatacaccaaagtggatcctgaccagtggaatcaagagactggggaagaagaacgttttgcccttgaaatcctacctgatatgcttgaaaagcattatggatataagttgtttataccagatagagatttaatcccaactggaacatacattgaagatgtggcaagatgtgtagatcaaagcaagcggctgattattgtcatgaccccaaattacgtagttagaaggggctggagcatctttgagctggaaaccagacttcgaaatatgcttgtgactggagaaattaaagtgattctaattgaatgcagtgaactgagaggaattatgaactaccaggaggtggaggccctgaagcacaccatcaagctcctgacggtcattaaatggcatggaccaaaatgcaacaagttgaactccaagttctggaaacgtttacagtatgaaatgccttttaagaggatagaacccattacacatgagcaggctttagatgtcagtgagcaagggccttttggggagctgcagactgtctcggccatttccatggccgcggccacctccacagctctagccactgcccatccagatctccgttctacctttcacaacacgtaccattcacaaatgcgtcagaaacactactaccgaagctatgagtacgacgtacctcctaccggcaccctgcctcttacctccataggcaatcagcatacctactgtaacatccctatgacactcatcaacgggcagcggccacagacaaaatcgagcagggagcagaatccagatgaggcccacacaaacagtgccatcctgccgctgttgccaagggagaccagtatatccagtgtgatatggtga

SEQ ID NO: 143743 - DNA, 3667 bp, Homo sapiens
  Payload ID: 8403
  Gene Symbol: IL1RAPL1
  Gene Name: interleukin 1 receptor accessory protein-like 1
  Uniprot ID: Q9NZN1
  ENST ID: ENST00000378993
  CDS Start-End: 674-2764
gagacaccttcccaaacagcaggggttgtgtgctttcacatagcagtactgtacaaggaaaaccccgtcggatctgttattgcgggatacttgtgaaatatacataggattctttcttatggctgcatcccggatctggaaattttacttggggaccaggaggatttgaaaggctgcatgtactcagaagatttgcaagcaacactccaattcttgtcatagagctcgcagacttctcacttatcggcttttttccttccttattttttaagaattattcttattttcccctctctttttctgctctctcctctctcagtctctccttttctatctgcctcttcatttttctcctagtctgtttttttttttcctgctctgcacctggattgtatcttcagcaaacaatcgggcactttgagaactaactggagacagtcttgtagggaagatctgtatggaattatctgcttttatggtgaacttggcatttgtgaatgggaatcttgttcacaatattaattgctagcaaaaacaagaaaaagaacacaggagtaaaacgtggatttttctgaatacgcattgtgatgaccagcaattaccttaccgactaatatccagaggagaataatttggaagactgttgtggggaacggcctttaagagctggaagatgaaagctccgattccacacttgattctcttatacgctacttttactcagagtttgaaggttgtgaccaaaagaggctccgccgatggatgcactgactggtctatcgatatcaagaaatatcaagttttggtgggagagcctgttcgaatcaaatgtgcactcttttatggttatatcagaacaaattactcccttgcccaaagtgctggactcagtttgatgtggtacaaaagttctggtcctggagactttgaagagccaatagcctttgacggaagtagaatgagcaaagaagaagactccatttggttccggccaacattgctacaggacagtggtctctacgcctgtgtcatcagaaactccacttactgtatgaaagtatccatctcactgacagtgggtgaaaatgacactggactctgctataattccaagatgaagtattttgaaaaagctgaacttagcaaaagcaaggaaatttcatgccgtgacatagaggattttctactgccaaccagagaacctgaaatcctttggtacaaggaatgcaggacaaaaacatggaggccaagtattgtattcaaaagagatactctgcttataagagaagtcagagaagatgacattggaaattatacctgtgaattaaaatatggaggctttgttgtgagaagaactactgaattaactgttacagcccctctgactgataagccacccaagcttttgtatcctatggaaagtaaactgacaattcaggagacccagctgggtgactctgctaatctaacctgcagagctttctttgggtacagcggagatgtcagtcctttaatttactggatgaaaggagaaaaatttattgaagatctggatgaaaatcgagtttgggaaagtgacattagaattcttaaggagcatcttggggaacaggaagtttccatctcattaattgtggactctgtggaagaaggtgacttgggaaattactcctgttatgttgaaaatggaaatggacgtcgacacgccagcgttctccttcataaacgagagctaatgtacacagtggaacttgctggaggccttggtgctatactcttgctgcttgtatgtttggtgaccatctacaagtgttacaagatagaaatcatgctcttctacaggaatcattttggagctgaagagctcgatggagacaataaagattatgatgcatacttatcatacaccaaagtggatcctgaccagtggaatcaagagactggggaagaagaacgttttgcccttgaaatcctacctgatatgcttgaaaagcattatggatataagttgtttataccagatagagatttaatcccaactggaacatacattgaagatgtggcaagatgtgtagatcaaagcaagcggctgattattgtcatgaccccaaattacgtagttagaaggggctggagcatctttgagctggaaaccagacttcgaaatatgcttgtgactggagaaattaaagtgattctaattgaatgcagtgaactgagaggaattatgaactaccaggaggtggaggccctgaagcacaccatcaagctcctgacggtcattaaatggcatggaccaaaatgcaacaagttgaactccaagttctggaaacgtttacagtatgaaatgccttttaagaggatagaacccattacacatgagcaggctttagatgtcagtgagcaagggccttttggggagctgcagactgtctcggccatttccatggccgcggccacctccacagctctagccactgcccatccagatctccgttctacctttcacaacacgtaccattcacaaatgcgtcagaaacactactaccgaagctatgagtacgacgtacctcctaccggcaccctgcctcttacctccataggcaatcagcatacctactgtaacatccctatgacactcatcaacgggcagcggccacagacaaaatcgagcagggagcagaatccagatgaggcccacacaaacagtgccatcctgccgctgttgccaagggagaccagtatatccagtgtgatatggtgacagaaaagcaagggacatcccgtccctgggaggttgagtggaatctgcagtccagtgcctggaactaaatcctcgactgctgctgttaaaaaacatgcattagaatctctagaacacgaggaaaaacagggtcttgtacatatgttttttggaatttctttgtagcatcagtgtcctcctgttttaccatgtcttttaccattacattttttgactttgttttatatgtcgttggaatttgtaaatttacattttttttaaagaagagactgatgtgtagatagaaaaccctttttttgcttcattagtttagttttagaatgggtttttattttatttccttttttaaaattttactttgcttttaacatttccttggggtgcttggacaaatctatccgatgggacaaggagcaccggattctttctcgggttctgcctagcatcaactgggccacgtcggccttcagagaacagtgcaacaaatgccagcattgccattcgggggaaaaaaaaaaaaaaaaaaaaaagatgagaagaacacttgttcataggagggccccaccagtcagagccctgaatctcttccttgtcccacctcattccccacctctacctttctaatggcggcatgatgtgtaaactctgtgcaggggtgggggcgggtctaactgtcttaacattcaagtcactgctcttcagaatacactctagacccaaaggtgtgctaatcacttcacagtgaccactacagagtactaagaagagaagatcaagggcatgaaattggggaagagtgttatttccgttttttaaatgagttgatgtacccttatatatatatacatatatatataaatataaatatatataaaaacaacaaaacaaaacaaaaaaagaaaa

SEQ ID NO: 143744 - DNA, 1290 bp, Homo sapiens
  Payload ID: 8404
  Gene Symbol: IL1RAPL2
  Gene Name: interleukin 1 receptor accessory protein-like 2
  ENST ID: ENST00000344799
  CDS Start-End: 1-1290
ggtaagcctctgaacatcccctgcaaagcattcttcggattcagtggagagtctgggccaatgatctactggatgaaaggagaaaagtttattgaagaactggcaggtcacattagagaaggtgaaataaggcttctcaaagagcatcttggagaaaaagaagttgaattggcactcatctttgactcagttgtggaagctgacctggcgaattatacctgccatgttgaaaaccgaaatggacggaaacatgccagtgttttgctgcgtaaaaaggatttaatctataaaattgagcttgcagggggcctgggagcaatcttcctcctccttgtactgctggtggtcatttacaaatgctacaacattgaattgatgctcttctacaggcagcactttggagctgatgaaactaatgatgacaacaaggaatatgatgcctatctctcttacacaaaagtggaccaagatactttagactgtgacaatcctgaagaagagcagtttgctcttgaagtactgccagatgtcctggaaaaacactatggatataaactcttcatcccagaaagagacctgattccaagtggaacatacatggaagatctcacaagatatgttgaacaaagcagaagacttattatcgtgctaactccagactatattctcagacggggatggagtattttcgaactggaaagcagactccataacatgctagtcagtggagaaatcaaagtgattttgattgagtgtacagaattaaaagggaaagtgaattgccaggaagtggaatcactaaagcgtagcatcaaacttctgtccctgatcaagtggaagggatccaaaagcagcaaattaaattctaagttttggaagcacttagtatatgaaatgcccatcaagaaaaaagaaatgctacctcggtgccatgttctggactccgcagaacaaggactttttggagaactccagcctataccctctattgccatgaccagtacttcagccactctggtgtcatctcaggctgatctccctgaattccacccttcagattcaatgcaaatcaggcactgttgcagaggttataaacatgagataccagccacgaccttgccagtaccttccttaggcaaccaccatacttattgtaacctgcctctgacgctactcaacggacagctaccccttaataacaccctgaaagatacccaggaatttcacaggaacagttctttgctgcctttatcctccaaagagcttagctttaccagtgatatttggtag

SEQ ID NO: 143745 - DNA, 2985 bp, Homo sapiens
  Payload ID: 8404
  Gene Symbol: IL1RAPL2
  Gene Name: interleukin 1 receptor accessory protein-like 2
  Uniprot ID: Q9NP60
  ENST ID: ENST00000372582
  CDS Start-End: 757-2817
gtgaggcgagcctggagctcatttccaggcgcccttccctcttcggaactaagggagacttgtgggcttttgcacactggctgtagggttcccgggaaagactggagcagcgaacaggagggagagaggtggacaggcagagtctgcacctgccgcctgcacctccgttagggcgacagggcagctggtgtttcgctcctggagtgtgcctacctcgcaaggggggcgagggccacaggctgaggcgcccgcgtcccggagtgcaccgcttggccgaggcaaggtgttgctggggcaaggctgctccgaagcgaagtcgcgcaaaaggaagagtctgggaggcaggcgacttaggagagtctagtcactgagagacagaggcagcatctgccattctaactacggagctgagtaatttagaaaccctccttaactctccctttccagctctccccaaagtccacagaagctctgctgaactctagaaatcttccctggctggggggaagtttactagtatcctctttggctaagacagggagtggaaaaaacaggcggggctgtactgtccgctgtttggggagacgcggtcttcctcgcgcccccttcagccactccgactgcctgggaagtcccagcccgcgctctccggaacccggctcgccgtctcgccctggacatggaactacgcatctgagacctgctggacgttttgctggccgttttgcaagactcagctgtcaagaaaagtgaaggatgaagccaccatttcttttggcccttgtggtctgttctgtagtcagcacaaatctgaagatggtgtcaaagagaaattctgtggatggctgcattgactggtcagtggatctcaagacatacatggctttggcaggtgaaccagtccgagtgaaatgtgcccttttctacagttatattcgtaccaactatagcacggcccagagcactgggctcaggcttatgtggtacaaaaacaaaggtgatttggaagagcccatcatcttttcagaggtcaggatgagcaaagaggaagattcaatatggtttcactcagctgaggcacaagacagtggattctacacttgtgttttaagaaactcaacatattgcatgaaggtgtcaatgtccttgactgttgcagagaatgaatcaggcctgtgctacaacagcaggatccgctatttagaaaaatctgaagtcactaaaagaaaggagatctcctgtccagacatggatgactttaaaaagtccgatcaggagcctgatgttgtgtggtataaggaatgcaagccaaaaatgtggagaagcataataatacagaaaggaaatgctcttctgatccaagaagttcaagaagaagatggaggaaattacacatgtgaacttaaatatgaaggaaaacttgtaagacgaacaactgaattgaaagttacagctttactcacagacaagcctcccaagccattgttccccatggagaatcagccaagtgttatagatgtccagctgggtaagcctctgaacatcccctgcaaagcattcttcggattcagtggagagtctgggccaatgatctactggatgaaaggagaaaagtttattgaagaactggcaggtcacattagagaaggtgaaataaggcttctcaaagagcatcttggagaaaaagaagttgaattggcactcatctttgactcagttgtggaagctgacctggcgaattatacctgccatgttgaaaaccgaaatggacggaaacatgccagtgttttgctgcgtaaaaaggatttaatctataaaattgagcttgcagggggcctgggagcaatcttcctcctccttgtactgctggtggtcatttacaaatgctacaacattgaattgatgctcttctacaggcagcactttggagctgatgaaactaatgatgacaacaaggaatatgatgcctatctctcttacacaaaagtggaccaagatactttagactgtgacaatcctgaagaagagcagtttgctcttgaagtactgccagatgtcctggaaaaacactatggatataaactcttcatcccagaaagagacctgattccaagtggaacatacatggaagatctcacaagatatgttgaacaaagcagaagacttattatcgtgctaactccagactatattctcagacggggatggagtattttcgaactggaaagcagactccataacatgctagtcagtggagaaatcaaagtgattttgattgagtgtacagaattaaaagggaaagtgaattgccaggaagtggaatcactaaagcgtagcatcaaacttctgtccctgatcaagtggaagggatccaaaagcagcaaattaaattctaagttttggaagcacttagtatatgaaatgcccatcaagaaaaaagaaatgctacctcggtgccatgttctggactccgcagaacaaggactttttggagaactccagcctataccctctattgccatgaccagtacttcagccactctggtgtcatctcaggctgatctccctgaattccacccttcagattcaatgcaaatcaggcactgttgcagaggttataaacatgagataccagccacgaccttgccagtaccttccttaggcaaccaccatacttattgtaacctgcctctgacgctactcaacggacagctaccccttaataacaccctgaaagatacccaggaatttcacaggaacagttctttgctgcctttatcctccaaagagcttagctttaccagtgatatttggtagtgaaaaatctgaattcctctgaacagctagataagcatagagaatttctgttataccaagcataaagtacacctaataacgttgtgttaaaaaagtgtttgaagaaaaaggtacaaaaatggcttttatacttaaatatttttgtttacatttccagaatagtggggg

SEQ ID NO: 143746 - DNA, 1810 bp, Homo sapiens
  Payload ID: 8405
  Gene Symbol: IL1RN
  Gene Name: interleukin 1 receptor antagonist
  Uniprot ID: P18510
  ENST ID: ENST00000259206
  CDS Start-End: 123-665
agctccaccctgggagggactgtggcccaggtactgcccgggtgctactttatgggcagcagctcagttgagttagagtctggaagacctcagaagacctcctgtcctatgaggccctccccatggctttagctgacttgtatgaagaaggaggtggaggaggaggagaaggtgaagacaatgctgactcaaaggagacgatctgccgaccctctgggagaaaatccagcaagatgcaagccttcagaatctgggatgttaaccagaagaccttctatctgaggaacaaccaactagttgctggatacttgcaaggaccaaatgtcaatttagaagaaaagatagatgtggtacccattgagcctcatgctctgttcttgggaatccatggagggaagatgtgcctgtcctgtgtcaagtctggtgatgagaccagactccagctggaggcagttaacatcactgacctgagcgagaacagaaagcaggacaagcgcttcgccttcatccgctcagacagtggccccaccaccagttttgagtctgccgcctgccccggttggttcctctgcacagcgatggaagctgaccagcccgtcagcctcaccaatatgcctgacgaaggcgtcatggtcaccaaattctacttccaggaggacgagtagtactgcccaggcctgcctgttcccattcttgcatggcaaggactgcagggactgccagtccccctgccccagggctcccggctatgggggcactgaggaccagccattgaggggtggaccctcagaaggcgtcacaacaacctggtcacaggactctgcctcctcttcaactgaccagcctccatgctgcctccagaatggtctttctaatgtgtgaatcagagcacagcagcccctgcacaaagcccttccatgtcgcctctgcattcaggatcaaaccccgaccacctgcccaacctgctctcctcttgccactgcctcttcctccctcattccaccttcccatgccctggatccatcaggccacttgatgacccccaaccaagtggctcccacaccctgttttacaaaaaagaaaagaccagtccatgagggaggtttttaagggtttgtggaaaatgaaaattaggatttcatgatttttttttttcagtccccgtgaaggagagcccttcatttggagattatgttctttcggggagaggctgaggacttaaaatattcctgcatttgtgaaatgatggtgaaagtaagtggtagcttttcccttctttttcttctttttttgtgatgtcccaacttgtaaaaattaaaagttatggtactatgttagccccataattttttttttccttttaaaacacttccataatctggactcctctgtccaggcactgctgcccagcctccaagctccatctccactccagattttttacagctgcctgcagtactttacctcctatcagaagtttctcagctcccaaggctctgagcaaatgtggctcctgggggttctttcttcctctgctgaaggaataaattgctccttgacattgtagagcttctggcacttggagacttgtatgaaagatggctgtgcctctgcctgtctcccccaccgggctgggagctctgcagagcaggaaacatgactcgtatatgtctcaggtccctgcagggccaagcacctagcctcgctcttggcaggtactcagcgaatgaatgctgtatatgttgggtgcaaagttccctacttcctgtgacttcagctctgttttacaataaaatcttgaaaatgccta

SEQ ID NO: 143747 - DNA, 1747 bp, Homo sapiens
  Payload ID: 8405
  Gene Symbol: IL1RN
  Gene Name: interleukin 1 receptor antagonist
  Uniprot ID: P18510
  ENST ID: ENST00000354115
  CDS Start-End: 123-602
agctccaccctgggagggactgtggcccaggtactgcccgggtgctactttatgggcagcagctcagttgagttagagtctggaagacctcagaagacctcctgtcctatgaggccctccccatggctttagagacgatctgccgaccctctgggagaaaatccagcaagatgcaagccttcagaatctgggatgttaaccagaagaccttctatctgaggaacaaccaactagttgctggatacttgcaaggaccaaatgtcaatttagaagaaaagatagatgtggtacccattgagcctcatgctctgttcttgggaatccatggagggaagatgtgcctgtcctgtgtcaagtctggtgatgagaccagactccagctggaggcagttaacatcactgacctgagcgagaacagaaagcaggacaagcgcttcgccttcatccgctcagacagtggccccaccaccagttttgagtctgccgcctgccccggttggttcctctgcacagcgatggaagctgaccagcccgtcagcctcaccaatatgcctgacgaaggcgtcatggtcaccaaattctacttccaggaggacgagtagtactgcccaggcctgcctgttcccattcttgcatggcaaggactgcagggactgccagtccccctgccccagggctcccggctatgggggcactgaggaccagccattgaggggtggaccctcagaaggcgtcacaacaacctggtcacaggactctgcctcctcttcaactgaccagcctccatgctgcctccagaatggtctttctaatgtgtgaatcagagcacagcagcccctgcacaaagcccttccatgtcgcctctgcattcaggatcaaaccccgaccacctgcccaacctgctctcctcttgccactgcctcttcctccctcattccaccttcccatgccctggatccatcaggccacttgatgacccccaaccaagtggctcccacaccctgttttacaaaaaagaaaagaccagtccatgagggaggtttttaagggtttgtggaaaatgaaaattaggatttcatgatttttttttttcagtccccgtgaaggagagcccttcatttggagattatgttctttcggggagaggctgaggacttaaaatattcctgcatttgtgaaatgatggtgaaagtaagtggtagcttttcccttctttttcttctttttttgtgatgtcccaacttgtaaaaattaaaagttatggtactatgttagccccataattttttttttccttttaaaacacttccataatctggactcctctgtccaggcactgctgcccagcctccaagctccatctccactccagattttttacagctgcctgcagtactttacctcctatcagaagtttctcagctcccaaggctctgagcaaatgtggctcctgggggttctttcttcctctgctgaaggaataaattgctccttgacattgtagagcttctggcacttggagacttgtatgaaagatggctgtgcctctgcctgtctcccccaccgggctgggagctctgcagagcaggaaacatgactcgtatatgtctcaggtccctgcagggccaagcacctagcctcgctcttggcaggtactcagcgaatgaatgctgtatatgttgggtgcaaagttccctacttcctgtgacttcagctctgttttacaataaaatcttgaaaatgccta

SEQ ID NO: 143748 - DNA, 1922 bp, Homo sapiens
  Payload ID: 8405
  Gene Symbol: IL1RN
  Gene Name: interleukin 1 receptor antagonist
  Uniprot ID: P18510
  ENST ID: ENST00000361779
  CDS Start-End: 346-777
gggcagctccaccctgggagggactgtggcccaggtactgcccgggtgctactttatgggcagcagctcagttgagttagagtctggaagacctcagaagacctcctgtcctatgaggccctccccatggctttagggggattataaaactaatcatcaaagccaagaaggcaagagcaagcatgtaccgctgaaaacacaagataactgcataagtaatgactttcagtgcagattcatagctaacccataaactgctggggcaaaaatcatcttggaaggctctgaacctcagaaaggattcacaagacgatctgccgaccctctgggagaaaatccagcaagatgcaagccttcagaatctgggatgttaaccagaagaccttctatctgaggaacaaccaactagttgctggatacttgcaaggaccaaatgtcaatttagaagaaaagatagatgtggtacccattgagcctcatgctctgttcttgggaatccatggagggaagatgtgcctgtcctgtgtcaagtctggtgatgagaccagactccagctggaggcagttaacatcactgacctgagcgagaacagaaagcaggacaagcgcttcgccttcatccgctcagacagtggccccaccaccagttttgagtctgccgcctgccccggttggttcctctgcacagcgatggaagctgaccagcccgtcagcctcaccaatatgcctgacgaaggcgtcatggtcaccaaattctacttccaggaggacgagtagtactgcccaggcctgcctgttcccattcttgcatggcaaggactgcagggactgccagtccccctgccccagggctcccggctatgggggcactgaggaccagccattgaggggtggaccctcagaaggcgtcacaacaacctggtcacaggactctgcctcctcttcaactgaccagcctccatgctgcctccagaatggtctttctaatgtgtgaatcagagcacagcagcccctgcacaaagcccttccatgtcgcctctgcattcaggatcaaaccccgaccacctgcccaacctgctctcctcttgccactgcctcttcctccctcattccaccttcccatgccctggatccatcaggccacttgatgacccccaaccaagtggctcccacaccctgttttacaaaaaagaaaagaccagtccatgagggaggtttttaagggtttgtggaaaatgaaaattaggatttcatgatttttttttttcagtccccgtgaaggagagcccttcatttggagattatgttctttcggggagaggctgaggacttaaaatattcctgcatttgtgaaatgatggtgaaagtaagtggtagcttttcccttctttttcttctttttttgtgatgtcccaacttgtaaaaattaaaagttatggtactatgttagccccataattttttttttccttttaaaacacttccataatctggactcctctgtccaggcactgctgcccagcctccaagctccatctccactccagattttttacagctgcctgcagtactttacctcctatcagaagtttctcagctcccaaggctctgagcaaatgtggctcctgggggttctttcttcctctgctgaaggaataaattgctccttgacattgtagagcttctggcacttggagacttgtatgaaagatggctgtgcctctgcctgtctcccccaccgggctgggagctctgcagagcaggaaacatgactcgtatatgtctcaggtccctgcagggccaagcacctagcctcgctcttggcaggtactcagcgaatgaatgctgtatatgttgggtgcaaagttccctacttcctgtgacttcagctctgttttacaataaaatcttgaaaatgccta

SEQ ID NO: 143749 - DNA, 848 bp, Homo sapiens
  Payload ID: 8405
  Gene Symbol: IL1RN
  Gene Name: interleukin 1 receptor antagonist
  Uniprot ID: P18510
  ENST ID: ENST00000409930
  CDS Start-End: 65-598
atttctttataaaccacaactctgggcccgcaatggcagtccactgccttgctgcagtcacagaatggaaatctgcagaggcctccgcagtcacctaatcactctcctcctcttcctgttccattcagagacgatctgccgaccctctgggagaaaatccagcaagatgcaagccttcagaatctgggatgttaaccagaagaccttctatctgaggaacaaccaactagttgctggatacttgcaaggaccaaatgtcaatttagaagaaaagatagatgtggtacccattgagcctcatgctctgttcttgggaatccatggagggaagatgtgcctgtcctgtgtcaagtctggtgatgagaccagactccagctggaggcagttaacatcactgacctgagcgagaacagaaagcaggacaagcgcttcgccttcatccgctcagacagtggccccaccaccagttttgagtctgccgcctgccccggttggttcctctgcacagcgatggaagctgaccagcccgtcagcctcaccaatatgcctgacgaaggcgtcatggtcaccaaattctacttccaggaggacgagtagtactgcccaggcctgcctgttcccattcttgcatggcaaggactgcagggactgccagtccccctgccccagggctcccggctatgggggcactgaggaccagccattgaggggtggaccctcagaaggcgtcacaacaacctggtcacaggactctgcctcctcttcaactgaccagcctccatgctgcctccagaatggtctttctaatgtgtgaatcagagcacagcagcccctgcacaaagccctt

SEQ ID NO: 143750 - DNA, 1903 bp, Homo sapiens
  Payload ID: 8405
  Gene Symbol: IL1RN
  Gene Name: interleukin 1 receptor antagonist
  Uniprot ID: P18510
  ENST ID: ENST00000409052
  CDS Start-End: 472-903
gaattagcagttcacaaagcacattcgcatataagggcttgttttgaattgatcttggcagcaattctatgagacaagtaaaagcacaagaggaataggaactgcacctcttccttcagtttcagcttgaataatatcaggaagattcgtatcggtctgagttgggtcacgtacccgacgtgctatagctgaggatgggctgacttgtatgaagaaggaggtggaggaggaggagaaggtgaagacaatgctgactcaaaggggggattataaaactaatcatcaaagccaagaaggcaagagcaagcatgtaccgctgaaaacacaagataactgcataagtaatgactttcagtgcagattcatagctaacccataaactgctggggcaaaaatcatcttggaaggctctgaacctcagaaaggattcacaagacgatctgccgaccctctgggagaaaatccagcaagatgcaagccttcagaatctgggatgttaaccagaagaccttctatctgaggaacaaccaactagttgctggatacttgcaaggaccaaatgtcaatttagaagaaaagatagatgtggtacccattgagcctcatgctctgttcttgggaatccatggagggaagatgtgcctgtcctgtgtcaagtctggtgatgagaccagactccagctggaggcagttaacatcactgacctgagcgagaacagaaagcaggacaagcgcttcgccttcatccgctcagacagtggccccaccaccagttttgagtctgccgcctgccccggttggttcctctgcacagcgatggaagctgaccagcccgtcagcctcaccaatatgcctgacgaaggcgtcatggtcaccaaattctacttccaggaggacgagtagtactgcccaggcctgcctgttcccattcttgcatggcaaggactgcagggactgccagtccccctgccccagggctcccggctatgggggcactgaggaccagccattgaggggtggaccctcagaaggcgtcacaacaacctggtcacaggactctgcctcctcttcaactgaccagcctccatgctgcctccagaatggtctttctaatgtgtgaatcagagcacagcagcccctgcacaaagcccttccatgtcgcctctgcattcaggatcaaaccccgaccacctgcccaacctgctctcctcttgccactgcctcttcctccctcattccaccttcccatgccctggatccatcaggccacttgatgacccccaaccaagtggctcccacaccctgttttacaaaaaagaaaagaccagtccatgagggaggtttttaagggtttgtggaaaatgaaaattaggatttcatgatttttttttttcagtccccgtgaaggagagcccttcatttggagattatgttctttcggggagaggctgaggacttaaaatattcctgcatttgtgaaatgatggtgaaagcactgctgcccagcctccaagctccatctccactccagattttttacagctgcctgcagtactttacctcctatcagaagtttctcagctcccaaggctctgagcaaatgtggctcctgggggttctttcttcctctgctgaaggaataaattgctccttgacattgtagagcttctggcacttggagacttgtatgaaagatggctgtgcctctgcctgtctcccccaccgggctgggagctctgcagagcaggaaacatgactcgtatatgtctcaggtccctgcagggccaagcacctagcctcgctcttggcaggtactcagcgaatgaatgctgtatatgttgggtgcaaagttccctacttcctgtgacttcagctctgttttacaataaaatcttgaaaatgc

SEQ ID NO: 143751 - DNA, 5143 bp, Homo sapiens
  Payload ID: 8406
  Gene Symbol: IL1R1
  Gene Name: interleukin 1 receptor, type I
  Uniprot ID: P14778
  ENST ID: ENST00000410023
  CDS Start-End: 319-2028
gccggagccgactcggagcgcgcggcgccggccgggaggagccggagagcggccgggccgggcggtgggggcgccggcctgccccgcgcgccccagggagcggcaggaatgtgacaatcgcgcgcccgcgcaccgaagcactcctcgctcggctcctagggctctcgcccctctgagctgagccgggttccgcccggggctgggatcccatcaccctccacggccgtccgtccaggtagacgcaccctctgaagatggtgactccctcctgagaagctggaccccttggtaaaagacaaggccttctccaagaagaatatgaaagtgttactcagacttatttgtttcatagctctactgatttcttctctggaggctgataaatgcaaggaacgtgaagaaaaaataattttagtgtcatctgcaaatgaaattgatgttcgtccctgtcctcttaacccaaatgaacacaaaggcactataacttggtataaagatgacagcaagacacctgtatctacagaacaagcctccaggattcatcaacacaaagagaaactttggtttgttcctgctaaggtggaggattcaggacattactattgcgtggtaagaaattcatcttactgcctcagaattaaaataagtgcaaaatttgtggagaatgagcctaacttatgttataatgcacaagccatatttaagcagaaactacccgttgcaggagacggaggacttgtgtgcccttatatggagttttttaaaaatgaaaataatgagttacctaaattacagtggtataaggattgcaaacctctacttcttgacaatatacactttagtggagtcaaagataggctcatcgtgatgaatgtggctgaaaagcatagagggaactatacttgtcatgcatcctacacatacttgggcaagcaatatcctattacccgggtaatagaatttattactctagaggaaaacaaacccacaaggcctgtgattgtgagcccagctaatgagacaatggaagtagacttgggatcccagatacaattgatctgtaatgtcaccggccagttgagtgacattgcttactggaagtggaatgggtcagtaattgatgaagatgacccagtgctaggggaagactattacagtgtggaaaatcctgcaaacaaaagaaggagtaccctcatcacagtgcttaatatatcggaaattgaaagtagattttataaacatccatttacctgttttgccaagaatacacatggtatagatgcagcatatatccagttaatatatccagtcactaatttccagaagcacatgattggtatatgtgtcacgttgacagtcataattgtgtgttctgttttcatctataaaatcttcaagattgacattgtgctttggtacagggattcctgctatgattttctcccaataaaagcttcagatggaaagacctatgacgcatatatactgtatccaaagactgttggggaagggtctacctctgactgtgatatttttgtgtttaaagtcttgcctgaggtcttggaaaaacagtgtggatataagctgttcatttatggaagggatgactacgttggggaagacattgttgaggtcattaatgaaaacgtaaagaaaagcagaagactgattatcattttagtcagagaaacatcaggcttcagctggctgggtggttcatctgaagagcaaatagccatgtataatgctcttgttcaggatggaattaaagttgtcctgcttgagctggagaaaatccaagactatgagaaaatgccagaatcgattaaattcattaagcagaaacatggggctatccgctggtcaggggactttacacagggaccacagtctgcaaagacaaggttctggaagaatgtcaggtaccacatgccagtccagcgacggtcaccttcatctaaacaccagttactgtcaccagccactaaggagaaactgcaaagagaggctcacgtgcctctcgggtagcatggagaagttgccaagagttctttaggtgcctcctgtcttatggcgttgcaggccaggttatgcctcatgctgacttgcagagttcatggaatgtaactatatcatcctttatccctgaggtcacctggaatcagattattaagggaataagccatgacgtcaatagcagcccagggcacttcagagtagagggcttgggaagatcttttaaaaaggcagtaggcccggtgtggtggctcacgcctataatcccagcactttgggaggctgaagtgggtggatcaccagaggtcaggagttcgagaccagcccagccaacatggcaaaaccccatctctactaaaaatacaaaaatgagctaggcatggtggcacacgcctgtaatcccagctacacctgaggctgaggcaggagaattgcttgaaccggggagacggaggttgcagtgagccgagtttgggccactgcactctagcctggcaacagagcaagactccgtctcaaaaaaagggcaataaatgccctctctgaatgtttgaactgccaagaaaaggcatggagacagcgaactagaagaaagggcaagaaggaaatagccaccgtctacagatggcttagttaagtcatccacagcccaagggcggggctatgccttgtctggggaccctgtagagtcactgaccctggagcggctctcctgagaggtgctgcaggcaaagtgagactgacacctcactgaggaagggagacatattcttggagaactttccatctgcttgtattttccatacacatccccagccagaagttagtgtccgaagaccgaattttattttacagagcttgaaaactcacttcaatgaacaaagggattctccaggattccaaagttttgaagtcatcttagctttccacaggagggagagaacttaaaaaagcaacagtagcagggaattgatccacttcttaatgctttcctccctggcatgaccatcctgtcctttgttattatcctgcattttacgtctttggaggaacagctccctagtggcttcctccgtctgcaatgtcccttgcacagcccacacatgaaccatccttcccatgatgccgctcttctgtcatcccgctcctgctgaaacacctcccaggggctccacctgttcaggagctgaagcccatgctttcccaccagcatgtcactcccagaccacctccctgccctgtcctccagcttcccctcgctgtcctgctgtgtgaattcccaggttggcctggtggccatgtcgcctgcccccagcactcctctgtctctgctcttgcctgcacccttcctcctcctttgcctaggaggccttctcgcattttctctagctgatcagaattttaccaaaattcagaacatcctccaattccacagtctctgggagactttccctaagaggcgacttcctctccagccttctctctctggtcaggcccactgcagagatggtggtgagcacatctgggaggctggtctccctccagctggaattgctgctctctgagggagaggctgtggtggctgtctctgtccctcactgccttccaggagcaatttgcacatgtaacatagatttatgtaatgctttatgtttaaaaacattccccaattatcttatttaatttttgcaattattctaattttatatatagagaaagtgacctattttttaaaaaaatcacactctaagttctattgaacctaggacttgagcctccatttctggcttctagtctggtgttctgagtacttgatttcaggtcaataacggtcccccctcactccacactggcacgtttgtgagaagaaatgacattttgctaggaagtgaccgagtctaggaatgcttttattcaagacaccaaattccaaacttctaaatgttggaattttcaaaaattgtgtttagattttatgaaaaactcttctactttcatctattctttccctagaggcaaacatttcttaaaatgtttcattttcattaaaaatgaaagccaaatttatatgccaccgattgcaggacacaagcacagttttaagagttgtatgaacatggagaggacttttggtttttatatttctcgtatttaatatgggtgaacaccaacttttatttggaataataattttcctcctaaacaaaaacacattgagtttaagtctctgactcttgcctttccacctgctttctcctgggcccgctttgcctgcttgaaggaacagtgctgttctggagctgctgttccaacagacagggcctagctttcatttgacacacagactacagccagaagcccatggagcagggatgtcacgtcttgaaaagcctattagatgttttacaaatttaattttgcagattattttagtctgtcatccagaaaatgtgtcagcatgcatagtgctaagaaagcaagccaatttggaaacttaggttagtgacaaaattggccagagagtgggggtgatgatgaccaagaattacaagtagaatggcagctggaatttaaggagggacaagaatcaatggataagcgtgggtggaggaagatccaaacagaaaagtgcaaagttattccccatcttccaagggttgaattctggaggaagaagacacattcctagttccccgtgaacttcctttgacttattgtccccactaaaacaaaacaaaaaacttttaatgccttccacattaattagattttcttgcagtttttttatggcatttttttaaagatgccctaagtgttgaagaagagtttgcaaatgcaacaaaatatttaattaccggttgttaaaactggtttagcacaatttatattttccctctcttgcctttcttatttgcaataaaaggtattgagccattttttaaatgacatttttgataaattatgtttgtactagttgatgaaggagttttttttaacctgtttatataattttgcagcagaagccaaattttttgtatattaaagcaccaaattcatgtacagcatgcatcacggatcaatagactgtacttattttccaataaaattttcaaactttgtactgtta

SEQ ID NO: 143752 - DNA, 1735 bp, Homo sapiens
  Payload ID: 8406
  Gene Symbol: IL1R1
  Gene Name: interleukin 1 receptor, type I
  ENST ID: ENST00000409288
  CDS Start-End: 319-1662
gccggagccgactcggagcgcgcggcgccggccgggaggagccggagagcggccgggccgggcggtgggggcgccggcctgccccgcgcgccccagggagcggcaggaatgtgacaatcgcgcgcccgcgcaccgaagcactcctcgctcggctcctagggctctcgcccctctgagctgagccgggttccgcccggggctgggatcccatcaccctccacggccgtccgtccaggtagacgcaccctctgaagatggtgactccctcctgagaagctggaccccttggtaaaagacaaggccttctccaagaagaatatgaaagtgttactcagacttatttgtttcatagctctactgatttcttctctggaggctgataaatgcaaggaacgtgaagaaaaaataattttagtgtcatctgcaaatgaaattgatgttcgtccctgtcctcttaacccaaatgaacacaaaggcactataacttggtataaagatgacagcaagacacctgtatctacagaacaagcctccaggattcatcaacacaaagagaaactttggtttgttcctgctaaggtggaggattcaggacattactattgcgtggtaagaaattcatcttactgcctcagaattaaaataagtgcaaaatttgtggagaatgagcctaacttatgttataatgcacaagccatatttaagcagaaactacccgttgcaggagacggaggacttgtgtgcccttatatggagttttttaaaaatgaaaataatgagttacctaaattacagtggtataaggattgcaaacctctacttcttgacaatatacactttagtggagtcaaagataggctcatcgtgatgaatgtggctgaaaagcatagagggaactatacttgtcatgcatcctacacatacttgggcaagcaatatcctattacccgggtaatagaatttattactctagaggaaaacaaacccacaaggcctgtgattgtgagcccagctaatgagacaatggaagtagacttgggatcccagatacaattgatctgtaatgtcaccggccagttgagtgacattgcttactggaagtggaatgggtcagtaattgatgaagatgacccagtgctaggggaagactattacagtgtggaaaatcctgcaaacaaaagaaggagtaccctcatcacagtgcttaatatatcggaaattgaaagtagattttataaacatccatttacctgttttgccaagaatacacatggtatagatgcagcatatatccagttaatatatccagtcactaatttccagaagcacatgattggtatatgtgtcacgttgacagtcataattgtgtgttctgttttcatctataaaatcttcaagattgacattgtgctttggtacagggattcctgctatgattttctcccaataaaagcttcagatggaaagacctatgacgcatatatactgtatccaaagactgttggggaagggtctacctctgactgtgatatttttgtgtttaaagtcttgcctgaggtcttggaaaaacagtgtggatataagctgttcatttatggaagggatgactacgttggggaaggtatgtgtgtaatggaacagagtaaaggcttattgttgtaaaactacttagtaaaatgtggattccatctttctagaagatcgtggcataggggtatatgtttcacaattttaa

SEQ ID NO: 143753 - DNA, 3544 bp, Homo sapiens
  Payload ID: 8406
  Gene Symbol: IL1R1
  Gene Name: interleukin 1 receptor, type I
  ENST ID: ENST00000409589
  CDS Start-End: 394-915
acggccgagggattaaagccctaagaggctgtgacacagccatctccaaaaccccactttctccttcctttgagcctccgtaccagctggggcgtccggcaagatgtgagttgtcactctgctgcggcacagacctgaattaacaactctagctagggctgacttcaaaaagcactttcgttttttaataaccaacatcagctcagcaggcttcatttgggaaaagaaaccttgtcggattaccccgacattctccacctcctgggaggccagccattcccaaatgccccaaggatgaagaacggagacggtagacgcaccctctgaagatggtgactccctcctgagaagctggaccccttggtaaaagacaaggccttctccaagaagaatatgaaagtgttactcagacttatttgtttcatagctctactgatttcttctctggaggctgataaatgcaaggaacgtgaagaaaaaataattttagtgtcatctgcaaatgaaattgatgttcgtccctgtcctcttaacccaaatgaacacaaaggcactataacttggtataaagatgacagcaagacacctgtatctacagaacaagcctccaggattcatcaacacaaagagaaactttggtttgttcctgctaaggtggaggattcaggacattactattgcgtggtaagaaattcatcttactgcctcagaattaaaataagtgcaaaatttgtggagaatgagcctaacttatgttataatgcacaagccatatttaagcagaaactacccgttgcaggagacggaggacttgtgtgcccttatatggagttttttaaaaatgaaaataatgagttacctaaattacagtggtataaggttgcagtgagccgagtttgggccactgcactctagcctggcaacagagcaagactccgtctcaaaaaaagggcaataaatgccctctctgaatgtttgaactgccaagaaaaggcatggagacagcgaactagaagaaagggcaagaaggaaatagccaccgtctacagatggcttagttaagtcatccacagcccaagggcggggctatgccttgtctggggaccctgtagagtcactgaccctggagcggctctcctgagaggtgctgcaggcaaagtgagactgacacctcactgaggaagggagacatattcttggagaactttccatctgcttgtattttccatacacatccccagccagaagttagtgtccgaagaccgaattttattttacagagcttgaaaactcacttcaatgaacaaagggattctccaggattccaaagttttgaagtcatcttagctttccacaggagggagagaacttaaaaaagcaacagtagcagggaattgatccacttcttaatgctttcctccctggcatgaccatcctgtcctttgttattatcctgcattttacgtctttggaggaacagctccctagtggcttcctccgtctgcaatgtcccttgcacagcccacacatgaaccatccttcccatgatgccgctcttctgtcatcccgctcctgctgaaacacctcccaggggctccacctgttcaggagctgaagcccatgctttcccaccagcatgtcactcccagaccacctccctgccctgtcctccagcttcccctcgctgtcctgctgtgtgaattcccaggttggcctggtggccatgtcgcctgcccccagcactcctctgtctctgctcttgcctgcacccttcctcctcctttgcctaggaggccttctcgcattttctctagctgatcagaattttaccaaaattcagaacatcctccaattccacagtctctgggagactttccctaagaggcgacttcctctccagccttctctctctggtcaggcccactgcagagatggtggtgagcacatctgggaggctggtctccctccagctggaattgctgctctctgagggagaggctgtggtggctgtctctgtccctcactgccttccaggagcaatttgcacatgtaacatagatttatgtaatgctttatgtttaaaaacattccccaattatcttatttaatttttgcaattattctaattttatatatagagaaagtgacctattttttaaaaaaatcacactctaagttctattgaacctaggacttgagcctccatttctggcttctagtctggtgttctgagtacttgatttcaggtcaataacggtcccccctcactccacactggcacgtttgtgagaagaaatgacattttgctaggaagtgaccgagtctaggaatgcttttattcaagacaccaaattccaaacttctaaatgttggaattttcaaaaattgtgtttagattttatgaaaaactcttctactttcatctattctttccctagaggcaaacatttcttaaaatgtttcattttcattaaaaatgaaagccaaatttatatgccaccgattgcaggacacaagcacagttttaagagttgtatgaacatggagaggacttttggtttttatatttctcgtatttaatatgggtgaacaccaacttttatttggaataataattttcctcctaaacaaaaacacattgagtttaagtctctgactcttgcctttccacctgctttctcctgggcccgctttgcctgcttgaaggaacagtgctgttctggagctgctgttccaacagacagggcctagctttcatttgacacacagactacagccagaagcccatggagcagggatgtcacgtcttgaaaagcctattagatgttttacaaatttaattttgcagattattttagtctgtcatccagaaaatgtgtcagcatgcatagtgctaagaaagcaagccaatttggaaacttaggttagtgacaaaattggccagagagtgggggtgatgatgaccaagaattacaagtagaatggcagctggaatttaaggagggacaagaatcaatggataagcgtgggtggaggaagatccaaacagaaaagtgcaaagttattccccatcttccaagggttgaattctggaggaagaagacacattcctagttccccgtgaacttcctttgacttattgtccccactaaaacaaaacaaaaaacttttaatgccttccacattaattagattttcttgcagtttttttatggcatttttttaaagatgccctaagtgttgaagaagagtttgcaaatgcaacaaaatatttaattaccggttgttaaaactggtttagcacaatttatattttccctctcttgcctttcttatttgcaataaaaggtattgagccattttttaaatgacatttttgataaattatgtttgtactagttgatgaaggagttttttttaacctgtttatataattttgcagcagaagccaaattttttgtatattaaagcaccaaattcatgtacagcatgcatcacggatcaatagactgtacttattttccaataaaattttcaaactttg

SEQ ID NO: 143754 - DNA, 1858 bp, Homo sapiens
  Payload ID: 8406
  Gene Symbol: IL1R1
  Gene Name: interleukin 1 receptor, type I
  ENST ID: ENST00000409929
  CDS Start-End: 242-1858
attggcagctcttcacttgtatcttttcatatcaaaaatgggaggtgacacccagtttaaggaaaattccaaggcatttgtctcgactaatgtgaaagatgattacagtggccagaggactgccaaggctccttctcaagctgcttgagtcaatgagggtagacgcaccctctgaagatggtgactccctcctgagaagctggaccccttggtaaaagacaaggccttctccaagaagaatatgaaagtgttactcagacttatttgtttcatagctctactgatttcttctctggaggctgataaatgcaaggaacgtgaagaaaaaataattttagtgtcatctgcaaatgaaattgatgttcgtccctgtcctcttaacccaaatgaacacaaaggcactataacttggtataaagatgacagcaagacacctgtatctacagaacaagcctccaggattcatcaacacaaagagaaactttggtttgttcctgctaaggtggaggattcaggacattactattgcgtggtaagaaattcatcttactgcctcagaattaaaataagtgcaaaatttgtggagaatgagcctaacttatgttataatgcacaagccatatttaagcagaaactacccgttgcaggagacggaggacttgtgtgcccttatatggagttttttaaaaatgaaaataatgagttacctaaattacagtggtataaggattgcaaacctctacttcttgacaatatacactttagtggagtcaaagataggctcatcgtgatgaatgtggctgaaaagcatagagggaactatacttgtcatgcatcctacacatacttgggcaagcaatatcctattacccgggtaatagaatttattactctagaggaaaacaaacccacaaggcctgtgattgtgagcccagctaatgagacaatggaagtagacttgggatcccagatacaattgatctgtaatgtcaccggccagttgagtgacattgcttactggaagtggaatgggtcagtaattgatgaagatgacccagtgctaggggaagactattacagtgtggaaaatcctgcaaacaaaagaaggagtaccctcatcacagtgcttaatatatcggaaattgaaagtagattttataaacatccatttacctgttttgccaagaatacacatggtatagatgcagcatatatccagttaatatatccagtcactaatttccagaagcacatgattggtatatgtgtcacgttgacagtcataattgtgtgttctgttttcatctataaaatcttcaagattgacattgtgctttggtacagggattcctgctatgattttctcccaataaaagtcttgcctgaggtcttggaaaaacagtgtggatataagctgttcatttatggaagggatgactacgttggggaagacattgttgaggtcattaatgaaaacgtaaagaaaagcagaagactgattatcattttagtcagagaaacatcaggcttcagctggctgggtggttcatctgaagagcaaatagccatgtataatgctcttgttcaggatggaattaaagttgtcctgcttgagctggagaaaatccaagactatgagaaaatgccagaatcgattaaattcattaagcagaaacatggggctatccgctggtcaggggactttacacagggaccacagtctgcaaagacaaggttctggaagaatgtcaggtaccacatgccagtccagcgacggtcaccttcatctaaacaccagttactgtcaccagccactaaggagaaactgcaaagagaggctcacgtgcctctcgggtag

SEQ ID NO: 143755 - DNA, 1862 bp, Homo sapiens
  Payload ID: 8406
  Gene Symbol: IL1R1
  Gene Name: interleukin 1 receptor, type I
  ENST ID: ENST00000409329
  CDS Start-End: 388-1731
gagggattaaagccctaagaggctgtgacacagccatctccaaaaccccactttctccttcctttgagcctccgtaccagctggggcgtccggcaagatgtgagttgtcactctgctgcggcacagacctgaattaacaactctagctagggctgacttcaaaaagcactttcgttttttaataaccaacatcagctcagcaggcttcatttgggaaaagaaaccttgtcggattaccccgacattctccacctcctgggaggccagccattcccaaatgccccaaggatgaagaacggagacggtagacgcaccctctgaagatggtgactccctcctgagaagctggaccccttggtaaaagacaaggccttctccaagaagaatatgaaagtgttactcagacttatttgtttcatagctctactgatttcttctctggaggctgataaatgcaaggaacgtgaagaaaaaataattttagtgtcatctgcaaatgaaattgatgttcgtccctgtcctcttaacccaaatgaacacaaaggcactataacttggtataaagatgacagcaagacacctgtatctacagaacaagcctccaggattcatcaacacaaagagaaactttggtttgttcctgctaaggtggaggattcaggacattactattgcgtggtaagaaattcatcttactgcctcagaattaaaataagtgcaaaatttgtggagaatgagcctaacttatgttataatgcacaagccatatttaagcagaaactacccgttgcaggagacggaggacttgtgtgcccttatatggagttttttaaaaatgaaaataatgagttacctaaattacagtggtataaggattgcaaacctctacttcttgacaatatacactttagtggagtcaaagataggctcatcgtgatgaatgtggctgaaaagcatagagggaactatacttgtcatgcatcctacacatacttgggcaagcaatatcctattacccgggtaatagaatttattactctagaggaaaacaaacccacaaggcctgtgattgtgagcccagctaatgagacaatggaagtagacttgggatcccagatacaattgatctgtaatgtcaccggccagttgagtgacattgcttactggaagtggaatgggtcagtaattgatgaagatgacccagtgctaggggaagactattacagtgtggaaaatcctgcaaacaaaagaaggagtaccctcatcacagtgcttaatatatcggaaattgaaagtagattttataaacatccatttacctgttttgccaagaatacacatggtatagatgcagcatatatccagttaatatatccagtcactaatttccagaagcacatgattggtatatgtgtcacgttgacagtcataattgtgtgttctgttttcatctataaaatcttcaagattgacattgtgctttggtacagggattcctgctatgattttctcccaataaaagcttcagatggaaagacctatgacgcatatatactgtatccaaagactgttggggaagggtctacctctgactgtgatatttttgtgtttaaagtcttgcctgaggtcttggaaaaacagtgtggatataagctgttcatttatggaagggatgactacgttggggaaggtatgtgtgtaatggaacagagtaaaggcttattgttgtaaaactacttagtaaaatgtggattccatctttctagaagatcgtggcataggggtatatgtttcacaattttaagaacctcttcagaagtgtatgatgatttttacatttattaaatgcatttacttctctc

SEQ ID NO: 143756 - DNA, 574 bp, Homo sapiens
  Payload ID: 8406
  Gene Symbol: IL1R1
  Gene Name: interleukin 1 receptor, type I
  ENST ID: ENST00000422532
  CDS Start-End: 1-374
ataaatgcaaggaacgtgaagaaaaaataattttagtgtcatctgcaaatgaaattgatgttcgtccctgtcctcttaacccaaatgaacacaaaggcactataacttggtataaagatgacagcaagacacctgtatctacagaacaagcctccaggattcatcaacacaaagagaaactttggtttgttcctgctaaggtggaggattcaggacattactattgcgtggagacggaggacttgtgtgcccttatatggagttttttaaaaatgaaaataatgagttacctaaattacagtggtataaggattgcaaacctctacttcttgacaatatacactttagtggagtcaaagataggctcatcgtgatgaatgtggctgaaaagcatagagggaactatacttgtcatgcatcctacacatacttgggcaagcaatatcctattacccgggtaatagaatttattactctagaggaaaacaaacccacaaggcctgtgattgtgagcccagctaatgagacaatggaagtagacttgggatcccagatacaattgatctgtaatgtc

SEQ ID NO: 143757 - DNA, 577 bp, Homo sapiens
  Payload ID: 8406
  Gene Symbol: IL1R1
  Gene Name: interleukin 1 receptor, type I
  ENST ID: ENST00000442590
  CDS Start-End: 234-577
agtcggagagagcccctggccaggcaccaagctccagaggtcgctctggcgagcgtttgcttcgggatctgatgccctggagtcgccaactcaattcgcgggtcgcagccaggctccatgggggtagtagagccaggtcgtagtggctaggtagacgcaccctctgaagatggtgactccctcctgagaagctggaccccttggtaaaagacaaggccttctccaagaagaatatgaaagtgttactcagacttatttgtttcatagctctactgatttcttctctggaggctgataaatgcaaggaacgtgaagaaaaaataattttagtgtcatctgcaaatgaaattgatgttcgtccctgtcctcttaacccaaatgaacacaaaggcactataacttggtataaagatgacagcaagacacctgtatctacagaacaagcctccaggattcatcaacacaaagagaaactttggtttgttcctgctaaggtggaggattcaggacattactattgcgtggtaagaaattcatcttactgcctcagaattaaaataagtgcaaaatttgtgga

SEQ ID NO: 143758 - DNA, 609 bp, Homo sapiens
  Payload ID: 8406
  Gene Symbol: IL1R1
  Gene Name: interleukin 1 receptor, type I
  ENST ID: ENST00000452403
  CDS Start-End: 369-609
gaaacatttaccagatgtgtggcttgagtgtccattcccgcaacaaaaacgctctgcagtaaagctccgagatggctgtgtttgtgttggactgctctagatgcacaaccctcctggacaaagcgtttttcctcagccttcaccacccatggaggaggtgtgattacctctattcacagaaaggagactgggacccaaccaaggcaagtcatttgcttcagaccacagagcaaagaatcattctgtcattccagaaatatttgtcaggcgcccctggtgtgtcaggtagacgcaccctctgaagatggtgactccctcctgagaagctggaccccttggtaaaagacaaggccttctccaagaagaatatgaaagtgttactcagacttatttgtttcatagctctactgatttcttctctggaggctgataaatgcaaggaacgtgaagaaaaaataattttagtgtcatctgcaaatgaaattgatgttcgtccctgtcctcttaacccaaatgaacacaaaggcactataacttggtataaagatgacagcaagacacctgtatctacagaacaagcctccaggattcatcaacacaaagagaaac

SEQ ID NO: 143759 - DNA, 1678 bp, Homo sapiens
  Payload ID: 8406
  Gene Symbol: IL1R1
  Gene Name: interleukin 1 receptor, type I
  ENST ID: ENST00000413623
  CDS Start-End: 76-435
accctctgaagatggtgactccctcctgagaagctggaccccttggtaaaagacaaggccttctccaagaagaatatgaaagtgttactcagacttatttgtttcatagctctactgatttcttctctggaggctgataaatgcaaggaacgtgaagaaaaaataattttagtgtcatctgcaaatgaaattgatgttcgtccctgtcctcttaacccaaatgaacacaaaggcactataacttggtataaagatgacagcaagacacctgtatctacagaacaagcctccaggattcatcaacacaaagagaaactttggtttgttcctgctaaggtggaggattcaggacattactattgcgtggtaaggattgcaaacctctacttcttgacaatatacactttagtggagtcaaagataggctcatcgtgatgaatgtggctgaaaagcatagagggaactatacttgtcatgcatcctacacatacttgggcaagcaatatcctattacccgggtaatagaatttattactctagaggaaaacaaacccacaaggcctgtgattgtgagcccagctaatgagacaatggaagtagacttgggatcccagatacaattgatctgtaatgtcaccggccagttgagtgacattgcttactggaagtggaatgggtcagtaattgatgaagatgacccagtgctaggggaagactattacagtgtggaaaatcctgcaaacaaaagaaggagtaccctcatcacagtgcttaatatatcggaaattgaaagtagattttataaacatccatttacctgttttgccaagaatacacatggtatagatgcagcatatatccagttaatatatccagtcactaatttccagaagcacatgattggtatatgtgtcacgttgacagtcataattgtgtgttctgttttcatctataaaatcttcaagattgacattgtgctttggtacagggattcctgctatgattttctcccaataaaagcttcagatggaaagacctatgacgcatatatactgtatccaaagactgttggggaagggtctacctctgactgtgatatttttgtgtttaaagtcttgcctgaggtcttggaaaaacagtgtggatataagctgttcatttatggaagggatgactacgttggggaagacattgttgaggtcattaatgaaaacgtaaagaaaagcagaagactgattatcattttagtcagagaaacatcaggcttcagctggctgggtggttcatctgaagagcaaatagccatgtataatgctcttgttcaggatggaattaaagttgtcctgcttgagctggagaaaatccaagactatgagaaaatgccagaatcgattaaattcattaagcagaaacatggggctatccgctggtcaggggactttacacagggaccacagtctgcaaagacaaggttctggaagaatgtcaggtaccacatgccagtccagcgacggtcaccttcatctaaacaccagttactgtcaccagccactaaggagaaactgcaaagagaggctcacgtgcctctcgggtagcatggagaagttgccaagagttctttaggtgcctcctgtcttatggcgttgcaggccaggttatgcctcatgctgacttgcag

SEQ ID NO: 143760 - DNA, 709 bp, Homo sapiens
  Payload ID: 8406
  Gene Symbol: IL1R1
  Gene Name: interleukin 1 receptor, type I
  ENST ID: ENST00000430171
  CDS Start-End: 163-709
gtgactccctcctgagaagctggaccccttggtaaaagacaaggccttctccaagacttaaaacacacttcacgcagtcacagaaagagctcatagaccagactgcggggcttcaaagccttctatcttatttaatcatctgtaaatagtttaaagaagaatatgaaagtgttactcagacttatttgtttcatagctctactgatttcttctctggaggctgataaatgcaaggaacgtgaagaaaaaataattttagtgtcatctgcaaatgaaattgatgttcgtccctgtcctcttaacccaaatgaacacaaaggcactataacttggtataaagatgacagcaagacacctgtatctacagaacaagcctccaggattcatcaacacaaagagaaactttggtttgttcctgctaaggtggaggattcaggacattactattgcgtggtaagaaattcatcttactgcctcagaattaaaataagtgcaaaatttgtggagaatgagcctaacttatgttataatgcacaagccatatttaagcagaaactacccgttgcaggagacggaggacttgtgtgcccttatatggagttttttaaaaatgaaaataatgagttacctaaattacagtggtataaggattgcaaacctctacttcttgacaatatacactttagtggagtcaaagataggctcatcg

SEQ ID NO: 143761 - DNA, 1525 bp, Homo sapiens
  Payload ID: 8406
  Gene Symbol: IL1R1
  Gene Name: interleukin 1 receptor, type I
  ENST ID: ENST00000428279
  CDS Start-End: 630-1525
agtcacttgctgaagactagcgaagtggagggggaaagcccgagggagctgcagactcgaccactgcgccctcccctcctctccctgcaaggagcccaaggtgtgatcctgccaggcgttcgttcgctgcatgaccttggccatccttccattcccctgggtgtgaattctcattggcaaagtagacgcaccctctgaagatggtgactccctcctgagaagctggaccccttggtaaaagacaaggccttctccaagataaatgcaaggaacgtgaagaaaaaataattttagtgtcatctgcaaatgaaattgatgttcgtccctgtcctcttaacccaaatgaacacaaaggcactataacttggtataaagatgacagcaagacacctgtatctacagaacaagcctccaggattcatcaacacaaagagaaactttggtttgttcctgctaaggtggaggattcaggacattactattgcgtggtaagaaattcatcttactgcctcagaattaaaataagtgcaaaatttgtggagaatgagcctaacttatgttataatgcacaagccatatttaagcagaaactacccgttgcaggagacggaggacttgtgtgcccttatatggagttttttaaaaatgaaaataatgagttacctaaattacagtggtataaggattgcaaacctctacttcttgacaatatacactttagtggagtcaaagataggctcatcgtgatgaatgtggctgaaaagcatagagggaactatacttgtcatgcatcctacacatacttgggcaagcaatatcctattacccgggtaatagaatttattactctagaggaaaacaaacccacaaggcctgtgattgtgagcccagctaatgagacaatggaagtagacttgggatcccagatacaattgatctgtaatgtcaccggccagttgagtgacattgcttactggaagtggaatgggtcagtaattgatgaagatgacccagtgctaggggaagactattacagtgtggaaaatcctgcaaacaaaagaaggagtaccctcatcacagtgcttaatatatcggaaattgaaagtagattttataaacatccatttacctgttttgccaagaatacacatggtatagatgcagcatatatccagttaatatatccagtcactaatttccagaagcacatgattggtatatgtgtcacgttgacagtcataattgtgtgttctgttttcatctataaaatcttcaagattgacattgtgctttggtacagggattcctgctatgattttctcccaataaaagcttcagatggaaagacctatgacgcatatatactgtatccaaagactgttggggaagggtctacctctgactgtgatatttttgtgtttaaagtcttgcctgaggtcttggaaaaacagtgtggatataagctgttcatttatggaagggatgactacgttggggaagacattgttgaggtcattaatgaaaa

SEQ ID NO: 143762 - DNA, 549 bp, Homo sapiens
  Payload ID: 8406
  Gene Symbol: IL1R1
  Gene Name: interleukin 1 receptor, type I
  ENST ID: ENST00000450319
  CDS Start-End: 232-549
cttcttggaggatggcccatgaagacctccaaacaagctggaggggccagtcacttgctgaagactagcgaagtggagggggaaagcccgagggagctgcagactcgaccactgcgccctcccctcctctccctgcaaggagcccaaggtagacgcaccctctgaagatggtgactccctcctgagaagctggaccccttggtaaaagacaaggccttctccaagaagaatatgaaagtgttactcagacttatttgtttcatagctctactgatttcttctctggaggctgataaatgcaaggaacgtgaagaaaaaataattttagtgtcatctgcaaatgaaattgatgttcgtccctgtcctcttaacccaaatgaacacaaaggcactataacttggtataaagatgacagcaagacacctgtatctacagaacaagcctccaggattcatcaacacaaagagaaactttggtttgttcctgctaaggtggaggattcaggacattactattgcgtggtaagaaattcatcttactgcctcaga

SEQ ID NO: 143763 - DNA, 2658 bp, Homo sapiens
  Payload ID: 8406
  Gene Symbol: IL1R1
  Gene Name: interleukin 1 receptor, type I
  ENST ID: ENST00000424272
  CDS Start-End: 242-1585
attggcagctcttcacttgtatcttttcatatcaaaaatgggaggtgacacccagtttaaggaaaattccaaggcatttgtctcgactaatgtgaaagatgattacagtggccagaggactgccaaggctccttctcaagctgcttgagtcaatgagggtagacgcaccctctgaagatggtgactccctcctgagaagctggaccccttggtaaaagacaaggccttctccaagaagaatatgaaagtgttactcagacttatttgtttcatagctctactgatttcttctctggaggctgataaatgcaaggaacgtgaagaaaaaataattttagtgtcatctgcaaatgaaattgatgttcgtccctgtcctcttaacccaaatgaacacaaaggcactataacttggtataaagatgacagcaagacacctgtatctacagaacaagcctccaggattcatcaacacaaagagaaactttggtttgttcctgctaaggtggaggattcaggacattactattgcgtggtaagaaattcatcttactgcctcagaattaaaataagtgcaaaatttgtggagaatgagcctaacttatgttataatgcacaagccatatttaagcagaaactacccgttgcaggagacggaggacttgtgtgcccttatatggagttttttaaaaatgaaaataatgagttacctaaattacagtggtataaggattgcaaacctctacttcttgacaatatacactttagtggagtcaaagataggctcatcgtgatgaatgtggctgaaaagcatagagggaactatacttgtcatgcatcctacacatacttgggcaagcaatatcctattacccgggtaatagaatttattactctagaggaaaacaaacccacaaggcctgtgattgtgagcccagctaatgagacaatggaagtagacttgggatcccagatacaattgatctgtaatgtcaccggccagttgagtgacattgcttactggaagtggaatgggtcagtaattgatgaagatgacccagtgctaggggaagactattacagtgtggaaaatcctgcaaacaaaagaaggagtaccctcatcacagtgcttaatatatcggaaattgaaagtagattttataaacatccatttacctgttttgccaagaatacacatggtatagatgcagcatatatccagttaatatatccagtcactaatttccagaagcacatgattggtatatgtgtcacgttgacagtcataattgtgtgttctgttttcatctataaaatcttcaagattgacattgtgctttggtacagggattcctgctatgattttctcccaataaaagcttcagatggaaagacctatgacgcatatatactgtatccaaagactgttggggaagggtctacctctgactgtgatatttttgtgtttaaagtcttgcctgaggtcttggaaaaacagtgtggatataagctgttcatttatggaagggatgactacgttggggaaggtatgtgtgtaatggaacagagtaaaggcttattgttgtaaaactacttagtaaaatgtggattccatctttctagaagatcgtggcataggggtatatgtttcacaattttaagaacctcttcagaagtgtatgatgatttttacatttattaaatgcatttacttctctcatattttgtcagagcaataattaagtgattttcatttagttttgaaaaacttaatgactagttaaacccaacagttgctttacaactgatacaattaaacaggagtggtagagatcaaatgattgaataataagtttttaaaattccaacaaagttttctgagttctaaatgaaatatttgtcttttgagggccaatttttgagttagtctataaaatgggaggtttgcagtggctcatgccttttatctcagtacaaccctgggaggccagggtgagagggtcacttgagcctaggagtttgaggctgcagtgatccaagatcacgccactgcgctccagtgtgagcaacagaacaagagactgtctcttaaaattaattaattaaaaacatgggaaactcctttaattttaagtaagacaagaaaaaggcattaggagccatacggttgtgaaaagccttgtgtggctttggttcaggagagaatgatgataaatagaattttacttactatattgtgcttcctgtttttcagacattgttgaggtcattaatgaaaacgtaaagaaaagcagaagactgattatcattttagtcagagaaacatcaggcttcagctggctgggtggttcatctgaagagcaaatagccatgtataatgctcttgttcaggatggaattaaagttgtcctgcttgagctggagaaaatccaagactatgagaaaatgccagaatcgattaaattcattaagcagaaacatggggctatccgctggtcaggggactttacacagggaccacagtctgcaaagacaaggttctggaagaatgtcaggtaccacatgccagtccagcgacggtcaccttcatctaaacaccagttactgtcaccagccactaaggagaaactgcaaagagaggctcacgtgcctctcgggtag

SEQ ID NO: 143764 - DNA, 1578 bp, Homo sapiens
  Payload ID: 8407
  Gene Symbol: IL1R2
  Gene Name: interleukin 1 receptor, type II
  Uniprot ID: P27930
  ENST ID: ENST00000332549
  CDS Start-End: 230-1426
cccgtgaggaggaaaaggtgtgtccgctgccacccagtgtgagcgggtgacaccacccggttaggaaatcccagctcccaagagggtataaatccctgctttactgctgagctcctgctggaggtgaaagtctggcctggcagccttccccaggtgagcagcaacaaggccacgtgctgctgggtctcagtcctccacttcccgtgtcctctggaagttgtcaggagcaatgttgcgcttgtacgtgttggtaatgggagtttctgccttcacccttcagcctgcggcacacacaggggctgccagaagctgccggtttcgtgggaggcattacaagcgggagttcaggctggaaggggagcctgtagccctgaggtgcccccaggtgccctactggttgtgggcctctgtcagcccccgcatcaacctgacatggcataaaaatgactctgctaggacggtcccaggagaagaagagacacggatgtgggcccaggacggtgctctgtggcttctgccagccttgcaggaggactctggcacctacgtctgcactactagaaatgcttcttactgtgacaaaatgtccattgagctcagagtttttgagaatacagatgctttcctgccgttcatctcatacccgcaaattttaaccttgtcaacctctggggtattagtatgccctgacctgagtgaattcacccgtgacaaaactgacgtgaagattcaatggtacaaggattctcttcttttggataaagacaatgagaaatttctaagtgtgagggggaccactcacttactcgtacacgatgtggccctggaagatgctggctattaccgctgtgtcctgacatttgcccatgaaggccagcaatacaacatcactaggagtattgagctacgcatcaagaaaaaaaaagaagagaccattcctgtgatcatttcccccctcaagaccatatcagcttctctggggtcaagactgacaatcccgtgtaaggtgtttctgggaaccggcacacccttaaccaccatgctgtggtggacggccaatgacacccacatagagagcgcctacccgggaggccgcgtgaccgaggggccacgccaggaatattcagaaaataatgagaactacattgaagtgccattgatttttgatcctgtcacaagagaggatttgcacatggattttaaatgtgttgtccataataccctgagttttcagacactacgcaccacagtcaaggaagcctcctccacgttctcctggggcattgtgctggccccactttcactggccttcttggttttggggggaatatggatgcacagacggtgcaaacacagaactggaaaagcagatggtctgactgtgctatggcctcatcatcaagactttcaatcctatcccaagtgaaataaatggaatgaaataattcaaacacaaactccgtacgtcttctcttatggaagtggctgtgtctttttgagggactctgttctttgcctcagttgtctaccaaaggtgccacatttatagtggctttgtagtaaaggactaaagtctta

SEQ ID NO: 143765 - DNA, 1405 bp, Homo sapiens
  Payload ID: 8407
  Gene Symbol: IL1R2
  Gene Name: interleukin 1 receptor, type II
  Uniprot ID: P27930
  ENST ID: ENST00000393414
  CDS Start-End: 184-1380
gtgggatgggagatactgttgtggtcacctctggaaaatacattctgctactcttaaaaactagtgacgctcatacaaatcaacagaaagagcttctgaaggaagactttaaagctgcttctgccacgtgctgctgggtctcagtcctccacttcccgtgtcctctggaagttgtcaggagcaatgttgcgcttgtacgtgttggtaatgggagtttctgccttcacccttcagcctgcggcacacacaggggctgccagaagctgccggtttcgtgggaggcattacaagcgggagttcaggctggaaggggagcctgtagccctgaggtgcccccaggtgccctactggttgtgggcctctgtcagcccccgcatcaacctgacatggcataaaaatgactctgctaggacggtcccaggagaagaagagacacggatgtgggcccaggacggtgctctgtggcttctgccagccttgcaggaggactctggcacctacgtctgcactactagaaatgcttcttactgtgacaaaatgtccattgagctcagagtttttgagaatacagatgctttcctgccgttcatctcatacccgcaaattttaaccttgtcaacctctggggtattagtatgccctgacctgagtgaattcacccgtgacaaaactgacgtgaagattcaatggtacaaggattctcttcttttggataaagacaatgagaaatttctaagtgtgagggggaccactcacttactcgtacacgatgtggccctggaagatgctggctattaccgctgtgtcctgacatttgcccatgaaggccagcaatacaacatcactaggagtattgagctacgcatcaagaaaaaaaaagaagagaccattcctgtgatcatttcccccctcaagaccatatcagcttctctggggtcaagactgacaatcccgtgtaaggtgtttctgggaaccggcacacccttaaccaccatgctgtggtggacggccaatgacacccacatagagagcgcctacccgggaggccgcgtgaccgaggggccacgccaggaatattcagaaaataatgagaactacattgaagtgccattgatttttgatcctgtcacaagagaggatttgcacatggattttaaatgtgttgtccataataccctgagttttcagacactacgcaccacagtcaaggaagcctcctccacgttctcctggggcattgtgctggccccactttcactggccttcttggttttggggggaatatggatgcacagacggtgcaaacacagaactggaaaagcagatggtctgactgtgctatggcctcatcatcaagactttcaatcctatcccaagtgaaataaatggaatgaaataattcaaa

SEQ ID NO: 143766 - DNA, 792 bp, Homo sapiens
  Payload ID: 8407
  Gene Symbol: IL1R2
  Gene Name: interleukin 1 receptor, type II
  ENST ID: ENST00000457817
  CDS Start-End: 105-792
gactcagagatgagacagttgcctaaaaacttctgggaacaaggccacgtgctgctgggtctcagtcctccacttcccgtgtcctctggaagttgtcaggagcaatgttgcgcttgtacgtgttggtaatgggagtttctgccttcacccttcagcctgcggcacacacaggggctgccagaagctgccggtttcgtgggaggcattacaagcgggagttcaggctggaaggggagcctgtagccctgaggtgcccccaggtgccctactggttgtgggcctctgtcagcccccgcatcaacctgacatggcataaaaatgactctgctaggacggtcccaggagaagaagagacacggatgtgggcccaggacggtgctctgtggcttctgccagccttgcaggaggactctggcacctacgtctgcactactagaaatgcttcttactgtgacaaaatgtccattgagctcagagtttttgagaatacagatgctttcctgccgttcatctcatacccgcaaattttaaccttgtcaacctctggggtattagtatgccctgacctgagtgaattcacccgtgacaaaactgacgtgaagattcaatggtacaaggattctcttcttttggataaagacaatgagaaatttctaagtgtgagggggaccactcacttactcgtacacgatgtggccctggaagatgctggctattaccgctgtgtcctgacatttgcccatgaaggccagcaatacaacatcactaggagtattgagctacgcatcaaga

SEQ ID NO: 143767 - DNA, 1106 bp, Homo sapiens
  Payload ID: 8407
  Gene Symbol: IL1R2
  Gene Name: interleukin 1 receptor, type II
  Uniprot ID: P27930
  ENST ID: ENST00000441002
  CDS Start-End: 62-952
gccacgtgctgctgggtctcagtcctccacttcccgtgtcctctggaagttgtcaggagcaatgttgcgcttgtacgtgttggtaatgggagtttctgccttcacccttcagcctgcggcacacacaggggctgccagaagctgccggtttcgtgggaggcattacaagcgggagttcaggctggaaggggagcctgtagccctgaggtgcccccaggtgccctactggttgtgggcctctgtcagcccccgcatcaacctgacatggcataaaaatgactctgctaggacggtcccaggagaagaagagacacggatgtgggcccaggacggtgctctgtggcttctgccagccttgcaggaggactctggcacctacgtctgcactactagaaatgcttcttactgtgacaaaatgtccattgagctcagagtttttgagaatacagatgctttcctgccgttcatctcatacccgcaaattttaaccttgtcaacctctggggtattagtatgccctgacctgagtgaattcacccgtgacaaaactgacgtgaagattcaatggtacaaggattctcttcttttggataaagacaatgagaaatttctaagtgtgagggggaccactcacttactcgtacacgatgtggccctggaagatgctggctattaccgctgtgtcctgacatttgcccatgaaggccagcaatacaacatcactaggagtattgagctacgcatcaagaaaaaaaaagaagagaccattcctgtgatcatttcccccctcaagaccatatcagcttctctggggtcaagactgacaatcccgtgtaaggtgtttctgggaaccggcacacccttaaccaccatgctgtggtggacggccaatgacacccacatagagagcgcctacccgggaggccgcgtgaccgaggggccacgccagtaagtgggccagggtcttctgttgagaactctgtgggtttcgctcttccttttggagacagttatcactatgacccacataccacattaaaagttactttttttgattccaaactgttggatgtttagaatttaaaaaattgtattttgctaaaaat

SEQ ID NO: 143768 - DNA, 2058 bp, Homo sapiens
  Payload ID: 8408
  Gene Symbol: IL1RL1
  Gene Name: interleukin 1 receptor-like 1
  Uniprot ID: Q01638
  ENST ID: ENST00000233954
  CDS Start-End: 272-1942
aaagagaggctggctgttgtatttagtaaagctataaagctgtaagagaaattggctttctgagttgtgaaactgtgggcagaaagttgaggaagaaagaactcaagtacaacccaatgaggttgagatataggctactcttcccaactcagtcttgaagagtatcaccaactgcctcatgtgtggtgaccttcactgtcgtatgccagtgactcatctggagtaatctcaacaacgagttaccaatacttgctcttgattgataaacagaatggggttttggatcttagcaattctcacaattctcatgtattccacagcagcaaagtttagtaaacaatcatggggcctggaaaatgaggctttaattgtaagatgtcctagacaaggaaaacctagttacaccgtggattggtattactcacaaacaaacaaaagtattcccactcaggaaagaaatcgtgtgtttgcctcaggccaacttctgaagtttctaccagctgcagttgctgattctggtatttatacctgtattgtcagaagtcccacattcaataggactggatatgcgaatgtcaccatatataaaaaacaatcagattgcaatgttccagattatttgatgtattcaacagtatctggatcagaaaaaaattccaaaatttattgtcctaccattgacctctacaactggacagcacctcttgagtggtttaagaattgtcaggctcttcaaggatcaaggtacagggcgcacaagtcatttttggtcattgataatgtgatgactgaggacgcaggtgattacacctgtaaatttatacacaatgaaaatggagccaattatagtgtgacggcgaccaggtccttcacggtcaaggatgagcaaggcttttctctgtttccagtaatcggagcccctgcacaaaatgaaataaaggaagtggaaattggaaaaaacgcaaacctaacttgctctgcttgttttggaaaaggcactcagttcttggctgccgtcctgtggcagcttaatggaacaaaaattacagactttggtgaaccaagaattcaacaagaggaagggcaaaatcaaagtttcagcaatgggctggcttgtctagacatggttttaagaatagctgacgtgaaggaagaggatttattgctgcagtacgactgtctggccctgaatttgcatggcttgagaaggcacaccgtaagactaagtaggaaaaatccaattgatcatcatagcatctactgcataattgcagtatgtagtgtatttttaatgctaatcaatgtcctggttatcatcctaaaaatgttctggattgaggccactctgctctggagagacatagctaaaccttacaagactaggaatgatggaaagctctatgatgcttatgttgtctacccacggaactacaaatccagtacagatggggccagtcgtgtagagcactttgttcaccagattctgcctgatgttcttgaaaataaatgtggctataccttatgcatttatgggagagatatgctacctggagaagatgtagtcactgcagtggaaaccaacatacgaaagagcaggcggcacattttcatcctgacccctcagatcactcacaataaggagtttgcctacgagcaggaggttgccctgcactgtgccctcatccagaacgacgccaaggtgatacttattgagatggaggctctgagcgagctggacatgctgcaggctgaggcgcttcaggactccctccagcatcttatgaaagtacaggggaccatcaagtggagggaggaccacattgccaataaaaggtccctgaattctaaattctggaagcacgtgaggtaccaaatgcctgtgccaagcaaaattcccagaaaggcctctagtttgactcccttggctgcccagaagcaatagtgcctgctgtgatgtgcaaaggcatctgagtttgaagctttcctgacttctcctagctggcttatgcccctgcactgaagtgtgaggagcaggaatattaaagggattcaggcctc

SEQ ID NO: 143769 - DNA, 3994 bp, Homo sapiens
  Payload ID: 8408
  Gene Symbol: IL1RL1
  Gene Name: interleukin 1 receptor-like 1
  Uniprot ID: Q01638
  ENST ID: ENST00000311734
  CDS Start-End: 340-1326
gtacatgatgcaccagcatttttgaacaagtcatagatttggccacaaatcaaatttcaggatgggaggagtgtctcccctttaaaatagaagagagtgagtagtctatgaggagggacctacaaagactggaaactattcttagctccgtcactgactccaagttcatcccctctgtctttcagtttggttgagatataggctactcttcccaactcagtcttgaagagtatcaccaactgcctcatgtgtggtgaccttcactgtcgtatgccagtgactcatctggagtaatctcaacaacgagttaccaatacttgctcttgattgataaacagaatggggttttggatcttagcaattctcacaattctcatgtattccacagcagcaaagtttagtaaacaatcatggggcctggaaaatgaggctttaattgtaagatgtcctagacaaggaaaacctagttacaccgtggattggtattactcacaaacaaacaaaagtattcccactcaggaaagaaatcgtgtgtttgcctcaggccaacttctgaagtttctaccagctgcagttgctgattctggtatttatacctgtattgtcagaagtcccacattcaataggactggatatgcgaatgtcaccatatataaaaaacaatcagattgcaatgttccagattatttgatgtattcaacagtatctggatcagaaaaaaattccaaaatttattgtcctaccattgacctctacaactggacagcacctcttgagtggtttaagaattgtcaggctcttcaaggatcaaggtacagggcgcacaagtcatttttggtcattgataatgtgatgactgaggacgcaggtgattacacctgtaaatttatacacaatgaaaatggagccaattatagtgtgacggcgaccaggtccttcacggtcaaggatgagcaaggcttttctctgtttccagtaatcggagcccctgcacaaaatgaaataaaggaagtggaaattggaaaaaacgcaaacctaacttgctctgcttgttttggaaaaggcactcagttcttggctgccgtcctgtggcagcttaatggaacaaaaattacagactttggtgaaccaagaattcaacaagaggaagggcaaaatcaaagtttcagcaatgggctggcttgtctagacatggttttaagaatagctgacgtgaaggaagaggatttattgctgcagtacgactgtctggccctgaatttgcatggcttgagaaggcacaccgtaagactaagtaggaaaaatccaagtaaggagtgtttctgagactttgatcacctgaactttctctagcaagtgtaagcagaatggagtgtggttccaagagatccatcaagacaatgggaatggcctgtgccataaaatgtgcttctcttcttcgggatgttgtttgctgtctgatctttgtagactgttcctgtttgctgggagcttctctgctgcttaaattgttcgtcctcccccactccctcctatcgttggtttgtctagaacactcagctgcttctttggtcatccttgttttctaactttatgaactccctctgtgtcactgtatgtgaaaggaaatgcaccaacaaccgtaaactgaacgtgttcttttgtgctcttttataacttgcattacatgttgtaagcatggtccgttctatacctttttctggtcataatgaacactcattttgttagcgagggtggtaaagtgaacaaaaaggggaagtatcaaactactgccatttcagtgagaaaatcctaggtgctactttataataagacatttgttaggccattcttgcattgatataaagaaatacctgagactgggtgatttatatgaaaagaggtttaattggctcacagttctgcaggctgtatgggaagcatggcggcatctgcttctggggacacctcaggagctttactcatggcagaaggcaaagcaaaggcaggcacttcacacagtaaaagcaggagcgagagagaggtgccacactgaaacagccagatctcatgagaagtcactcactattgcaaggacagcatcaaagagatggtgctaaaccattcatgatgaactcacccccatgatccaatcacctcccaccaggctccacctcgaatactggggattaccattcagcatgagatttgggcaggaacacagacccaaaccataccacacacattatcattgttaaactttgtaaagtatttaaggtacatggaacacacgggaagtctggtagctcagcccatttctttattgcatctgttattcaccatgtaattcaggtaccacgtattccagggagcctttcttggccctcagtttgcagtatacacactttccaagtactcttgtagcatcctgtttgtatcatagcactggtcacattgccttacctaaatctgtttgacagtctgctcaacacgactgcaagctccatgagggcagggacatcatctcttccatctttgggtccttagtgcaatacctggcagctagccagtgctcagctaaatatttgttgactgaataaatgaatgcacaaccaaattattgataccaaatgttttttttgtgtacatttctacttctctagctataagtcttaattatacaacaaaatactatttttatatttatgtttggtaaattcaataactttcctcatcatttggaaagtcaaattgtttattgcttccctacagttttttctgaatctagcaggattttaatgatatcattataatttgacacaataaaaggacaacatgaaactgatgaatctttattgggttaatttcagacactatataatcttttaaaaatgtaacattcttttttatatataaataattggtggcatcacaaatagccaaagcagggtggagagagtgatccttcctgggtgcaggcaagaaggggatatgttttctacagagttttcaaaacagtgataaagctgtctacaagtcattgtgctttttatcatcactatgcccagacaatgtgaaacatcagagatgaagtgctcttcccacagaggtggactgatccttctccccactcccttggtgtgtctctgaatgcaatgttgtcttggaaaacagctttccaagcatttcactcctgagcacttgccagtttcctcacttgttcttcacatatccaggcaaagacatcctgtttgctatatgaagcattgtatcccgtataaaaggaaggaaagagagaaatatatttttacactcatcactcctcaggggctgtacaatcatgtagaaattgtttaatgtgcctgtcaaatagccaaagagtgttaaaccctgagttcccacccatgtgtgtggtatggttaggattcatccagatacacagagagaggcacaacaggaggagaaaggataggggtgtggggacagcgggcccccaatatggtgtaatcgtggcaggtctctgcctgaagtgctatgtggggtttttcttgttttaattttgactttaacccctgatttgtaagtttttcataaaataaacagaatcataactcatgtagatggctataagtgccgtagtgttctgtgggtctctggtgtctgccagtgataagtgtggcaccccaggaaggctgtggaccccatcaaggtgctatgtgagggccatgcttggggtggtggtgggcccagtagaccctgcagccatccatccagcctgcccactcacactgcccttgtgtactcctgctttgctacgttatcattgatcaatgtccctggttacctatgtgtttgaattatcttcgtgttacaggtgtttaatgattttgctccttctagcttatttgtatttcacctgtttttctttaaatcaacatggttacactctgtttcagcaactgtataaattaaacacaaattattactactgcta

SEQ ID NO: 143770 - DNA, 3571 bp, Homo sapiens
  Payload ID: 8408
  Gene Symbol: IL1RL1
  Gene Name: interleukin 1 receptor-like 1
  Uniprot ID: Q01638
  ENST ID: ENST00000404917
  CDS Start-End: 269-904
aaagagaggctggctgttgtatttagtaaagctataaagctgtaagagaaattggctttctgagttgtgaaactgtgggcagaaagttgaggaagaaagaactcaagtacaacccaatgagggccaacttctgaagtttctaccagctgcagttgctgattctggtatttatacctgtattgtcagaagtcccacattcaataggactggatatgcgaatgtcaccatatataaaaaacaatcagattgcaatgttccagattatttgatgtattcaacagtatctggatcagaaaaaaattccaaaatttattgtcctaccattgacctctacaactggacagcacctcttgagtggtttaagaattgtcaggctcttcaaggatcaaggtacagggcgcacaagtcatttttggtcattgataatgtgatgactgaggacgcaggtgattacacctgtaaatttatacacaatgaaaatggagccaattatagtgtgacggcgaccaggtccttcacggtcaaggatgagcaaggcttttctctgtttccagtaatcggagcccctgcacaaaatgaaataaaggaagtggaaattggaaaaaacgcaaacctaacttgctctgcttgttttggaaaaggcactcagttcttggctgccgtcctgtggcagcttaatggaacaaaaattacagactttggtgaaccaagaattcaacaagaggaagggcaaaatcaaagtttcagcaatgggctggcttgtctagacatggttttaagaatagctgacgtgaaggaagaggatttattgctgcagtacgactgtctggccctgaatttgcatggcttgagaaggcacaccgtaagactaagtaggaaaaatccaagtaaggagtgtttctgagactttgatcacctgaactttctctagcaagtgtaagcagaatggagtgtggttccaagagatccatcaagacaatgggaatggcctgtgccataaaatgtgcttctcttcttcgggatgttgtttgctgtctgatctttgtagactgttcctgtttgctgggagcttctctgctgcttaaattgttcgtcctcccccactccctcctatcgttggtttgtctagaacactcagctgcttctttggtcatccttgttttctaactttatgaactccctctgtgtcactgtatgtgaaaggaaatgcaccaacaaccgtaaactgaacgtgttcttttgtgctcttttataacttgcattacatgttgtaagcatggtccgttctatacctttttctggtcataatgaacactcattttgttagcgagggtggtaaagtgaacaaaaaggggaagtatcaaactactgccatttcagtgagaaaatcctaggtgctactttataataagacatttgttaggccattcttgcattgatataaagaaatacctgagactgggtgatttatatgaaaagaggtttaattggctcacagttctgcaggctgtatgggaagcatggcggcatctgcttctggggacacctcaggagctttactcatggcagaaggcaaagcaaaggcaggcacttcacacagtaaaagcaggagcgagagagaggtgccacactgaaacagccagatctcatgagaagtcactcactattgcaaggacagcatcaaagagatggtgctaaaccattcatgatgaactcacccccatgatccaatcacctcccaccaggctccacctcgaatactggggattaccattcagcatgagatttgggcaggaacacagacccaaaccataccacacacattatcattgttaaactttgtaaagtatttaaggtacatggaacacacgggaagtctggtagctcagcccatttctttattgcatctgttattcaccatgtaattcaggtaccacgtattccagggagcctttcttggccctcagtttgcagtatacacactttccaagtactcttgtagcatcctgtttgtatcatagcactggtcacattgccttacctaaatctgtttgacagtctgctcaacacgactgcaagctccatgagggcagggacatcatctcttccatctttgggtccttagtgcaatacctggcagctagccagtgctcagctaaatatttgttgactgaataaatgaatgcacaaccaaattattgataccaaatgttttttttgtgtacatttctacttctctagctataagtcttaattatacaacaaaatactatttttatatttatgtttggtaaattcaataactttcctcatcatttggaaagtcaaattgtttattgcttccctacagttttttctgaatctagcaggattttaatgatatcattataatttgacacaataaaaggacaacatgaaactgatgaatctttattgggttaatttcagacactatataatcttttaaaaatgtaacattcttttttatatataaataattggtggcatcacaaatagccaaagcagggtggagagagtgatccttcctgggtgcaggcaagaaggggatatgttttctacagagttttcaaaacagtgataaagctgtctacaagtcattgtgctttttatcatcactatgcccagacaatgtgaaacatcagagatgaagtgctcttcccacagaggtggactgatccttctccccactcccttggtgtgtctctgaatgcaatgttgtcttggaaaacagctttccaagcatttcactcctgagcacttgccagtttcctcacttgttcttcacatatccaggcaaagacatcctgtttgctatatgaagcattgtatcccgtataaaaggaaggaaagagagaaatatatttttacactcatcactcctcaggggctgtacaatcatgtagaaattgtttaatgtgcctgtcaaatagccaaagagtgttaaaccctgagttcccacccatgtgtgtggtatggttaggattcatccagatacacagagagaggcacaacaggaggagaaaggataggggtgtggggacagcgggcccccaatatggtgtaatcgtggcaggtctctgcctgaagtgctatgtggggtttttcttgttttaattttgactttaacccctgatttgtaagtttttcataaaataaacagaatcataactcatgtagatggctataagtgccgtagtgttctgtgggtctctggtgtctgccagtgataagtgtggcaccccaggaaggctgtggaccccatcaaggtgctatgtgagggccatgcttggggtggtggtgggcccagtagaccctgcagccatccatccagcctgcccactcacactgcccttgtgtactcctgctttgctacgttatcattgatcaatgtccctggttacctatgtgtttgaattatcttcgtgttacaggtgtttaatgattttgctccttctagcttatttgtatttcacctgtttttctttaaatcaacatggttacactctgtttcagcaactgtataaattaaacacaaattattactactgct

SEQ ID NO: 143771 - DNA, 2693 bp, Homo sapiens
  Payload ID: 8408
  Gene Symbol: IL1RL1
  Gene Name: interleukin 1 receptor-like 1
  ENST ID: ENST00000409584
  CDS Start-End: 230-1174
aggagggacctacaaagactggaaactattcttagctccgtcactgactccaagttcatcccctctgtctttcagtttggttgagatataggctactcttcccaactcagtcttgaagagtatcaccaactgcctcatgtgtggtgaccttcactgtcgtatgccagtgactcatctggagtaatctcaacaacgagttaccaatacttgctcttgattgataaacagaatggggttttggatcttagcaattctcacaattctcatgtattccacagcagcaaagtttagtaaacaatcatggggcctggaaaatgaggctttaattgtaagatgtcctagacaaggaaaacctagttacaccgtggattggtattactcacaaacaaacaaaagtattcccactcaggaaagaaatcgtgtgtttgcctcaggccaacttctgaagtttctaccagctgcagttgctgattctggtatttatacctgtattgtcagaagtcccacattcaataggactggatatgcgaatgtcaccatatataaaaaacaatcagattgcaatgttccagattatttgatgtattcaacagtatctggatcagaaaaaaattccaaaatttattgtcctaccattgacctctacaactggacagcacctcttgagtggtttaagaattgtcaggctcttcaaggatcaaggtacagggcgcacaagtcatttttggtcattgataatgtgatgactgaggacgcaggtgattacacctgtaaatttatacacaatgaaaatggagccaattatagtgtgacggcgaccaggtccttcacggtcaaggatgagcaaggcttttctctgtttccagtaatcggagcccctgcacaaaatgaaataaaggaagtggaaattggcactcagttcttggctgccgtcctgtggcagcttaatggaacaaaaattacagactttggtgaaccaagaattcaacaagaggaagggcaaaatcaaagtttcagcaatgggctggcttgtctagacatggttttaagaatagctgacgtgaaggaagaggatttattgctgcagtacgactgtctggccctgaatttgcatggcttgagaaggcacaccgtaagactaagtaggaaaaatccaagtaaggagtgtttctgagactttgatcacctgaactttctctagcaagtgtaagcagaatggagtgtggttccaagagatccatcaagacaatgggaatggcctgtgccataaaatgtgcttctcttcttcgggatgttgtttgctgtctgatctttgtagactgttcctgtttgctgggagcttctctgctgcttaaattgttcgtcctcccccactccctcctatcgttggtttgtctagaacactcagctgcttctttggtcatccttgttttctaactttatgaactccctctgtgtcactgtatgtgaaaggaaatgcaccaacaaccgtaaactgaacgtgttcttttgtgctcttttataacttgcattacatgttgtaagcatggtccgttctatacctttttctggtcataatgaacactcattttgttagcgagggtggtaaagtgaacaaaaaggggaagtatcaaactactgccatttcagtgagaaaatcctaggtgctactttataataagacatttgttaggccattcttgcattgatataaagaaatacctgagactgggtgatttatatgaaaagaggtttaattggctcacagttctgcaggctgtatgggaagcatggcggcatctgcttctggggacacctcaggagctttactcatggcagaaggcaaagcaaaggcaggcacttcacacagtaaaagcaggagcgagagagaggtgccacactgaaacagccagatctcatgagaagtcactcactattgcaaggacagcatcaaagagatggtgctaaaccattcatgatgaactcacccccatgatccaatcacctcccaccaggctccacctcgaatactggggattaccattcagcatgagatttgggcaggaacacagacccaaaccataccacacacattatcattgttaaactttgtaaagtatttaaggtacatggaacacacgggaagtctggtagctcagcccatttctttattgcatctgttattcaccatgtaattcaggtaccacgtattccagggagcctttcttggccctcagtttgcagtatacacactttccaagtactcttgtagcatcctgtttgtatcatagcactggtcacattgccttacctaaatctgtttgacagtctgctcaacacgactgcaagctccatgagggcagggacatcatctcttccatctttgggtccttagtgcaatacctggcagctagccagtgctcagctaaatatttgttgactgaataaatgaatgcacaaccaaattattgataccaaatgttttttttgtgtacatttctacttctctagctataagtcttaattatacaacaaaatactatttttatatttatgtttggtaaattcaataactttcctcatcatttggaaagtcaaattgtttattgcttccctacagttttttctgaatctagcaggattttaatgatatcattataatttgacacaataaaaggacaacatgaaactga

SEQ ID NO: 143772 - DNA, 1680 bp, Homo sapiens
  Payload ID: 8408
  Gene Symbol: IL1RL1
  Gene Name: interleukin 1 receptor-like 1
  Uniprot ID: Q01638
  ENST ID: ENST00000427077
  CDS Start-End: 200-979
cttagctccgtcactgactccaagttcatcccctctgtctttcagtttggttgagatataggctactcttcccaactcagtcttgaagagtatcaccaactgcctcatgtgtggtgaccttcactgtcgtatgccagtgactcatctggagtaatctcaacaacgagttaccaatacttgctcttgattgataaacagaatggggttttggatcttagcaattctcacaattctcatgtattccacagcagcaaagtttagtaaacaatcatggggcctggaaaatgaggctttaattgtaagatgtcctagacaaggaaaacctagttacaccgtggattggtattactcacaaacaaacaaaagtattcccactcaggaaagaaatcgtgtgtttgcctcaggccaacttctgaagtttctaccagctgcagttgctgattctggtatttatacctgtattgtcagaagtcccacattcaataggactggatatgcgaatgtcaccatatataaaaaacaatcagattgcaatgttccagattatttgatgtattcaacagtatctggatcagaaaaaaattccaaaatttattgtcctaccattgacctctacaactggacagcacctcttgagtggtttaagaattgtcaggctcttcaaggatcaaggtacagggcgcacaagtcatttttggtcattgataatgtgatgactgaggacgcaggtgattacacctgtaaatttatacacaatgaaaatggagccaattatagtgtgacggcgaccaggtccttcacggtcaaggtttggtgtcagagtttctgcaaattaaaaaagagcttaatctttagtaatactcattggattcaaagtctaatgagaggctttgtgatggtatactatggtgtacataaatgttgtcgagtggtttttaatctttgtttgcaatactttcaacatcatcaatggccttgaatgagcaaggcttttctctgtttccagtaatcggagcccctgcacaaaatgaaataaaggaagtggaaattggaaaaaacgcaaacctaacttgctctgcttgttttggaaaaggcactcagttcttggctgccgtcctgtggcagcttaatggaacaaaaattacagactttggtgaaccaagaattcaacaagaggaagggcaaaatcaaagtttcagcaatgggctggcttgtctagacatggttttaagaatagctgacgtgaaggaagaggatttattgctgcagtacgactgtctggccctgaatttgcatggcttgagaaggcacaccgtaagactaagtaggaaaaatccaagtaaggagtgtttctgagactttgatcacctgaactttctctagcaagtgtaagcagaatggagtgtggttccaagagatccatcaagacaatgggaatggcctgtgccataaaatgtgcttctcttcttcgggatgttgtttgctgtctgatctttgtagactgttcctgtttgctgggagcttctctgctgcttaaattgttcgtcctcccccactccctcctatcgttggtttgtctagaacactcagctgcttctttggtcatccttgttttctaactttatgaactccctctgtgtcactgtatgtgaaaggaaatgcaccaacaaccgtaaactg

SEQ ID NO: 143773 - DNA, 545 bp, Homo sapiens
  Payload ID: 8408
  Gene Symbol: IL1RL1
  Gene Name: interleukin 1 receptor-like 1
  ENST ID: ENST00000447231
  CDS Start-End: 430-545
gtgaaactgtgggcagaaagttgaggaagaaagaactcaagtacaacccaatgagggcataaggaaatcggaggcatgtttctgtctggctataacagttctcctactagatcctgaggccaaactattcacatgccattgttcctgaataccattgtggacataatcatctaattttggctattccatgcagagatatgctgctgtgactgctgacttgaatgttacgggatccccagcaggatctgggattctctctgttcttgaatgcgttgtttagttgagatataggctactcttcccaactcagtcttgaagagtatcaccaactgcctcatgtgtggtgaccttcactgtcgtatgccagtgactcatctggagtaatctcaacaacgagttaccaatacttgctcttgattgataaacagaatggggttttggatcttagcaattctcacaattctcatgtattccacagcagcaaagtttagtaaacaatcatggggcctggaaaatgaggctttaattgtaagatgtcctagaca

SEQ ID NO: 143774 - DNA, 2615 bp, Homo sapiens
  Payload ID: 8409
  Gene Symbol: IL1RL2
  Gene Name: interleukin 1 receptor-like 2
  Uniprot ID: Q9HB29
  ENST ID: ENST00000264257
  CDS Start-End: 127-1854
cccgcccacggtggcggggaaatacctaggcatggaagtggcatgacagggctcgtgtccctgtcatattttccactctccacgaggtcctgcgcgcttcaatcctgcaggcagcccggtttggggatgtggtccttgctgctctgcgggttgtccatcgcccttccactgtctgtcacagcagatggatgcaaggacatttttatgaaaaatgagatactttcagcaagccagccttttgcttttaattgtacattccctcccataacatctggggaagtcagtgtaacatggtataaaaattctagcaaaatcccagtgtccaaaatcatacagtctagaattcaccaggacgagacttggattttgtttctccccatggaatggggggactcaggagtctaccaatgtgttataaagggtagagacagctgtcatagaatacatgtaaacctaactgtttttgaaaaacattggtgtgacacttccataggtggtttaccaaatttatcagatgagtacaagcaaatattacatcttggaaaagatgatagtctcacatgtcatctgcacttcccgaagagttgtgttttgggtccaataaagtggtataaggactgtaacgagattaaaggggagcggttcactgttttggaaaccaggcttttggtgagcaatgtctcggcagaggacagagggaactacgcgtgtcaagccatactgacacactcagggaagcagtacgaggttttaaatggcatcactgtgagcattacagaaagagctggatatggaggaagtgtccctaaaatcatttatccaaaaaatcattcaattgaagtacagcttggtaccactctgattgtggactgcaatgtaacagacaccaaggataatacaaatctacgatgctggagagtcaataacactttggtggatgattactatgatgaatccaaacgaatcagagaaggggtggaaacccatgtctcttttcgggaacataatttgtacacagtaaacatcaccttcttggaagtgaaaatggaagattatggccttcctttcatgtgccacgctggagtgtccacagcatacattatattacagctcccagctccggattttcgagcttacttgataggagggcttatcgccttggtggctgtggctgtgtctgttgtgtacatatacaacatttttaagatcgacattgttctttggtatcgaagtgccttccattctacagagaccatagtagatgggaagctgtatgacgcctatgtcttataccccaagccccacaaggaaagccagaggcatgccgtggatgccctggtgttgaatatcctgcccgaggtgttggagagacaatgtggatataagttgtttatattcggcagagatgaattccctggacaagccgtggccaatgtcatcgatgaaaacgttaagctgtgcaggaggctgattgtcattgtggtccccgaatcgctgggctttggcctgttgaagaacctgtcagaagaacaaatcgcggtctacagtgccctgatccaggacgggatgaaggttattctcattgagctggagaaaatcgaggactacacagtcatgccagagtcaattcagtacatcaaacagaagcatggtgccatccggtggcatggggacttcacggagcagtcacagtgtatgaagaccaagttttggaagacagtgagataccacatgccgcccagaaggtgtcggccgtttcctccggtccagctgctgcagcacacaccttgctaccgcaccgcaggcccagaactaggctcaagaagaaagaagtgtactctcacgactggctaagacttgctggactgacacctatggctggaagatgacttgttttgctccatgtctcctcattcctacacctattttctgctgcaggatgaggctagggttagcattctagacacccagttgagctcaggcgtagagaagaggaggatgggataagaactggggccatccccatgtcatggtgggtgagagctggggccatccccgtggtcatggagggtgagagctgggggttatccccatggtcatggagggtgagggctggtcgggggaggcatccccaagtcatggtgggtgagagctcggagcatccccatgtcatggtgggtgagatctgggggtatccctgtgtcatggtgggtgagggcgggtggtcatccacatggtcatagtgggtgagagctgggggtatccctacatcatggtgggtgagagctgggagcatccccatgtcatggtgggcgagatctggggggtatccccacgtcatggtggatgagagctgggggaatcaccatgtcatggtgggtgagatcttgggggatcacctgtcatggtgggtgagagctggggggatcacctgtcatggtgggtgagagttgggattcatccccatgtcatggtgggctgagcccacatggaagcctgtgcttggacagcgtatgcccttttctctgtttttccacaatgaacaattaaactgtaaatgttaaaaatatcagtaatttgtgaaataaattttattctcatttgagcaacataaa

SEQ ID NO: 143775 - DNA, 557 bp, Homo sapiens
  Payload ID: 8409
  Gene Symbol: IL1RL2
  Gene Name: interleukin 1 receptor-like 2
  ENST ID: ENST00000421464
  CDS Start-End: 42-557
ctttctcctttcccgctggcccttgccagcccggtttggggatgtggtccttgctgctctgcgggttgtccatcgcccttccactgtctgtcacagcagatggatgcaaggacatttttatgaaaaatgagatactttcagcaagccagccttttgcttttaattgtacattccctcccataacatctggggaagtcagtgtaacatggtataaaaattctagcaaaatcccagtgtccaaaatcatacagtctagaattcaccaggacgagacttggattttgtttctccccatggaatggggggactcaggagtctaccaatgtgttataaagggtagagacagctgtcatagaatacatgtaaacctaactgtttttgaaaaacattggtgtgacacttccataggtggtttaccaaatttatcagatgagtacaagcaaatattacatcttggaaaagatgatagtctcacatgtcatctgcacttcccgaagagttgtgttttgggtccaataaagtggtataaggactgtaacgagattaaaggggagcgg

SEQ ID NO: 143776 - DNA, 1484 bp, Homo sapiens
  Payload ID: 8409
  Gene Symbol: IL1RL2
  Gene Name: interleukin 1 receptor-like 2
  Uniprot ID: Q9HB29
  ENST ID: ENST00000441515
  CDS Start-End: 1-1374
atgacagggctcgtgtccctgtcatattttccactctccacgaggtcctgcgcgcttcaatcctgcagcccggtttggggatgtggtccttgctgctctgcgggttgtccatcgcccttccactgtctgtcacagcaggactgtaacgagattaaaggggagcggttcactgttttggaaaccaggcttttggtgagcaatgtctcggcagaggacagagggaactacgcgtgtcaagccatactgacacactcagggaagcagtacgaggttttaaatggcatcactgtgagcattaaaagagctggatatggaggaagtgtccctaaaatcatttatccaaaaaatcattcaattgaagtacagcttggtaccactctgattgtggactgcaatgtaacagacaccaaggataatacaaatctacgatgctggagagtcaataacactttggtggatgattactatgatgaatccaaacgaatcagagaaggggtggaaacccatgtctcttttcgggaacataatttgtacacagtaaacatcaccttcttggaagtgaaaatggaagattatggccttcctttcatgtgccacgctggagtgtccacagcatacattatattacagctcccagctccggattttcgagcttacttgataggagggcttatcgccttggtggctgtggctgtgtctgttgtgtacatatacaacatttttaagatcgacattgttctttggtatcgaagtgccttccattctacagagaccatagtagatgggaagctgtatgacgcctatgtcttataccccaagccccacaaggaaagccagaggcatgccgtggatgccctggtgttgaatatcctgcccgaggtgttggagagacaatgtggatataagttgtttatattcggcagagatgaattccctggacaagccgtggccaatgtcatcgatgaaaacgttaagctgtgcaggaggctgattgtcattgtggtccccgaatcgctgggctttggcctgttgaagaacctgtcagaagaacaaatcgcggtctacagtgccctgatccaggacgggatgaaggttattctcattgagctggagaaaatcgaggactacacagtcatgccagagtcaattcagtacatcaaacagaagcatggtgccatccggtggcatggggacttcacggagcagtcacagtgtatgaagaccaagttttggaagacagtgagataccacatgccgcccagaaggtgtcggccgtttcctccggtccagctgctgcagcacacaccttgctaccgcaccgcaggcccagaactaggctcaagaagaaagaagtgtactctcacgactggctaagacttgctggactgacacctatggctggaagatgacttgttttgctccatgtctcctcattcctacacctattttctgctgcaggatgaggctagggttagcattctaga

SEQ ID NO: 143777 - DNA, 2124 bp, Homo sapiens
  Payload ID: 8410
  Gene Symbol: IL1A
  Gene Name: interleukin 1, alpha
  Uniprot ID: P01583
  ENST ID: ENST00000263339
  CDS Start-End: 157-972
ttccctgtaaattccccgttttgacgacgcacttgtagccacgtagccacgcctacttaagacaattacaaaaggcgaagaagactgactcaggcttaagctgccagccagagagggagtcatttcattggcgtttgagtcagcaaagaagtcaagatggccaaagttccagacatgtttgaagacctgaagaactgttacagtgaaaatgaagaagacagttcctccattgatcatctgtctctgaatcagaaatccttctatcatgtaagctatggcccactccatgaaggctgcatggatcaatctgtgtctctgagtatctctgaaacctctaaaacatccaagcttaccttcaaggagagcatggtggtagtagcaaccaacgggaaggttctgaagaagagacggttgagtttaagccaatccatcactgatgatgacctggaggccatcgccaatgactcagaggaagaaatcatcaagcctaggtcagcaccttttagcttcctgagcaatgtgaaatacaactttatgaggatcatcaaatacgaattcatcctgaatgacgccctcaatcaaagtataattcgagccaatgatcagtacctcacggctgctgcattacataatctggatgaagcagtgaaatttgacatgggtgcttataagtcatcaaaggatgatgctaaaattaccgtgattctaagaatctcaaaaactcaattgtatgtgactgcccaagatgaagaccaaccagtgctgctgaaggagatgcctgagatacccaaaaccatcacaggtagtgagaccaacctcctcttcttctgggaaactcacggcactaagaactatttcacatcagttgcccatccaaacttgtttattgccacaaagcaagactactgggtgtgcttggcaggggggccaccctctatcactgactttcagatactggaaaaccaggcgtaggtctggagtctcacttgtctcacttgtgcagtgttgacagttcatatgtaccatgtacatgaagaagctaaatcctttactgttagtcatttgctgagcatgtactgagccttgtaattctaaatgaatgtttacactctttgtaagagtggaaccaacactaacatataatgttgttatttaaagaacaccctatattttgcatagtaccaatcattttaattattattcttcataacaattttaggaggaccagagctactgactatggctaccaaaaagactctacccatattacagatgggcaaattaaggcataagaaaactaagaaatatgcacaatagcagttgaaacaagaagccacagacctaggatttcatgatttcatttcaactgtttgccttctacttttaagttgctgatgaactcttaatcaaatagcataagtttctgggacctcagttttatcattttcaaaatggagggaataatacctaagccttcctgccgcaacagttttttatgctaatcagggaggtcattttggtaaaatacttcttgaagccgagcctcaagatgaaggcaaagcacgaaatgttattttttaattattatttatatatgtatttataaatatatttaagataattataatatactatatttatgggaaccccttcatcctctgagtgtgaccaggcatcctccacaatagcagacagtgttttctgggataagtaagtttgatttcattaatacagggcattttggtccaagttgtgcttatcccatagccaggaaactctgcattctagtacttgggagacctgtaatcatataataaatgtacattaattaccttgagccagtaattggtccgatctttgactcttttgccattaaacttacctgggcattcttgtttcaattccacctgcaatcaagtcctacaagctaaaattagatgaactcaactttgacaaccatgagaccactgttatcaaaactttcttttctggaatgtaatcaatgtttcttctaggttctaaaaattgtgatcagaccataatgttacattattatcaacaatagtgattgatagagtgttatcagtcataactaaataaagcttgcaacaaaattctctgaca

SEQ ID NO: 143778 - DNA, 1631 bp, Homo sapiens
  Payload ID: 8411
  Gene Symbol: IL1B
  Gene Name: interleukin 1, beta
  Uniprot ID: P01584
  ENST ID: ENST00000263341
  CDS Start-End: 212-1021
accaatactcttttcccctttcctttaacttgattgtgaaatcaggtattcaacagagaaatttctcagcctcctacttctgcttttgaaagccataaaaacagcgagggagaaactggcagataccaaacctcttcgaggcacaaggcacaacaggctgctctgggattctcttcagccaatcttcattgctcaagtgtctgaagcagccatggcagaagtacctgagctcgccagtgaaatgatggcttattacagtggcaatgaggatgacttgttctttgaagctgatggccctaaacagatgaagtgctccttccaggacctggacctctgccctctggatggcggcatccagctacgaatctccgaccaccactacagcaagggcttcaggcaggccgcgtcagttgttgtggccatggacaagctgaggaagatgctggttccctgcccacagaccttccaggagaatgacctgagcaccttctttcccttcatctttgaagaagaacctatcttcttcgacacatgggataacgaggcttatgtgcacgatgcacctgtacgatcactgaactgcacgctccgggactcacagcaaaaaagcttggtgatgtctggtccatatgaactgaaagctctccacctccagggacaggatatggagcaacaagtggtgttctccatgtcctttgtacaaggagaagaaagtaatgacaaaatacctgtggccttgggcctcaaggaaaagaatctgtacctgtcctgcgtgttgaaagatgataagcccactctacagctggagagtgtagatcccaaaaattacccaaagaagaagatggaaaagcgatttgtcttcaacaagatagaaatcaataacaagctggaatttgagtctgcccagttccccaactggtacatcagcacctctcaagcagaaaacatgcccgtcttcctgggagggaccaaaggcggccaggatataactgacttcaccatgcaatttgtgtcttcctaaagagagctgtacccagagagtcctgtgctgaatgtggactcaatccctagggctggcagaaagggaacagaaaggtttttgagtacggctatagcctggactttcctgttgtctacaccaatgcccaactgcctgccttagggtagtgctaagaggatctcctgtccatcagccaggacagtcagctctctcctttcagggccaatccccagcccttttgttgagccaggcctctctcacctctcctactcacttaaagcccgcctgacagaaaccacggccacatttggttctaagaaaccctctgtcattcgctcccacattctgatgagcaaccgcttccctatttatttatttatttgtttgtttgttttattcattggtctaatttattcaaagggggcaagaagtagcagtgtctgtaaaagagcctagtttttaatagctatggaatcaattcaatttggactggtgtgctctctttaaatcaagtcctttaattaagactgaaaatatataagctcagattatttaaatgggaatatttataaatgagcaaatatcatactgttcaatggttctgaaataaacttcactgaagaaaaaaaaa

SEQ ID NO: 143779 - DNA, 580 bp, Homo sapiens
  Payload ID: 8411
  Gene Symbol: IL1B
  Gene Name: interleukin 1, beta
  ENST ID: ENST00000416750
  CDS Start-End: 248-580
actttaatcttccttacaactaggtgctaagggagtctctctgtctctctgcctctttgtgtgtatgcatattctctctctctctctctttctttctctgtctctccctctccttccctctctgcctccctctctcagctttttgcaaaaatgccaggtgtaatataatgcttatgactcgggaaatattctgggaatggatactgcttatctaacagctgacaccctaaaggtgtctgaagcagccatggcagaagtacctgagctcgccagtgaaatgatggcttattacagtggcaatgaggatgacttgttctttgaagctgatggccctaaacagatgaagtgctccttccaggacctggacctctgccctctggatggcggcatccagctacgaatctccgaccaccactacagcaagggcttcaggcaggccgcgtcagttgttgtggccatggacaagctgaggaagatgctggttccctgcccacagaccttccaggagaatgacctgagcaccttctttcccttcatctttgaagaagaacctatcttcttcgacacatgggataacgag

SEQ ID NO: 143780 - DNA, 581 bp, Homo sapiens
  Payload ID: 8411
  Gene Symbol: IL1B
  Gene Name: interleukin 1, beta
  ENST ID: ENST00000418817
  CDS Start-End: 153-581
gaaagccataaaaacagcgagggagaaactggcagataccaaacctcttcgaggcacaaggcacaacaggctgctctgggattctcttcagccaatcttcattgctcaagtatgactttaatcttccttacaactaggtgtctgaagcagccatggcagaagtacctgagctcgccagtgaaatgatggcttattacagtggcaatgaggatgacttgttctttgaagctgatggccctaaacagatgaagtgctccttccaggacctggacctctgccctctggatggcggcatccagctacgaatctccgaccaccactacagcaagggcttcaggcaggccgcgtcagttgttgtggccatggacaagctgaggaagatgctggttccctgcccacagaccttccaggagaatgacctgagcaccttctttcccttcatctttgaagaagaacctatcttcttcgacacatgggataacgaggcttatgtgcacgatgcacctgtacgatcactgaactgcacgctccgggactcacagcaaaaaagcttggtgatgtctggtccatatgaactgaaa

SEQ ID NO: 143781 - DNA, 581 bp, Homo sapiens
  Payload ID: 8411
  Gene Symbol: IL1B
  Gene Name: interleukin 1, beta
  ENST ID: ENST00000432018
  CDS Start-End: 206-581
aatacattgctagttggggtttggtttagcaaatgcttttctctagacccaaaggacttctctttcacacattcattcatttactcagagatcatttctttgcatgactgccatgcactggatgctgagagaaatcacacatgaacgtagccgtcatggggaagtcactcattttctcctttttacacaggtgtctgaagcagccatggcagaagtacctgagctcgccagtgaaatgatggcttattacagtggcaatgaggatgacttgttctttgaagctgatggccctaaacagatgaagtgctccttccaggacctggacctctgccctctggatggcggcatccagctacgaatctccgaccaccactacagcaagggcttcaggcaggccgcgtcagttgttgtggccatggacaagctgaggaagatgctggttccctgcccacagaccttccaggagaatgacctgagcaccttctttcccttcatctttgaagaagaacctatcttcttcgacacatgggataacgaggcttatgtgcacgatgcacctgtacgatcactgaactgcacgc

SEQ ID NO: 143782 - DNA, 1630 bp, Homo sapiens
  Payload ID: 8412
  Gene Symbol: IL10
  Gene Name: interleukin 10
  Uniprot ID: P22301
  ENST ID: ENST00000423557
  CDS Start-End: 60-596
acacatcaggggcttgctcttgcaaaaccaaaccacaagacagacttgcaaaagaaggcatgcacagctcagcactgctctgttgcctggtcctcctgactggggtgagggccagcccaggccagggcacccagtctgagaacagctgcacccacttcccaggcaacctgcctaacatgcttcgagatctccgagatgccttcagcagagtgaagactttctttcaaatgaaggatcagctggacaacttgttgttaaaggagtccttgctggaggactttaagggttacctgggttgccaagccttgtctgagatgatccagttttacctggaggaggtgatgccccaagctgagaaccaagacccagacatcaaggcgcatgtgaactccctgggggagaacctgaagaccctcaggctgaggctacggcgctgtcatcgatttcttccctgtgaaaacaagagcaaggccgtggagcaggtgaagaatgcctttaataagctccaagagaaaggcatctacaaagccatgagtgagtttgacatcttcatcaactacatagaagcctacatgacaatgaagatacgaaactgagacatcagggtggcgactctatagactctaggacataaattagaggtctccaaaatcggatctggggctctgggatagctgacccagccccttgagaaaccttattgtacctctcttatagaatatttattacctctgatacctcaacccccatttctatttatttactgagcttctctgtgaacgatttagaaagaagcccaatattataatttttttcaatatttattattttcacctgtttttaagctgtttccatagggtgacacactatggtatttgagtgttttaagataaattataagttacataagggaggaaaaaaaatgttctttggggagccaacagaagcttccattccaagcctgaccacgctttctagctgttgagctgttttccctgacctccctctaatttatcttgtctctgggcttggggcttcctaactgctacaaatactcttaggaagagaaaccagggagcccctttgatgattaattcaccttccagtgtctcggagggattcccctaacctcattccccaaccacttcattcttgaaagctgtggccagcttgttatttataacaacctaaatttggttctaggccgggcgcggtggctcacgcctgtaatcccagcactttgggaggctgaggcgggtggatcacttgaggtcaggagttcctaaccagcctggtcaacatggtgaaaccccgtctctactaaaaatacaaaaattagccgggcatggtggcgcgcacctgtaatcccagctacttgggaggctgaggcaagagaattgcttgaacccaggagatggaagttgcagtgagctgatatcatgcccctgtactccagcctgggtgacagagcaagactctgtctcaaaaaataaaaataaaaataaatttggttctaatagaactcagttttaactagaatttattcaattcctctgggaatgttacattgtttgtctgtcttcatagcagattttaattttgaataaataaatgtatcttattcacatca

SEQ ID NO: 143783 - DNA, 3695 bp, Homo sapiens
  Payload ID: 8413
  Gene Symbol: IL10RA
  Gene Name: interleukin 10 receptor, alpha
  Uniprot ID: Q13651
  ENST ID: ENST00000227752
  CDS Start-End: 121-1857
gacgtcagccctgcggggcgctggcggagcgggcggcggagctgtcagtcccagcccaagggtagctggaggcgcgcaggccggctccgctccggccccggacgatgcggcgcgcccaggatgctgccgtgcctcgtagtgctgctggcggcgctcctcagcctccgtcttggctcagacgctcatgggacagagctgcccagccctccgtctgtgtggtttgaagcagaatttttccaccacatcctccactggacacccatcccaaatcagtctgaaagtacctgctatgaagtggcgctcctgaggtatggaatagagtcctggaactccatctccaactgtagccagaccctgtcctatgaccttaccgcagtgaccttggacctgtaccacagcaatggctaccgggccagagtgcgggctgtggacggcagccggcactccaactggaccgtcaccaacacccgcttctctgtggatgaagtgactctgacagttggcagtgtgaacctagagatccacaatggcttcatcctcgggaagattcagctacccaggcccaagatggcccccgcaaatgacacatatgaaagcatcttcagtcacttccgagagtatgagattgccattcgcaaggtgccgggaaacttcacgttcacacacaagaaagtaaaacatgaaaacttcagcctcctaacctctggagaagtgggagagttctgtgtccaggtgaaaccatctgtcgcttcccgaagtaacaaggggatgtggtctaaagaggagtgcatctccctcaccaggcagtatttcaccgtgaccaacgtcatcatcttctttgcctttgtcctgctgctctccggagccctcgcctactgcctggccctccagctgtatgtgcggcgccgaaagaagctacccagtgtcctgctcttcaagaagcccagccccttcatcttcatcagccagcgtccctccccagagacccaagacaccatccacccgcttgatgaggaggcctttttgaaggtgtccccagagctgaagaacttggacctgcacggcagcacagacagtggctttggcagcaccaagccatccctgcagactgaagagccccagttcctcctccctgaccctcacccccaggctgacagaacgctgggaaacagggagccccctgtgctgggggacagctgcagtagtggcagcagcaatagcacagacagcgggatctgcctgcaggagcccagcctgagccccagcacagggcccacctgggagcaacaggtggggagcaacagcaggggccaggatgacagtggcattgacttagttcaaaactctgagggccgggctggggacacacagggtggctcggccttgggccaccacagtcccccggagcctgaggtgcctggggaagaagacccagctgctgtggcattccagggttacctgaggcagaccagatgtgctgaagagaaggcaaccaagacaggctgcctggaggaagaatcgcccttgacagatggccttggccccaaattcgggagatgcctggttgatgaggcaggcttgcatccaccagccctggccaagggctatttgaaacaggatcctctagaaatgactctggcttcctcaggggccccaacgggacagtggaaccagcccactgaggaatggtcactcctggccttgagcagctgcagtgacctgggaatatctgactggagctttgcccatgaccttgcccctctaggctgtgtggcagccccaggtggtctcctgggcagctttaactcagacctggtcaccctgcccctcatctctagcctgcagtcaagtgagtgactcgggctgagaggctgcttttgattttagccatgcctgctcctctgcctggaccaggaggagggcccctggggcagaagttaggcacgaggcagtctgggcacttttctgcaagtccactggggctggccccagccaggccctgcagggctggtcagggtgtctggggcaggaggaggccaactcactgaactagtgcagggtatgtgggtggcactgacctgttctgttgactggggccctgcagactctggcagagctgagaagggcagggaccttctccctcctaggaactctttcctgtatcataaaggattatttgctcaggggaaccatggggctttctggagttgtggtgaggccaccaggctgaagtcagctcagacccagacctccctgcttaggccactcgagcatcagagcttccagcaggaggaagggctgtaggaatggaagcttcagggccttgctgctggggtcatttttaggggaaaaaggaggatatgatggtcacatggggaacctcccctcatcgggcctctggggcaggaagcttgtcactggaagatcttaaggtatatattttctggacactcaaacacatcataatggattcactgaggggagacaaagggagccgagaccctggatggggcttccagctcagaacccatccctctggtgggtacctctggcacccatctgcaaatatctccctctctccaacaaatggagtagcatccccctggggcacttgctgaggccaagccactcacatcctcactttgctgccccaccatcttgctgacaacttccagagaagccatggttttttgtattggtcataactcagccctttgggcggcctctgggcttgggcaccagctcatgccagccccagagggtcagggttggaggcctgtgcttgtgtttgctgctaatgtccagctacagacccagaggataagccactgggcactgggctggggtccctgccttgttggtgttcagctgtgtgattttggactagccacttgtcagagggcctcaatctcccatctgtgaaataaggactccacctttaggggaccctccatgtttgctgggtattagccaagctggtcctgggagaatgcagatactgtccgtggactaccaagctggcttgtttcttatgccagaggctaacagatccaatgggagtccatggtgtcatgccaagacagtatcagacacagccccagaagggggcattatgggccctgcctccccataggccatttggactctgccttcaaacaaaggcagttcagtccacaggcatggaagctgtgaggggacaggcctgtgcgtgccatccagagtcatctcagccctgcctttctctggagcattctgaaaacagatattctggcccagggaatccagccatgacccccacccctctgccaaagtactcttaggtgccagtctggtaactgaactccctctggaggcaggcttgagggaggattcctcagggttcccttgaaagctttatttatttattttgttcatttatttattggagaggcagcattgcacagtgaaagaattctggatatctcaggagccccgaaattctagctctgactttgctgtttccagtggtatgaccttggagaagtcacttatcctcttggagcctcagtttcctcatctgcagaataatgactgacttgtctaattcgtagggatgtgaggttctgctgaggaaatgggtatgaatgtgccttgaacacaaagctctgtcaataagtgatacatgttttttattccaataaattgtcaagaccaca

SEQ ID NO: 143784 - DNA, 1779 bp, Homo sapiens
  Payload ID: 8413
  Gene Symbol: IL10RA
  Gene Name: interleukin 10 receptor, alpha
  ENST ID: ENST00000526544
  CDS Start-End: 75-359
agtcccagcccaagggtagctggaggcgcgcaggccggctccgctccggccccggacgatgcggcgcgcccaggatgctgccgtgcctcgtagtgctgctggcggcgctcctcagcctccgtcttggctcagacgctcatgggacagagctgcccagccctccgtctgtgtggtttgaagcagaatttttccaccacatcctccactggacacccatcccaaatcagtctgaaagtacctgctatgaagtggcgctcctgagtgactctgacagttggcagtgtgaacctagagatccacaatggcttcatcctcgggaagattcagctacccaggcccaagatggcccccgcaaatgacacatatgaaagcatcttcagtcacttccgagagtatgagattgccattcgcaaggtgccgggaaacttcacgttcacacacaagaaagtaaaacatgaaaacttcagcctcctaacctctggagaagtgggagagttctgtgtccaggtgaaaccatctgtcgcttcccgaagtaacaaggggatgtggtctaaagaggagtgcatctccctcaccaggcagtatttcaccgtgaccaacgtcatcatcttctttgcctttgtcctgctgctctccggagccctcgcctactgcctggccctccagctgtatgtgcggcgccgaaagaagctacccagtgtcctgctcttcaagaagcccagccccttcatcttcatcagccagcgtccctccccagagacccaagacaccatccacccgcttgatgaggaggcctttttgaaggtgtccccagagctgaagaacttggacctgcacggcagcacagacagtggctttggcagcaccaagccatccctgcagactgaagagccccagttcctcctccctgaccctcacccccaggctgacagaacgctgggaaacagggagccccctgtgctgggggacagctgcagtagtggcagcagcaatagcacagacagcgggatctgcctgcaggagcccagcctgagccccagcacagggcccacctgggagcaacaggtggggagcaacagcaggggccaggatgacagtggcattgacttagttcaaaactctgagggccgggctggggacacacagggtggctcggccttgggccaccacagtcccccggagcctgaggtgcctggggaagaagacccagctgctgtggcattccagggttacctgaggcagaccagatgtgctgaagagaaggcaaccaagacaggctgcctggaggaagaatcgcccttgacagatggccttggccccaaattcgggagatgcctggttgatgaggcaggcttgcatccaccagccctggccaagggctatttgaaacaggatcctctagaaatgactctggcttcctcaggggccccaacgggacagtggaaccagcccactgaggaatggtcactcctggccttgagcagctgcagtgacctgggaatatctgactggagctttgcccatgaccttgcccctctaggctgtgtggcagccccaggtggtctcctgggcagctttaactcagacctggtcaccctgcccctcatctctagcctgcagtcaagtgagtgactcgggctgagaggctgcttttgattttagccatgcctgctcctctgcctggaccaggaggagggcccctggggcagaagttaggcacgaggcagtctgggcacttttctgcaagtccactggggctggccccagccaggccctgca

SEQ ID NO: 143785 - DNA, 2275 bp, Homo sapiens
  Payload ID: 8413
  Gene Symbol: IL10RA
  Gene Name: interleukin 10 receptor, alpha
  ENST ID: ENST00000534574
  CDS Start-End: 75-341
agtcccagcccaagggtagctggaggcgcgcaggccggctccgctccggccccggacgatgcggcgcgcccaggatgctgccgtgcctcgtagtgctgctggcggcgctcctcagcctccgtcttggctcagacgctcatgtggagagccctggctggctggccctctggcagagcggtgcccgggtgctcccttactctggcaaacctggatctcaggctcacctgttgtggaagtggaagaggctgaaattgacaggaactgacggattgggaaggatagagaagtatgcgcaaggccaaacccccaacccgcaaacctcatcatccacccacttctagatgagccggacagagctgcccagccctccgtctgtgtggtttgaagcagaatttttccaccacatcctccactggacacccatcccaaatcagtctgaaagtacctgctatgaagtggcgctcctgaggtatggaatagagtcctggaactccatctccaactgtagccagaccctgtcctatgaccttaccgcagtgaccttggacctgtaccacagcaatggctaccgggccagagtgcgggctgtggacggcagccggcactccaactggaccgtcaccaacacccgcttctctgtggatgaagtgactctgacagttggcagtgtgaacctagagatccacaatggcttcatcctcgggaagattcagctacccaggcccaagatggcccccgcaaatgacacatatgaaagcatcttcagtcacttccgagagtatgagattgccattcgcaaggtgccgggaaacttcacgttcacacacaagaaagtaaaacatgaaaacttcagcctcctaacctctggagaagtgggagagttctgtgtccaggtgaaaccatctgtcgcttcccgaagtaacaaggggatgtggtctaaagaggagtgcatctccctcaccaggcagtatttcaccgtgaccaacgtcatcatcttctttgcctttgtcctgctgctctccggagccctcgcctactgcctggccctccagctgtatgtgcggcgccgaaagaagctacccagtgtcctgctcttcaagaagcccagccccttcatcttcatcagccagcgtccctccccagagacccaagacaccatccacccgcttgatgaggaggcctttttgaaggtgtccccagagctgaagaacttggacctgcacggcagcacagacagtggctttggcagcaccaagccatccctgcagactgaagagccccagttcctcctccctgaccctcacccccaggctgacagaacgctgggaaacagggagccccctgtgctgggggacagctgcagtagtggcagcagcaatagcacagacagcgggatctgcctgcaggagcccagcctgagccccagcacagggcccacctgggagcaacaggtggggagcaacagcaggggccaggatgacagtggcattgacttagttcaaaactctgagggccgggctggggacacacagggtggctcggccttgggccaccacagtcccccggagcctgaggtgcctggggaagaagacccagctgctgtggcattccagggttacctgaggcagaccagatgtgctgaagagaaggcaaccaagacaggctgcctggaggaagaatcgcccttgacagatggccttggccccaaattcgggagatgcctggttgatgaggcaggcttgcatccaccagccctggccaagggctatttgaaacaggatcctctagaaatgactctggcttcctcaggggccccaacgggacagtggaaccagcccactgaggaatggtcactcctggccttgagcagctgcagtgacctgggaatatctgactggagctttgcccatgaccttgcccctctaggctgtgtggcagccccaggtggtctcctgggcagctttaactcagacctggtcaccctgcccctcatctctagcctgcagtcaagtgagtgactcgggctgagaggctgcttttgattttagccatgcctgctcctctgcctggaccaggaggagggcccctggggcagaagttaggcacgaggcagtctgggcacttttctgcaagtccactggggctggccccagccaggccctgcagggctggtcagggtgtctggggcaggaggaggccaactcactgaactagtgcagggtatgtgggtggcactgacctgttctgttgactggggccctgcagactctggcag

SEQ ID NO: 143786 - DNA, 1963 bp, Homo sapiens
  Payload ID: 8414
  Gene Symbol: IL10RB
  Gene Name: interleukin 10 receptor, beta
  Uniprot ID: Q08334
  ENST ID: ENST00000290200
  CDS Start-End: 109-1086
gccccgcccatctccgctggttcccggaagccgccgcggacaagctctcccgggcgcgggcgggggtcgtgtgcttggaggaagccgcggaacccccagcgtccgtccatggcgtggagccttgggagctggctgggtggctgcctgctggtgtcagcattgggaatggtaccacctcccgaaaatgtcagaatgaattctgttaatttcaagaacattctacagtgggagtcacctgcttttgccaaagggaacctgactttcacagctcagtacctaagttataggatattccaagataaatgcatgaatactaccttgacggaatgtgatttctcaagtctttccaagtatggtgaccacaccttgagagtcagggctgaatttgcagatgagcattcagactgggtaaacatcaccttctgtcctgtggatgacaccattattggaccccctggaatgcaagtagaagtacttgctgattctttacatatgcgtttcttagcccctaaaattgagaatgaatacgaaacttggactatgaagaatgtgtataactcatggacttataatgtgcaatactggaaaaacggtactgatgaaaagtttcaaattactccccagtatgactttgaggtcctcagaaacctggagccatggacaacttattgtgttcaagttcgagggtttcttcctgatcggaacaaagctggggaatggagtgagcctgtctgtgagcaaacaacccatgacgaaacggtcccctcctggatggtggccgtcatcctcatggcctcggtcttcatggtctgcctggcactcctcggctgcttcgccttgctgtggtgcgtttacaagaagacaaagtacgccttctcccctaggaattctcttccacagcacctgaaagagtttttgggccatcctcatcataacacacttctgtttttctcctttccattgtcggatgagaatgatgtttttgacaagctaagtgtcattgcagaagactctgagagcggcaagcagaatcctggtgacagctgcagcctcgggaccccgcctgggcaggggccccaaagctaggctctgagaaggaaacacactcggctgggcacagtgacgtactccatctcacatctgcctcagtgagggatcagggcagcaaacaagggccaagaccatctgagccagccccacatctagaactcccagaccctggacttagccaccagagagctacattttaaaggctgtcttggcaaaaatactccatttgggaactcactgccttataaaggctttcatgatgttttcagaagttggccactgagagtgtaattttcagccttttatatcactaaaataagatcatgttttaattgtgagaaacagggccgagcacagtggctcacgcctgtaataccagcaccttagaggtcgaggcaggcggatcacttgaggtcaggagttcaagaccagcctggccaatatggtgaaacccagtctctactaaaaatacaaaaattagctaggcatgatggcgcatgcctataatcccagctactcgagtgcctgaggcaggagaattgcatgaacccgggaggaggaggaggaggttgcagtgagccgagatagcggcactgcactccagcctgggtgacaaagtgagactccatctcaaaaaaaaaaaaaaaaaaaattgtgagaaacagaaatacttaaaatgaggaataagaatggagatgttacatctggtagatgtaacattctaccagattatggatggactgatctgaaaatcgacctcaactcaagggtggtcagctcaatgctacacagagcacggacttttggattctttgcagtactttgaatttatttttctacctatatatgttttatatgctgctggtgctccattaaagttttactctgtgttgcactatatgtgttcatgata

SEQ ID NO: 143787 - DNA, 898 bp, Homo sapiens
  Payload ID: 8414
  Gene Symbol: IL10RB
  Gene Name: interleukin 10 receptor, beta
  ENST ID: ENST00000451065
  CDS Start-End: 1-651
gataaatgcatgaatactaccttgacggaatgtgatttctcaagtctttccaagtatggtgaccacaccttgagagtcagggctgaatttgcagatgagcattcagactgggtaaacatcaccttctgtcctgtggatgacaccattattggaccccctggaatgcaagtagaagtacttgctgattctttacatatgcgtttcttagcccctaaaattgagaatgaatacgaaacttggactatgaagaatgtgtataactcatggacttataatgtgcaatactggaaaaacggtactgatgaaaagtttcaaattactccccagtatgactttgaggtcctcagaaacctggagccatggacaacttattgtgttcaagttcgagggtttcttcctgatcggaacaaagctggggaatggagtgagcctgtctgtgagcaaacaacccatgacgaaacggtcccctcctggatggtggccgtcatcctcatggcctcggtcttcatggtctgcctggcactcctcggctgcttcgccttgctgtggtgcgtttacaagaagacaaagtacgccttctcccctaggaattctcttccacagcacctgaaagagagaaactggtcagacaggaaagaacagacggaatgaacggtagaggggcctgctggcataagctctcacctccgaggctagaagactttgcagacttgaccgtggagccagccccttttttgggccatcctcatcataacacacttctgtttttctcctttccattgtcggatgagaatgatgtttttgacaagctaagtgtcattgcagaagactctgagagcggcaagcagaatcctggtgacagctgcagcctcgggaccccgcctgggcaggggcccca

SEQ ID NO: 143788 - DNA, 786 bp, Homo sapiens
  Payload ID: 8414
  Gene Symbol: IL10RB
  Gene Name: interleukin 10 receptor, beta
  ENST ID: ENST00000422891
  CDS Start-End: 85-300
cggaagccgccgcggacaagctctcccgggcgcgggcgggggtcgtgtgcttggaggaagccgcggaacccccagcgtccgtccatggcgtggagccttgggagctggctgggtggctgcctgctggtgtcagcattgggaatggtaccacctcccgaaaatgtcagaatgaattctgttaatttcaagaacattctacagtgggagtcacctgcttttgccaaagggaacctgactttcacagctcagtacctaagccattattggaccccctggaatgcaagtagaagtacttgctgattctttacatatgcgtttcttagcccctaaaattgagaatgaatacgaaacttggactatgaagaatgtgtataactcatggacttataatgtgcaatactggaaaaacggtactgatgaaaagtttcaaattactccccagtatgactttgaggtcctcagaaacctggagccatggacaacttattgtgttcaagttcgagggtttcttcctgatcggaacaaagctggggaatggagtgagcctgtctgtgagcaaacaacccatgacgaaacggtcccctcctggatggtggccgtcatcctcatggcctcggtcttcatggtctgcctggcactcctcggctgcttcgccttgctgtggtgcgtttacaagaagacaaagtacgccttctcccctaggaattctcttccacagcacctgaaagagtttttgggccatcctcatcataacacacttctgtttttctcctttccattgtcgga

SEQ ID NO: 143789 - DNA, 2281 bp, Homo sapiens
  Payload ID: 8415
  Gene Symbol: IL11
  Gene Name: interleukin 11
  Uniprot ID: P20809
  ENST ID: ENST00000264563
  CDS Start-End: 64-663
gaagggttaaaggcccccggctccctgccccctgccctggggaacccctggccctgtggggacatgaactgtgtttgccgcctggtcctggtcgtgctgagcctgtggccagatacagctgtcgcccctgggccaccacctggcccccctcgagtttccccagaccctcgggccgagctggacagcaccgtgctcctgacccgctctctcctggcggacacgcggcagctggctgcacagctgagggacaaattcccagctgacggggaccacaacctggattccctgcccaccctggccatgagtgcgggggcactgggagctctacagctcccaggtgtgctgacaaggctgcgagcggacctactgtcctacctgcggcacgtgcagtggctgcgccgggcaggtggctcttccctgaagaccctggagcccgagctgggcaccctgcaggcccgactggaccggctgctgcgccggctgcagctcctgatgtcccgcctggccctgccccagccacccccggacccgccggcgcccccgctggcgcccccctcctcagcctgggggggcatcagggccgcccacgccatcctgggggggctgcacctgacacttgactgggccgtgaggggactgctgctgctgaagactcggctgtgacccggggcccaaagccaccaccgtccttccaaagccagatcttatttatttatttatttcagtactgggggcgaaacagccaggtgatccccccgccattatctccccctagttagagacagtccttccgtgaggcctggggggcatctgtgccttatttatacttatttatttcaggagcaggggtgggaggcaggtggactcctgggtccccgaggaggaggggactggggtcccggattcttgggtctccaagaagtctgtccacagacttctgccctggctcttccccatctaggcctgggcaggaacatatattatttatttaagcaattacttttcatgttggggtggggacggaggggaaagggaagcctgggtttttgtacaaaaatgtgagaaacctttgtgagacagagaacagggaattaaatgtgtcatacatatccacttgagggcgatttgtctgagagctggggctggatgcttgggtaactggggcagggcaggtggaggggagacctccattcaggtggaggtcccgagtgggcggggcagcgactgggagatgggtcggtcacccagacagctctgtggaggcagggtctgagccttgcctggggccccgcactgcatagggccttttgtttgttttttgagatggagtctcgctctgttgcctaggctggagtgcagtgaggcaatctgaggtcactgcaacctccacctcccgggttcaagcaattctcctgcctcagcctcccgattagctgggatcacaggtgtgcaccaccatgcccagctaattatttatttcttttgtatttttagtagagacagggtttcaccatgttggccaggctggtttcgaactcctgacctcaggtgatcctcctgcctcggcctcccaaagtgctgggattacaggtgtgagccaccacacctgacccataggtcttcaataaatatttaatggaaggttccacaagtcaccctgtgatcaacagtacccgtatgggacaaagctgcaaggtcaagatggttcattatggctgtgttcaccatagcaaactggaaacaatctagatatccaacagtgagggttaagcaacatggtgcatctgtggatagaacgccacccagccgcccggagcagggactgtcattcagggaggctaaggagagaggcttgcttgggatatagaaagatatcctgacattggccaggcatggtggctcacgcctgtaatcctggcactttgggaggacgaagcgagtggatcactgaagtccaagagttcgagaccggcctgcgagacatggcaaaaccctgtctcaaaaaagaaagaatgatgtcctgacatgaaacagcaggctacaaaaccactgcatgctgtgatcccaattttgtgtttttctttctatatatggattaaaacaaaaatcctaaagggaaatacgccaaaatgttgacaatgactgtctccaggtcaaaggagagaggtgggattgtgggtgacttttaatgtgtatgattgtctgtattttacagaatttctgccatgactgtgtattttgcatgacacattttaaaaataataaacactatttttagaat

SEQ ID NO: 143790 - DNA, 1028 bp, Homo sapiens
  Payload ID: 8415
  Gene Symbol: IL11
  Gene Name: interleukin 11
  Uniprot ID: P20809
  ENST ID: ENST00000590625
  CDS Start-End: 218-580
actgccgcggccctgctgctcagggcacatgcctcccctccccaggccgcggcccagctgaccctcggggctcccccggcagcggacagggaagggttaaaggcccccggctccctgccccctgccctggggaacccctggccctgtggggacatgaactagggacaaattcccagctgacggggaccacaacctggattccctgcccaccctggccatgagtgcgggggcactgggagctctacagctcccaggtgtgctgacaaggctgcgagcggacctactgtcctacctgcggcacgtgcagtggctgcgccgggcaggtggctcttccctgaagaccctggagcccgagctgggcaccctgcaggcccgactggaccggctgctgcgccggctgcagctcctgatgtcccgcctggccctgccccagccacccccggacccgccggcgcccccgctggcgcccccctcctcagcctgggggggcatcagggccgcccacgccatcctgggggggctgcacctgacacttgactgggccgtgaggggactgctgctgctgaagactcggctgtgacccggggcccaaagccaccaccgtccttccaaagccagatcttatttatttatttatttcagtactgggggcgaaacagccaggtgatccccccgccattatctccccctagttagagacagtccttccgtgaggcctggggggcatctgtgccttatttatacttatttatttcaggagcaggggtgggaggcaggtggactcctgggtccccgaggaggaggggactggggtcccggattcttgggtctccaagaagtctgtccacagacttctgccctggctcttccccatctaggcctgggcaggaacatatattatttatttaagcaattacttttcatgttggggtggggacggaggggaaagggaagcctgggtttttgtacaaaaatgtgagaaacctttgtgagacagagaacagggaattaaatgtgtcatacatatc

SEQ ID NO: 143791 - DNA, 1201 bp, Homo sapiens
  Payload ID: 8415
  Gene Symbol: IL11
  Gene Name: interleukin 11
  Uniprot ID: P20809
  ENST ID: ENST00000585513
  CDS Start-End: 154-753
actgccgcggccctgctgctcagggcacatgcctcccctccccaggccgcggcccagctgaccctcggggctcccccggcagcggacagggaagggttaaaggcccccggctccctgccccctgccctggggaacccctggccctgtggggacatgaactgtgtttgccgcctggtcctggtcgtgctgagcctgtggccagatacagctgtcgcccctgggccaccacctggcccccctcgagtttccccagaccctcgggccgagctggacagcaccgtgctcctgacccgctctctcctggcggacacgcggcagctggctgcacagctgagggacaaattcccagctgacggggaccacaacctggattccctgcccaccctggccatgagtgcgggggcactgggagctctacagctcccaggtgtgctgacaaggctgcgagcggacctactgtcctacctgcggcacgtgcagtggctgcgccgggcaggtggctcttccctgaagaccctggagcccgagctgggcaccctgcaggcccgactggaccggctgctgcgccggctgcagctcctgatgtcccgcctggccctgccccagccacccccggacccgccggcgcccccgctggcgcccccctcctcagcctgggggggcatcagggccgcccacgccatcctgggggggctgcacctgacacttgactgggccgtgaggggactgctgctgctgaagactcggctgtgacccggggcccaaagccaccaccgtccttccaaagccagatcttatttatttatttatttcagtactgggggcgaaacagccaggtgatccccccgccattatctccccctagttagagacagtccttccgtgaggcctggggggcatctgtgccttatttatacttatttatttcaggagcaggggtgggaggcaggtggactcctgggtccccgaggaggaggggactggggtcccggattcttgggtctccaagaagtctgtccacagacttctgccctggctcttccccatctaggcctgggcaggaacatatattatttatttaagcaattacttttcatgttggggtggggacggaggggaaagggaagcctgggtttttgtacaaaaatgtgagaaacctttgtgagacagagaacagggaattaaatgtgtcatacatatc

SEQ ID NO: 143792 - DNA, 650 bp, Homo sapiens
  Payload ID: 8415
  Gene Symbol: IL11
  Gene Name: interleukin 11
  ENST ID: ENST00000587093
  CDS Start-End: 531-650
gcccgcctggccctgcgacctgcccgcgggcgttccaccctgggacttaagacctccagctccatcctccctaaggccgggagtccaggccccagaccctcctccccgagacccaggagtccagaccccaggccttcctccctcagacctaggagtccaggcccccagcctctcctccctcagacccaggaggagtccagaccccagttcctcctccctcagacccgggagtccaggcccaggccctcctctctcagacccggagtccagcctgagctctctgccttatcctgcccccaggtgtttgccgcctggtcctggtcgtgctgagcctgtggccagatacagctgtcgcccctgggccaccacctggcccccctcgagtttccccagaccctcgggccgagctggacagcaccgtgctcctgacccgctctctcctggcggacacgcggcagctggctgcacagctgagggacaaattcccagctgacggggaccacaacctggattccctgcccaccctggccatgagtgcgggggcactgggagctctacagctcccaggtgtgctgacaaggctgcgagcggacctactgtcctacctgcggcacgtgcagtggctgcgccgggcaggtggctcttccctg

SEQ ID NO: 143793 - DNA, 1728 bp, Homo sapiens
  Payload ID: 8416
  Gene Symbol: IL11RA
  Gene Name: interleukin 11 receptor, alpha
  Uniprot ID: Q14626
  ENST ID: ENST00000318041
  CDS Start-End: 66-1334
gggggctgtagctggtgagaggaagtcctagaggctatggacactctgctgctgggatcaccgagatgagcagcagctgctcagggctgagcagggtcctggtggccgtggctacagccctggtgtctgcctcctccccctgcccccaggcctggggccccccaggggtccagtatgggcagccaggcaggtccgtgaagctgtgttgtcctggagtgactgccggggacccagtgtcctggtttcgggatggggagccaaagctgctccagggacctgactctgggctagggcatgaactggtcctggcccaggcagacagcactgatgagggcacctacatctgccagaccctggatggtgcacttgggggcacagtgaccctgcagctgggctaccctccagcccgccctgttgtctcctgccaagcagccgactatgagaacttctcttgcacttggagtcccagccagatcagcggtttacccacccgctacctcacctcctacaggaagaagacagtcctaggagctgatagccagaggaggagtccatccacagggccctggccatgcccacaggatcccctaggggctgcccgctgtgttgtccacggggctgagttctggagccagtaccggattaatgtgactgaggtgaacccactgggtgccagcacacgcctgctggatgtgagcttgcagagcatcttgcgccctgacccaccccagggcctgcgggtagagtcagtaccaggttacccccgacgcctgcgagccagctggacataccctgcctcctggccgtgccagccccacttcctgctcaagttccgtttgcagtaccgtccggcgcagcatccagcctggtccacggtggagccagctggactggaggaggtgatcacagatgctgtggctgggctgccccatgctgtacgagtcagtgcccgggactttctagatgctggcacctggagcacctggagcccggaggcctggggaactccgagcactgggaccataccaaaggagataccagcatggggccagctacacacgcagccagaggtggagcctcaggtggacagccctgctcctccaaggccctccctccaaccacaccctcggctacttgatcacagggactctgtggagcaggtagctgtgctggcgtctttgggaatcctttctttcctgggactggtggctggggccctggcactggggctctggctgaggctgagacggggtgggaaggatggatccccaaagcctgggttcttggcctcagtgattccagtggacaggcgtccaggagctccaaacctgtagaggacccaggagggcttcggcagattccacctataattctgtcttgctggtgtggatagaaaccaggcaggacagtagatccctatggttggatctcagctggaagttctgtttggagcccatttctgtgagaccctgtatttcaaatttgcagctgaaaggtgcttgtacctctgatttcaccccagagttggagttctgctcaaggaacgtgtgtaatgtgtacatctgtgtccatgtgtgaccatgtgtctgtgaggcagggaacatgtattctctgcatgcatgtatgtaggtgcctggggagtgtgtgtgggtccttggctcttggcctttccccttgcaggggttgtgcaggtgtgaataaagagaataaggaagttcttggagatta

SEQ ID NO: 143794 - DNA, 1700 bp, Homo sapiens
  Payload ID: 8416
  Gene Symbol: IL11RA
  Gene Name: interleukin 11 receptor, alpha
  Uniprot ID: Q14626
  ENST ID: ENST00000441545
  CDS Start-End: 43-1311
gagggcgagggcagagggcgctggcggcagcggccgcggaagatgagcagcagctgctcagggctgagcagggtcctggtggccgtggctacagccctggtgtctgcctcctccccctgcccccaggcctggggccccccaggggtccagtatgggcagccaggcaggtccgtgaagctgtgttgtcctggagtgactgccggggacccagtgtcctggtttcgggatggggagccaaagctgctccagggacctgactctgggctagggcatgaactggtcctggcccaggcagacagcactgatgagggcacctacatctgccagaccctggatggtgcacttgggggcacagtgaccctgcagctgggctaccctccagcccgccctgttgtctcctgccaagcagccgactatgagaacttctcttgcacttggagtcccagccagatcagcggtttacccacccgctacctcacctcctacaggaagaagacagtcctaggagctgatagccagaggaggagtccatccacagggccctggccatgcccacaggatcccctaggggctgcccgctgtgttgtccacggggctgagttctggagccagtaccggattaatgtgactgaggtgaacccactgggtgccagcacacgcctgctggatgtgagcttgcagagcatcttgcgccctgacccaccccagggcctgcgggtagagtcagtaccaggttacccccgacgcctgcgagccagctggacataccctgcctcctggccgtgccagccccacttcctgctcaagttccgtttgcagtaccgtccggcgcagcatccagcctggtccacggtggagccagctggactggaggaggtgatcacagatgctgtggctgggctgccccatgctgtacgagtcagtgcccgggactttctagatgctggcacctggagcacctggagcccggaggcctggggaactccgagcactgggaccataccaaaggagataccagcatggggccagctacacacgcagccagaggtggagcctcaggtggacagccctgctcctccaaggccctccctccaaccacaccctcggctacttgatcacagggactctgtggagcaggtagctgtgctggcgtctttgggaatcctttctttcctgggactggtggctggggccctggcactggggctctggctgaggctgagacggggtgggaaggatggatccccaaagcctgggttcttggcctcagtgattccagtggacaggcgtccaggagctccaaacctgtagaggacccaggagggcttcggcagattccacctataattctgtcttgctggtgtggatagaaaccaggcaggacagtagatccctatggttggatctcagctggaagttctgtttggagcccatttctgtgagaccctgtatttcaaatttgcagctgaaaggtgcttgtacctctgatttcaccccagagttggagttctgctcaaggaacgtgtgtaatgtgtacatctgtgtccatgtgtgaccatgtgtctgtgaggcagggaacatgtattctctgcatgcatgtatgtaggtgcctggggagtgtgtgtgggtccttggctcttggcctttccccttgcaggggttgtgcaggtgtgaataaagagaataaggaagttcttgga

SEQ ID NO: 143795 - DNA, 539 bp, Homo sapiens
  Payload ID: 8416
  Gene Symbol: IL11RA
  Gene Name: interleukin 11 receptor, alpha
  ENST ID: ENST00000466082
  CDS Start-End: 1-233
gaactccgagcactgggaccataccaaaggagataccagcatggggccagctacacacgcagccagaggtggagcctcaggtggacagccctgctcctccaaggccctccctccaaccacaccctcggctacttgatcacagggactctgtggagcaggtagctgtgctggcgtctttgggaatcctttctttcctgggactggtggctggggccctggcactggggctctgactgagataacccacattgttggagagacagctgcctttctatgccccaggctgaggctgagacggggtgggaaggatggatccccaaagcctgggttcttggcctcagtgattccagtggacaggcgtccaggagctccaaacctgtagaggacccaggagggcttcggcagattccacctataattctgtcttgctggtgtggatagaaaccaggcaggacagtagatccctatggttggatctcagctggaagttctgtttggagcccatttctgtgagaccctgtatttcaaatttgcagctg

SEQ ID NO: 143796 - DNA, 575 bp, Homo sapiens
  Payload ID: 8416
  Gene Symbol: IL11RA
  Gene Name: interleukin 11 receptor, alpha
  ENST ID: ENST00000556792
  CDS Start-End: 157-575
agagggggcggggcagggaaggggaaggaggggatggctctggggtcccagaactgagtggagtaggagacgggggctgtagctggtgagaggaagtcctagaggctatggacactctgctgctgggatcaccgaggtagggtggggctaagcaggatgagcagcagctgctcagggctgagcagggtcctggtggccgtggctacagccctggtgtctgcctcctccccctgcccccaggcctggggccccccaggggtccagtatgggcagccaggcaggtccgtgaagctgtgttgtcctggagtgactgccggggacccagtgtcctggtttcgggatggggagccaaagctgctccagggacctgactctgggctagggcatgaactggtcctggcccaggcagacagcactgatgagggcacctacatctgccagaccctggatggtgcacttgggggcacagtgaccctgcagctgggctaccctccagcccgccctgttgtctcctgccaagcagccgactatgagaacttctcttgcacttggagtcccagccagatcagcggttt

SEQ ID NO: 143797 - DNA, 3008 bp, Homo sapiens
  Payload ID: 8416
  Gene Symbol: IL11RA
  Gene Name: interleukin 11 receptor, alpha
  Uniprot ID: Q14626
  ENST ID: ENST00000555003
  CDS Start-End: 1357-2625
atctaccccaaatttctgaacaaaattaatattcagtattatatctagcctatagattctcttactcttggtgtaatgacagcattcccagtttaggaaactgttttaaaatcttgtgtcttggttgtggctgaggctttgggaaggccagagccccctttgccaccacccctagggtgtcagctccaagcctgggcctgagggtttgatggggagcgggtgagctggatcctgatcccagtggtcagtggccagatcctgggctgctggccagaaccctggctttgtgagtggctgcagcttggctctgctccagcccacaggggctaaaggggcgggtagggagtgtgtagggagcgtgtacgtggctttgtgtccttggctcctccagactctcacatgtgcgggcaccatatacttctgctgcccttgtgccccaatcattgcacaaacagaaacagctctgacagagaagggactgctagagttaggaaccctagggcctggaaggaaggtatggctctcagagtgacctggggtctattcagtcccctctggacctgtttccctggcaacgctgtgggaacaacagtctatgcaacacaggagacctgatgccactggtgtcctccaaattttaaggcgaaggcaggcattgtgaatgatgcagggatggccagaatggtttttgccttcgttctttccccaggggaaccaagcctgtgggtggggaaatcacactaaggctggacagtgactgaatctggcccaggagaaacttggctgcctgccttccagaccagggtttttcttccctgagatcctggaggggaagtacctggaacttgggagtgttgccctggtctggaagatctgatagacatagtatgcacacatttccctcgagcttcccatgactggggagtagatgagaaccctgagtgggtggctggtttcttgaggcatacatatacccgacacaccttacacctctgatttggctgcattttggaatcatctgggaagttttaaacaatactggtgcctaggtccaacctccagagactctgatttaattggtatggggtggggttttgcagttttcaaaccacaatatccagcaaagtttgagaaccactgccctacacagccctccttcttctttatcttatctggagtcaggggcaccttcagcttctccaatcacctggccagtggctcttgtttccagtcctgctgttccagggtggataggccttcaggcggagacccaggaatccagctccagactctgtcccaagcagcctcttcagtccgggacgggacaggaagtgtccggcggaggtgggggtggagatgagcagcagctgctcagggctgagcagggtcctggtggccgtggctacagccctggtgtctgcctcctccccctgcccccaggcctggggccccccaggggtccagtatgggcagccaggcaggtccgtgaagctgtgttgtcctggagtgactgccggggacccagtgtcctggtttcgggatggggagccaaagctgctccagggacctgactctgggctagggcatgaactggtcctggcccaggcagacagcactgatgagggcacctacatctgccagaccctggatggtgcacttgggggcacagtgaccctgcagctgggctaccctccagcccgccctgttgtctcctgccaagcagccgactatgagaacttctcttgcacttggagtcccagccagatcagcggtttacccacccgctacctcacctcctacaggaagaagacagtcctaggagctgatagccagaggaggagtccatccacagggccctggccatgcccacaggatcccctaggggctgcccgctgtgttgtccacggggctgagttctggagccagtaccggattaatgtgactgaggtgaacccactgggtgccagcacacgcctgctggatgtgagcttgcagagcatcttgcgccctgacccaccccagggcctgcgggtagagtcagtaccaggttacccccgacgcctgcgagccagctggacataccctgcctcctggccgtgccagccccacttcctgctcaagttccgtttgcagtaccgtccggcgcagcatccagcctggtccacggtggagccagctggactggaggaggtgatcacagatgctgtggctgggctgccccatgctgtacgagtcagtgcccgggactttctagatgctggcacctggagcacctggagcccggaggcctggggaactccgagcactgggaccataccaaaggagataccagcatggggccagctacacacgcagccagaggtggagcctcaggtggacagccctgctcctccaaggccctccctccaaccacaccctcggctacttgatcacagggactctgtggagcaggtagctgtgctggcgtctttgggaatcctttctttcctgggactggtggctggggccctggcactggggctctggctgaggctgagacggggtgggaaggatggatccccaaagcctgggttcttggcctcagtgattccagtggacaggcgtccaggagctccaaacctgtagaggacccaggagggcttcggcagattccacctataattctgtcttgctggtgtggatagaaaccaggcaggacagtagatccctatggttggatctcagctggaagttctgtttggagcccatttctgtgagaccctgtatttcaaatttgcagctgaaaggtgcttgtacctctgatttcaccccagagttggagttctgctcaaggaacgtgtgtaatgtgtacatctgtgtccatgtgtgaccatgtgtctgtgaggcagggaacatgtattctctgcatgcatgtatgtaggtgcctggggagtgtgtgtgggtccttggctcttggcctttccccttgcaggggttgtgcaggtgtgaataaagagaataaggaagtt

SEQ ID NO: 143798 - DNA, 944 bp, Homo sapiens
  Payload ID: 8416
  Gene Symbol: IL11RA
  Gene Name: interleukin 11 receptor, alpha
  ENST ID: ENST00000555981
  CDS Start-End: 135-944
gtgatttctaacagccttaccccacttggtgcatcaatttttctcctaggaagcctcagttttggagaggaagagccaggctttagcctcccatctcaggggtcggggatttttgactctacctctccccacagatgagcagcagctgctcagggctgagcagggtcctggtggccgtggctacagccctggtgtctgcctcctccccctgcccccaggcctggggccccccaggggtccagtatgggcagccaggcaggtccgtgaagctgtgttgtcctggagtgactgccggggacccagtgtcctggtttcgggatggggagccaaagctgctccagggacctgactctgggctagggcatgaactggtcctggcccaggcagacagcactgatgagggcacctacatctgccagaccctggatggtgcacttgggggcacagtgaccctgcagctgggctaccctccagcccgccctgttgtctcctgccaagcagccgactatgagaacttctcttgcacttggagtcccagccagatcagcggtttacccacccgctacctcacctcctacaggaagaagacagtcctaggagctgatagccagaggaggagtccatccacagggccctggccatgcccacaggatcccctaggggctgcccgctgtgttgtccacggggctgagttctggagccagtaccggattaatgtgactgaggtgaacccactgggtgccagcacacgcctgctggatgtgagcttgcagagcatcttgcgccctgacccaccccagggcctgcgggtagagtcagtaccaggttacccccgacgcctgcgagccagctggacataccctgcctcctggccgtgccagccccacttcctgctcaagttccgtttgcagtaccgtccggcgcagcatccagcctggtccacg

SEQ ID NO: 143799 - DNA, 1669 bp, Homo sapiens
  Payload ID: 8416
  Gene Symbol: IL11RA
  Gene Name: interleukin 11 receptor, alpha
  ENST ID: ENST00000555247
  CDS Start-End: 73-237
cgggagggagtagaggccggggcagagggcgagggcgagggcagagggcgctggcggcagcggccgcggaagatgagcagcagctgctcagggctgagcagggtcctggtggccgtggctacagccctggtgtctgcctcctccccctgcccccaggcctggggccccccagggacccagtgtcctggtttcgggatggggagccaaagctgctccagggacctgactctgggctagggcatgaactggtcctggcccaggcagacagcactgatgagggcacctacatctgccagaccctggatggtgcacttgggggcacagtgaccctgcagctgggctaccctccagcccgccctgttgtctcctgccaagcagccgactatgagaacttctcttgcacttggagtcccagccagatcagcggtttacccacccgctacctcacctcctacaggaagaagacagtcctaggagctgatagccagaggaggagtccatccacagggccctggccatgcccacaggatcccctaggggctgcccgctgtgttgtccacggggctgagttctggagccagtaccggattaatgtgactgaggtgaacccactgggtgccagcacacgcctgctggatgtgagcttgcagagcatcttgcgccctgacccaccccagggcctgcgggtagagtcagtaccaggttacccccgacgcctgcgagccagctggacataccctgcctcctggccgtgccagccccacttcctgctcaagttccgtttgcagtaccgtccggcgcagcatccagcctggtccacggtggagccagctggactggaggaggtgatcacagatgctgtggctgggctgccccatgctgtacgagtcagtgcccgggactttctagatgctggcacctggagcacctggagcccggaggcctggggaactccgagcactgggaccataccaaaggagataccagcatggggccagctacacacgcagccagaggtggagcctcaggtggacagccctgctcctccaaggccctccctccaaccacaccctcggctacttgatcacagggactctgtggagcaggtagctgtgctggcgtctttgggaatcctttctttcctgggactggtggctggggccctggcactggggctctggctgaggctgagacggggtgggaaggatggatccccaaagcctgggttcttggcctcagtgattccagtggacaggcgtccaggagctccaaacctgtagaggacccaggagggcttcggcagattccacctataattctgtcttgctggtgtggatagaaaccaggcaggacagtagatccctatggttggatctcagctggaagttctgtttggagcccatttctgtgagaccctgtatttcaaatttgcagctgaaaggtgcttgtacctctgatttcaccccagagttggagttctgctcaaggaacgtgtgtaatgtgtacatctgtgtccatgtgtgaccatgtgtctgtgaggcagggaacatgtattctctgcatgcatgtatgtaggtgcctggggagtgtgtgtgggtccttggctcttggcctttccccttgcaggggttgtgcaggtgtgaataaagagaataaggaagttcttgga

SEQ ID NO: 143800 - DNA, 537 bp, Homo sapiens
  Payload ID: 8416
  Gene Symbol: IL11RA
  Gene Name: interleukin 11 receptor, alpha
  ENST ID: ENST00000556531
  CDS Start-End: 37-537
aaagcactgggtatacagtgggaaaggggacctcagatgagcagcagctgctcagggctgagcagggtcctggtggccgtggctacagccctggtgtctgcctcctccccctgcccccaggcctggggccccccaggggtccagtatgggcagccaggcaggtccgtgaagctgtgttgtcctggagtgactgccggggacccagtgtcctggtttcgggatggggagccaaagctgctccagggacctgactctgggctagggcatgaactggtcctggcccaggcagacagcactgatgagggcacctacatctgccagaccctggatggtgcacttgggggcacagtgaccctgcagctgggctaccctccagcccgccctgttgtctcctgccaagcagccgactatgagaacttctcttgcacttggagtcccagccagatcagcggtttacccacccgctacctcacctcctacaggaagaagacagtcctaggagctgatagccagaggaggagtccatccacagggccc

SEQ ID NO: 143801 - DNA, 1505 bp, Homo sapiens
  Payload ID: 8416
  Gene Symbol: IL11RA
  Gene Name: interleukin 11 receptor, alpha
  ENST ID: ENST00000557298
  CDS Start-End: 55-261
ctggtgagaggaagtcctagaggctatggacactctgctgctgggatcaccgagatgagcagcagctgctcagggctgagcagggtcctggtggccgtggctacagccctggtgtctgcctcctccccctgcccccaggcctggggccccccaggggtccagtatgggcagccaggcaggtccgtgaagctgtgttgtcctggagtgactgccggaccctccagcccgccctgttgtctcctgccaagcagccgactatgagaacttctcttgcacttggagtcccagccagatcagcggtttacccacccgctacctcacctcctacaggaagaagacagtcctaggagctgatagccagaggaggagtccatccacagggccctggccatgcccacaggatcccctaggggctgcccgctgtgttgtccacggggctgagttctggagccagtaccggattaatgtgactgaggtgaacccactgggtgccagcacacgcctgctggatgtgagcttgcagagcatcttgcgccctgacccaccccagggcctgcgggtagagtcagtaccaggttacccccgacgcctgcgagccagctggacataccctgcctcctggccgtgccagccccacttcctgctcaagttccgtttgcagtaccgtccggcgcagcatccagcctggtccacggtggagccagctggactggaggaggtgatcacagatgctgtggctgggctgccccatgctgtacgagtcagtgcccgggactttctagatgctggcacctggagcacctggagcccggaggcctggggaactccgagcactgggaccataccaaaggagataccagcatggggccagctacacacgcagccagaggtggagcctcaggtggacagccctgctcctccaaggccctccctccaaccacaccctcggctacttgatcacagggactctgtggagcaggtagctgtgctggcgtctttgggaatcctttctttcctgggactggtggctggggccctggcactggggctctggctgaggctgagacggggtgggaaggatggatccccaaagcctgggttcttggcctcagtgattccagtggacaggcgtccaggagctccaaacctgtagaggacccaggagggcttcggcagattccacctataattctgtcttgctggtgtggatagaaaccaggcaggacagtagatccctatggttggatctcagctggaagttctgtttggagcccatttctgtgagaccctgtatttcaaatttgcagctgaaaggtgcttgtacctctgatttcaccccagagttggagttctgctcaaggaacgtgtgtaatgtgtacatctgtgtccatgtgtgaccatgtgtctgtgaggcagggaacatgtattctctgcatgcatgtatgtaggtgcctggggagtgtgtgtgggtccttggctcttggcctttccccttgcaggggttg

SEQ ID NO: 143802 - DNA, 491 bp, Homo sapiens
  Payload ID: 8416
  Gene Symbol: IL11RA
  Gene Name: interleukin 11 receptor, alpha
  ENST ID: ENST00000553620
  CDS Start-End: 35-491
gggcagagggcgctggcggcagcggccgcggaagatgagcagcagctgctcagggctgagcagggtcctggtggccgtggctacagccctggtgtctgcctcctccccctgcccccaggcctggggccccccagaccctccagcccgccctgttgtctcctgccaagcagccgactatgagaacttctcttgcacttggagtcccagccagatcagcggtttacccacccgctacctcacctcctacaggaagaagacagtcctaggagctgatagccagaggaggagtccatccacagggccctggccatgcccacaggatcccctaggggctgcccgctgtgttgtccacggggctgagttctggagccagtaccggattaatgtgactgaggtgaacccactgggtgccagcacacgcctgctggatgtgagcttgcagagcatcttgcgccctgacccaccccagggcctgcgggtagagtcagtac

SEQ ID NO: 143803 - DNA, 1388 bp, Homo sapiens
  Payload ID: 8416
  Gene Symbol: IL11RA
  Gene Name: interleukin 11 receptor, alpha
  Uniprot ID: Q14626
  ENST ID: ENST00000602473
  CDS Start-End: 1-1173
atgagcagcagctgctcagggctgagcagggtcctggtggccgtggctacagccctggtgtctgcctcctccccctgcccccaggcctggggccccccaggggtccagtatgggcagccaggcaggtccgtgaagctgtgttgtcctggagtgactgccggggacccagtgtcctggtttcgggatggggagccaaagctgctccagggacctgactctgggctagggcatgaactggtcctggcccaggcagacagcactgatgagggcacctacatctgccagaccctggatggtgcacttgggggcacagtgaccctgcagctgggctaccctccagcccgccctgttgtctcctgccaagcagccgactatgagaacttctcttgcacttggagtcccagccagatcagcggtttacccacccgctacctcacctcctacaggaagaagacagtcctaggagctgatagccagaggaggagtccatccacagggccctggccatgcccacaggatcccctaggggctgcccgctgtgttgtccacggggctgagttctggagccagtaccggattaatgtgactgaggtgaacccactgggtgccagcacacgcctgctggatgtgagcttgcagagcatcttgcgccctgacccaccccagggcctgcgggtagagtcagtaccaggttacccccgacgcctgcgagccagctggacataccctgcctcctggccgtgccagccccacttcctgctcaagttccgtttgcagtaccgtccggcgcagcatccagcctggtccacggtggagccagctggactggaggaggtgatcacagatgctgtggctgggctgccccatgctgtacgagtcagtgcccgggactttctagatgctggcacctggagcacctggagcccggaggcctggggaactccgagcactgggaccataccaaaggagataccagcatggggccagctacacacgcagccagaggtggagcctcaggtggacagccctgctcctccaaggccctccctccaaccacaccctcggctacttgatcacagggactctgtggagcaggtagctgtgctggcgtctttgggaatcctttctttcctgggactggtggctggggccctggcactggggctctggtaagtgactgccattggtccctcagcctctgatcctcacacatgctctgatgcccatagaccacattcatctccacccttcatgactgcccgctgaacctgtctgattctggaactacctccccatacctccatcccccatgccccacttgattttaactgattcctctcctgaccctttactaataaaccctttggcggagactgagataacccaca

SEQ ID NO: 143804 - DNA, 1902 bp, Homo sapiens
  Payload ID: 8417
  Gene Symbol: IL12RB1
  Gene Name: interleukin 12 receptor, beta 1
  Uniprot ID: P42701
  ENST ID: ENST00000322153
  CDS Start-End: 110-1255
tcttttctccttgctcagcttcaatgtgttccggagtggggacggggtggctgaacctcgcaggtggcagagaggctcccctggggctgtggggctctacgtggatccgatggagccgctggtgacctgggtggtccccctcctcttcctcttcctgctgtccaggcagggcgctgcctgcagaaccagtgagtgctgttttcaggacccgccatatccggatgcagactcaggctcggcctcgggccctagggacctgagatgctatcggatatccagtgatcgttacgagtgctcctggcagtatgagggtcccacagctggggtcagccacttcctgcggtgttgccttagctccgggcgctgctgctacttcgccgccggctcagccaccaggctgcagttctccgaccaggctggggtgtctgtgctgtacactgtcacactctgggtggaatcctgggccaggaaccagacagagaagtctcctgaggtgaccctgcagctctacaactcagttaaatatgagcctcctctgggagacatcaaggtgtccaagttggccgggcagctgcgtatggagtgggagaccccggataaccaggttggtgctgaggtgcagttccggcaccggacacccagcagcccatggaagttgggcgactgcggacctcaggatgatgatactgagtcctgcctctgccccctggagatgaatgtggcccaggaattccagctccgacgacggcagctggggagccaaggaagttcctggagcaagtggagcagccccgtgtgcgttccccctgaaaaccccccacagcctcaggtgagattctcggtggagcagctgggccaggatgggaggaggcggctgaccctgaaagagcagccaacccagctggagcttccagaaggctgtcaagggctggcgcctggcacggaggtcacttaccgactacagctccacatgctgtcctgcccgtgtaaggccaaggccaccaggaccctgcacctggggaagatgccctatctctcgggtgctgcctacaacgtggctgtcatctcctcgaaccaatttggtcctggcctgaaccagacgtggcacattcctgccgacacccacacagatggcatgatctcagctcactgcaacctccgccttccagattcaagagattctcctgcttcagcctcccgagtagctgggattacaggcatctgccaccatacccggctaattttgtatttttagtagagacggggtttcaccacgttggccaggctggtctcgaactcctgacctcaagtgatccacctgccttggcctcccaaagtgttgggattataggcgtgagccaccatgcccagcctaatttttgtatttttagtagagatggagtttcaccatgttgcccaggctggtctcaaactcctgccctcaggtgatccacccacctcagcctctcaaagtgctgggattacaggtgtgagccactgtggccgacctactatttttattatttttgagctaggttctcagtctgttggcagactggagtgcaatcatggctcactgcagccttgaactcccagactcaagtgatccttccacctcagcctctggagtagctgggactacagacatgcaccaccacacctggttaattttttatttttattttttgtagagacaggtgtctctctacgttgcccaggctggtctcgaactcctgggctcaagtgatccacccatctccacctcccaaagtgctaggattacaggcgtgagccaccgtacccagcctggtcccatatcatagtgaaatggtgcctgtaaagctctcagcattggcttggcacatgcagttggtactcaataaacggctgttgctatcccca

SEQ ID NO: 143805 - DNA, 528 bp, Homo sapiens
  Payload ID: 8417
  Gene Symbol: IL12RB1
  Gene Name: interleukin 12 receptor, beta 1
  ENST ID: ENST00000430026
  CDS Start-End: 174-528
actttgacttgccttagggatgggctgtgacactttactttttttcttttttcttttttttcagtcttttctccttgctcagcttcaatgtgttccggagtggggacggggtggctgaacctcgcaggtggcagagaggctcccctggggctgtggggctctacgtggatccgatggagccgctggtgacctgggtggtccccctcctcttcctcttcctgctgtccaggcagggcgctgcctgcagaaccagtgagtgctgttttcaggacccgccatatccggatgcagactcaggatctcttccaggctcggcctcgggccctagggacctgagatgctatcggatatccagtgatcgttacgagtgctcctggcagtatgagggtcccacagctggggtcagccacttcctgcggtgttgccttagctccgggcgctgctgctacttcgccgccggctcagccaccaggctgcagttctccgaccaggctggggtgtctgtgctgtacactgtcacactctggg

SEQ ID NO: 143806 - DNA, 595 bp, Homo sapiens
  Payload ID: 8417
  Gene Symbol: IL12RB1
  Gene Name: interleukin 12 receptor, beta 1
  ENST ID: ENST00000598019
  CDS Start-End: 394-595
agaacactccgctgcctctccagagccaggcacacagcaggcgctccataaatgttcgttggatgatcctcagcgacgttagggtctcttgccacatggagggaagctcggccctcctcctcgggctgaaggtctctctccctgagaaggcggaagctgaggagcagctgccaggcagaggccactggggaacaacaacaatgactaatcacactggccagcgggtggacagcgctcactgcaagccaagccctccttcatactcacaaaagcccattttgcagtcttttctccttgctcagcttcaatgtgttccggagtggggacggggtggctgaacctcgcaggtggcagagaggctcccctggggctgtggggctctacgtggatccgatggagccgctggtgacctgggtggtccccctcctcttcctcttcctgctgtccaggcagggcgctgcctgcagaaccagtgagtgctgttttcaggacccgccatatccggatgcagactcaggctcggcctcgggccctagggacctgagatgctatcggatatccagtgatcgttacgagtgctcctggcagtatgagg

SEQ ID NO: 143807 - DNA, 2901 bp, Homo sapiens
  Payload ID: 8417
  Gene Symbol: IL12RB1
  Gene Name: interleukin 12 receptor, beta 1
  Uniprot ID: P42701
  ENST ID: ENST00000600835
  CDS Start-End: 300-2288
ggtcaggcgcctccttcacttgctgtgagtcccttatcacaactgatcactccgtggggtcaccgctgctctggcgtctacctcccccaacaggttggggtttctaggagggcagctccagaggttgcagaacactccgctgcctctccagagccaggcacacagcaggcgctccataaatgttcgttggtcttttctccttgctcagcttcaatgtgttccggagtggggacggggtggctgaacctcgcaggtggcagagaggctcccctggggctgtggggctctacgtggatccgatggagccgctggtgacctgggtggtccccctcctcttcctcttcctgctgtccaggcagggcgctgcctgcagaaccagtgagtgctgttttcaggacccgccatatccggatgcagactcaggctcggcctcgggccctagggacctgagatgctatcggatatccagtgatcgttacgagtgctcctggcagtatgagggtcccacagctggggtcagccacttcctgcggtgttgccttagctccgggcgctgctgctacttcgccgccggctcagccaccaggctgcagttctccgaccaggctggggtgtctgtgctgtacactgtcacactctgggtggaatcctgggccaggaaccagacagagaagtctcctgaggtgaccctgcagctctacaactcagttaaatatgagcctcctctgggagacatcaaggtgtccaagttggccgggcagctgcgtatggagtgggagaccccggataaccaggttggtgctgaggtgcagttccggcaccggacacccagcagcccatggaagttgggcgactgcggacctcaggatgatgatactgagtcctgcctctgccccctggagatgaatgtggcccaggaattccagctccgacgacggcagctggggagccaaggaagttcctggagcaagtggagcagccccgtgtgcgttccccctgaaaaccccccacagcctcaggtgagattctcggtggagcagctgggccaggatgggaggaggcggctgaccctgaaagagcagccaacccagctggagcttccagaaggctgtcaagggctggcgcctggcacggaggtcacttaccgactacagctccacatgctgtcctgcccgtgtaaggccaaggccaccaggaccctgcacctggggaagatgccctatctctcgggtgctgcctacaacgtggctgtcatctcctcgaaccaatttggtcctggcctgaaccagacgtggcacattcctgccgacacccacacagaaccagtggctctgaatatcagcgtcggaaccaacgggaccaccatgtattggccagcccgggctcagagcatgacgtattgcattgaatggcagcctgtgggccaggacgggggccttgccacctgcagcctgactgcgccgcaagacccggatccggctggaatggcaacctacagctggagtcgagagtctggggcaatggggcaggaaaagtgttactacattaccatctttgcctctgcgcaccccgagaagctcaccttgtggtctacggtcctgtccacctaccactttgggggcaatgcctcagcagctgggacaccgcaccacgtctcggtgaagaatcatagcttggactctgtgtctgtggactgggcaccatccctgctgagcacctgtcccggcgtcctaaaggagtatgttgtccgctgccgagatgaagacagcaaacaggtgtcagagcatcccgtgcagcccacagagacccaagttaccctcagtggcctgcgggctggtgtagcctacacggtgcaggtgcgagcagacacagcgtggctgaggggtgtctggagccagccccagcgcttcagcatcgaagtgcaggtttctgattggctcatcttcttcgcctccctggggagcttcctgagcatccttctcgtgggcgtccttggctaccttggcctgaacagggccgcacggcacctgtgcccgccgctgcccacaccctgtgccagctccgccattgagttccctggagggaaggagacttggcagtggatcaacccagtggacttccaggaagaggcatccctgcaggaggccctggtggtagagatgtcctgggacaaaggcgagaggactgagcctctcgagaagacagagctacctgagggtgcccctgagctggccctggatacagagttgtccttggaggatggagacaggtgcaaggccaagatgtgatcgttgaggctcagagagggtgagtgactcgcccgaggctacgtagcacacacaggagtcacatttggacccaaataacccagagctcctccaggctccagtgcacctgcctcctctctgccccgtgcctgttgccacccatcctgcgggggaaccctagatgctgccatgaaatggaagctgctgcaccctgctgggcctggcatccgtggggcaggagcagaccctgccatttacctgttctggcgtagaatggactgggaatgggggcaaggggggctcagatggatccctggaccctgggctgggcatccacccccaggagcactggatggggagtctggactcaagggctccctgcagcattgcggggtcttgtagcttggaggatccaggcatatagggaagggggctgtaaactttgtgggaaaaatgacggtcctcccatcccaccccccaccccaccctcacccccctataaaatgggggtggtgataatgaccttacacagctgttcaaaatcatcgtaaatgagcctcctcttgggtatttttttcctgtttgaagcttgaatgtcctgctcaaaatctcaaaacacgagccttggaattca

SEQ ID NO: 143808 - DNA, 2782 bp, Homo sapiens
  Payload ID: 8417
  Gene Symbol: IL12RB1
  Gene Name: interleukin 12 receptor, beta 1
  Uniprot ID: P42701
  ENST ID: ENST00000593993
  CDS Start-End: 181-2169
ctctttcactttgacttgccttagggatgggctgtgacactttactttttttcttttttcttttttttcagtcttttctccttgctcagcttcaatgtgttccggagtggggacggggtggctgaacctcgcaggtggcagagaggctcccctggggctgtggggctctacgtggatccgatggagccgctggtgacctgggtggtccccctcctcttcctcttcctgctgtccaggcagggcgctgcctgcagaaccagtgagtgctgttttcaggacccgccatatccggatgcagactcaggctcggcctcgggccctagggacctgagatgctatcggatatccagtgatcgttacgagtgctcctggcagtatgagggtcccacagctggggtcagccacttcctgcggtgttgccttagctccgggcgctgctgctacttcgccgccggctcagccaccaggctgcagttctccgaccaggctggggtgtctgtgctgtacactgtcacactctgggtggaatcctgggccaggaaccagacagagaagtctcctgaggtgaccctgcagctctacaactcagttaaatatgagcctcctctgggagacatcaaggtgtccaagttggccgggcagctgcgtatggagtgggagaccccggataaccaggttggtgctgaggtgcagttccggcaccggacacccagcagcccatggaagttgggcgactgcggacctcaggatgatgatactgagtcctgcctctgccccctggagatgaatgtggcccaggaattccagctccgacgacggcagctggggagccaaggaagttcctggagcaagtggagcagccccgtgtgcgttccccctgaaaaccccccacagcctcaggtgagattctcggtggagcagctgggccaggatgggaggaggcggctgaccctgaaagagcagccaacccagctggagcttccagaaggctgtcaagggctggcgcctggcacggaggtcacttaccgactacagctccacatgctgtcctgcccgtgtaaggccaaggccaccaggaccctgcacctggggaagatgccctatctctcgggtgctgcctacaacgtggctgtcatctcctcgaaccaatttggtcctggcctgaaccagacgtggcacattcctgccgacacccacacagaaccagtggctctgaatatcagcgtcggaaccaacgggaccaccatgtattggccagcccgggctcagagcatgacgtattgcattgaatggcagcctgtgggccaggacgggggccttgccacctgcagcctgactgcgccgcaagacccggatccggctggaatggcaacctacagctggagtcgagagtctggggcaatggggcaggaaaagtgttactacattaccatctttgcctctgcgcaccccgagaagctcaccttgtggtctacggtcctgtccacctaccactttgggggcaatgcctcagcagctgggacaccgcaccacgtctcggtgaagaatcatagcttggactctgtgtctgtggactgggcaccatccctgctgagcacctgtcccggcgtcctaaaggagtatgttgtccgctgccgagatgaagacagcaaacaggtgtcagagcatcccgtgcagcccacagagacccaagttaccctcagtggcctgcgggctggtgtagcctacacggtgcaggtgcgagcagacacagcgtggctgaggggtgtctggagccagccccagcgcttcagcatcgaagtgcaggtttctgattggctcatcttcttcgcctccctggggagcttcctgagcatccttctcgtgggcgtccttggctaccttggcctgaacagggccgcacggcacctgtgcccgccgctgcccacaccctgtgccagctccgccattgagttccctggagggaaggagacttggcagtggatcaacccagtggacttccaggaagaggcatccctgcaggaggccctggtggtagagatgtcctgggacaaaggcgagaggactgagcctctcgagaagacagagctacctgagggtgcccctgagctggccctggatacagagttgtccttggaggatggagacaggtgcaaggccaagatgtgatcgttgaggctcagagagggtgagtgactcgcccgaggctacgtagcacacacaggagtcacatttggacccaaataacccagagctcctccaggctccagtgcacctgcctcctctctgccccgtgcctgttgccacccatcctgcgggggaaccctagatgctgccatgaaatggaagctgctgcaccctgctgggcctggcatccgtggggcaggagcagaccctgccatttacctgttctggcgtagaatggactgggaatgggggcaaggggggctcagatggatccctggaccctgggctgggcatccacccccaggagcactggatggggagtctggactcaagggctccctgcagcattgcggggtcttgtagcttggaggatccaggcatatagggaagggggctgtaaactttgtgggaaaaatgacggtcctcccatcccaccccccaccccaccctcacccccctataaaatgggggtggtgataatgaccttacacagctgttcaaaatcatcgtaaatgagcctcctcttgggtatttttttcctgtttgaagcttgaatgtcctgctcaaaatctcaaaacacgagccttggaattca

SEQ ID NO: 143809 - DNA, 557 bp, Homo sapiens
  Payload ID: 8417
  Gene Symbol: IL12RB1
  Gene Name: interleukin 12 receptor, beta 1
  ENST ID: ENST00000594176
  CDS Start-End: 403-557
acttgctgtgagtcccttatcacaactgatcactccgtggggtcaccgctgctctggcgtctacctcccccaacaggttggggtttctaggagggcagctccagaggttgcagaacactccgctgcctctccagagccaggcacacagcaggcgctccataaatgttcgttggcagctgccaggcagaggccactggggaacaacaacaatgactaatcacactggccagcgggtggacagcgctcactgcaagccaagccctccttcatactcacaaaagcccattttgcagtcttttctccttgctcagcttcaatgtgttccggagtggggacggggtggctgaacctcgcaggtggcagagaggctcccctggggctgtggggctctacgtggatccgatggagccgctggtgacctgggtggtccccctcctcttcctcttcctgctgtccaggcagggcgctgcctgcagaaccagtgagtgctgttttcaggacccgccatatccggatgcagactcaggctcggcctcgggccctagggacctgagatg

SEQ ID NO: 143810 - DNA, 4040 bp, Homo sapiens
  Payload ID: 8418
  Gene Symbol: IL12RB2
  Gene Name: interleukin 12 receptor, beta 2
  Uniprot ID: Q99665
  ENST ID: ENST00000262345
  CDS Start-End: 641-3229
tgcagagcacagagaaaggacatctgcgaggaaagttccctgatggctgtcaacaaagtgccacgtctctatggctgtgaacgctgagcacacgattttatcgcgcctatcatatcttggtgcataaacgcacctcacctcggtcaacccttgctccgtcttatgagacaggctttattatccgcattttatatgaggggaaactgacggtggagagagaattatcttgctcaaggcgacacagcagagcccacaggtggcagaatcccacccgagcccgcttcgacccgcggggtggaaaccacgggcgcccgcccggctgcgcttccagagctgaactgagaagcgagtcctctccgccctgcggccaccgcccagccccgacccccgccccggcccgatcctcactcgccgccagctccccgcgcccaccccggagttggtggcgcagaggcgggaggcggaggcgggagggcgggcgctggcaccgggaacgcccgagcgccggcagagagcgcggagagcgcgacacgtgcggcccagagcaccggggccacccggtccccgcaggcccgggaccgcgcccgctggcaggcgacacgtggaagaatacggagttctataccagagttgattgttgatggcacatacttttagaggatgctcattggcatttatgtttataatcacgtggctgttgattaaagcaaaaatagatgcgtgcaagagaggcgatgtgactgtgaagccttcccatgtaattttacttggatccactgtcaatattacatgctctttgaagcccagacaaggctgctttcactattccagacgtaacaagttaatcctgtacaagtttgacagaagaatcaattttcaccatggccactccctcaattctcaagtcacaggtcttccccttggtacaaccttgtttgtctgcaaactggcctgtatcaatagtgatgaaattcaaatatgtggagcagagatcttcgttggtgttgctccagaacagcctcaaaatttatcctgcatacagaagggagaacaggggactgtggcctgcacctgggaaagaggacgagacacccacttatacactgagtatactctacagctaagtggaccaaaaaatttaacctggcagaagcaatgtaaagacatttattgtgactatttggactttggaatcaacctcacccctgaatcacctgaatccaatttcacagccaaggttactgctgtcaatagtcttggaagctcctcttcacttccatccacattcacattcttggacatagtgaggcctcttcctccgtgggacattagaatcaaatttcaaaaggcttctgtgagcagatgtaccctttattggagagatgagggactggtactgcttaatcgactcagatatcggcccagtaacagcaggctctggaatatggttaatgttacaaaggccaaaggaagacatgatttgctggatctgaaaccatttacagaatatgaatttcagatttcctctaagctacatctttataagggaagttggagtgattggagtgaatcattgagagcacaaacaccagaagaagagcctactgggatgttagatgtctggtacatgaaacggcacattgactacagtagacaacagatttctcttttctggaagaatctgagtgtctcagaggcaagaggaaaaattctccactatcaggtgaccttgcaggagctgacaggagggaaagccatgacacagaacatcacaggacacacctcctggaccacagtcattcctagaaccggaaattgggctgtggctgtgtctgcagcaaattcaaaaggcagttctctgcccactcgtattaacataatgaacctgtgtgaggcagggttgctggctcctcgccaggtctctgcaaactcagagggcatggacaacattctggtgacttggcagcctcccaggaaagatccctctgctgttcaggagtacgtggtggaatggagagagctccatccagggggtgacacacaggtccctctaaactggctacggagtcgaccctacaatgtgtctgctctgatttcagagaacataaaatcctacatctgttatgaaatccgtgtgtatgcactctcaggggatcaaggaggatgcagctccatcctgggtaactctaagcacaaagcaccactgagtggcccccacattaatgccatcacagaggaaaaggggagcattttaatttcatggaacagcattccagtccaggagcaaatgggctgcctcctccattataggatatactggaaggaacgggactccaactcccagcctcagctctgtgaaattccctacagagtctcccaaaattcacatccaataaacagcctgcagccccgagtgacatatgtcctgtggatgacagctctgacagctgctggtgaaagttcccacggaaatgagagggaattttgtctgcaaggtaaagccaattggatggcgtttgtggcaccaagcatttgcattgctatcatcatggtgggcattttctcaacgcattacttccagcaaaaggtgtttgttctcctagcagccctcagacctcagtggtgtagcagagaaattccagatccagcaaatagcacttgcgctaagaaatatcccattgcagaggagaagacacagctgcccttggacaggctcctgatagactggcccacgcctgaagatcctgaaccgctggtcatcagtgaagtccttcatcaagtgaccccagttttcagacatcccccctgctccaactggccacaaagggaaaaaggaatccaaggtcatcaggcctctgagaaagacatgatgcacagtgcctcaagcccaccacctccaagagctctccaagctgagagcagacaactggtggatctgtacaaggtgctggagagcaggggctccgacccaaagcccgaaaacccagcctgtccctggacggtgctcccagcaggtgaccttcccacccatgatggctacttaccctccaacatagatgacctcccctcacatgaggcacctctcgctgactctctggaagaactggagcctcagcacatctccctttctgttttcccctcaagttctcttcacccactcaccttctcctgtggtgataagctgactctggatcagttaaagatgaggtgtgactccctcatgctctgagtggtgaggcttcaagccttaaagtcagtgtgccctcaaccagcacagcctgccccaattcccccagcccctgctccagcagctgtcatctctgggtgccaccatcggtctggctgcagctagaggacaggcaagccagctctgggggagtcttaggaactgggagttggtcttcactcagatgcctcatcttgcctttcccagggccttaaaattacatccttcactgtgtggacctagagactccaacttgaattcctagtaactttcttggtatgctggccagaaagggaaatgaggaggagagtagaaaccacagctcttagtagtaatggcatacagtctagaggaccattcatgcaatgactatttctaaagcacctgctacacagcaggctgtacacagcagatcagtactgttcaacagaacttcctgagatgatggaaatgttctacctctgcactcactgtccagtacattagacactaggcacattggctgttaatcacttggaatgtgtttagcttgactgaggaattaaattttgattgtaaatttaaatcgccacacatggctagtggctactgtattggagtgcacagctctagatggctcctagattattgagagccttcaaaacaaatcaacctagttctatagatgaagacataaaagacactggtaaacaccaaggtaaaagggcccccaaggtggtcatgactggtctcatttgcagaagtctaagaatgtacctttttctggccgggcgtggtagctcatgcctgtaatcccagcactttgggaggctga

SEQ ID NO: 143811 - DNA, 2454 bp, Homo sapiens
  Payload ID: 8418
  Gene Symbol: IL12RB2
  Gene Name: interleukin 12 receptor, beta 2
  Uniprot ID: Q99665
  ENST ID: ENST00000371000
  CDS Start-End: 220-2199
agagagcgcggagagcgcgacacgtgcggcccagagcaccggggccacccggtccccgcaggcccgggaccgcgcccgctggcaggcgacacgtggtcacggtgatccatttgtaaagtcgggaataaatgacctctgaagtgttgtctgtatattgatctgctaccagtaaaacatatctctgaagaatacggagttctataccagagttgattgttgatggcacatacttttagaggatgctcattggcatttatgtttataatcacgtggctgttgattaaagcaaaaatagatgcgtgcaagagaggcgatgtgactgtgaagccttcccatgtaattttacttggatccactgtcaatattacatgctctttgaagcccagacaaggctgctttcactattccagacgtaacaagttaatcctgtacaagtttgacagaagaatcaattttcaccatggccactccctcaattctcaagtcacaggtcttccccttggtacaaccttgtttgtctgcaaactggcctgtatcaatagtgatgaaattcaaatatgtggagcagagatcttcgttggtgttgctccagaacagcctcaaaatttatcctgcatacagaagggagaacaggggactgtggcctgcacctgggaaagaggacgagacacccacttatacactgagtatactctacagctaagtggaccaaaaaatttaacctggcagaagcaatgtaaagacatttattgtgactatttggactttggaatcaacctcacccctgaatcacctgaatccaatttcacagccaaggttactgctgtcaatagtcttggaagctcctcttcacttccatccacattcacattcttggacatagtgaggcctcttcctccgtgggacattagaatcaaatttcaaaaggcttctgtgagcagatgtaccctttattggagagatgagggactggtactgcttaatcgactcagatatcggcccagtaacagcaggctctggaatatggttaatgttacaaaggccaaaggaagacatgatttgctggatctgaaaccatttacagaatatgaatttcagatttcctctaagctacatctttataagggaagttggagtgattggagtgaatcattgagagcacaaacaccagaagaagagcctactgggatgttagatgtctggtacatgaaacggcacattgactacagtagacaacagatttctcttttctggaagaatctgagtgtctcagaggcaagaggaaaaattctccactatcaggtgaccttgcaggagctgacaggagggaaagccatgacacagaacatcacaggacacacctcctggaccacagtcattcctagaaccggaaattgggctgtggctgtgtctgcagcaaattcaaaaggcagttctctgcccactcgtattaacataatgaacctgtgtgaggcagggttgctggctcctcgccaggtctctgcaaactcagagggcatggacaacattctggtgacttggcagcctcccaggaaagatccctctgctgttcaggagtacgtggtggaatggagagagctccatccagggggtgacacacaggtccctctaaactggctacggagtcgaccctacaatgtgtctgctctgatttcagagaacataaaatcctacatctgttatgaaatccgtgtgtatgcactctcaggggatcaaggaggatgcagctccatcctgggtaactctaagcacaaagcaccactgagtggcccccacattaatgccatcacagaggaaaaggggagcattttaatttcatggaacagcattccagtccaggagcaaatgggctgcctcctccattataggatatactggaaggaacgggactccaactcccagcctcagctctgtgaaattccctacagagtctcccaaaattcacatccaataaacagcctgcagccccgagtgacatatgtcctgtggatgacagctctgacagctgctggtgaaagttcccacggaaatgagagggaattttgtctgcaaggtaaagccaattggatggcgtttgtggcaccaagcatttgcattgctatcatcatggtgggcattttctcaacgcattacttccagcaaaagagaagacacagctgcccttggacaggctcctgatagactggcccacgcctgaagatcctgaaccgctggtcatcagtgaagtccttcatcaagtgaccccagttttcagacatcccccctgctccaactggccacaaagggaaaaaggaatccaaggtcatcaggcctctgagaaagacatgatgcacagtgcctcaagcccaccacctccaagagctctccaagctgagagcagacaactggtggatctgtacaaggtgctggagagcaggggctccgacccaaagc

SEQ ID NO: 143812 - DNA, 687 bp, Homo sapiens
  Payload ID: 8418
  Gene Symbol: IL12RB2
  Gene Name: interleukin 12 receptor, beta 2
  ENST ID: ENST00000441640
  CDS Start-End: 1-687
acagaagggagaacaggggactgtggcctgcacctgggaaagaggacgagacacccacttatacactgagtatactctacagctaagtggaccaaaaaatttaacctggcagaagcaatgtaaagacatttattgtgactatttggactttggaatcaacctcacccctgaatcacctgaatccaatttcacagccaaggttactgctgtcaatagtcttggaagctcctcttcacttccatccacattcacattcttggacatagtgaggcctcttcctccgtgggacattagaatcaaatttcaaaaggcttctgtgagcagatgtaccctttattggagagatgagggactggtactgcttaatcgactcagatatcggcccagtaacagcaggctctggaatatggttaatgttacaaaggccaaaggaagacatgatttgctggatctgaaaccatttacagaatatgaatttcagatttcctctaagctacatctttataagggaagttggagtgattggagtgaatcattgagagcacaaacaccagaagaagagcctactgggatgttagatgtctggtacatgaaacggcacattgactacagtagacaacagatttctcttttctggaaggtgagttttaagcgtcaacttaaaactcaagggaataaaactgaagg

SEQ ID NO: 143813 - DNA, 3782 bp, Homo sapiens
  Payload ID: 8418
  Gene Symbol: IL12RB2
  Gene Name: interleukin 12 receptor, beta 2
  Uniprot ID: Q99665
  ENST ID: ENST00000544434
  CDS Start-End: 641-2971
tgcagagcacagagaaaggacatctgcgaggaaagttccctgatggctgtcaacaaagtgccacgtctctatggctgtgaacgctgagcacacgattttatcgcgcctatcatatcttggtgcataaacgcacctcacctcggtcaacccttgctccgtcttatgagacaggctttattatccgcattttatatgaggggaaactgacggtggagagagaattatcttgctcaaggcgacacagcagagcccacaggtggcagaatcccacccgagcccgcttcgacccgcggggtggaaaccacgggcgcccgcccggctgcgcttccagagctgaactgagaagcgagtcctctccgccctgcggccaccgcccagccccgacccccgccccggcccgatcctcactcgccgccagctccccgcgcccaccccggagttggtggcgcagaggcgggaggcggaggcgggagggcgggcgctggcaccgggaacgcccgagcgccggcagagagcgcggagagcgcgacacgtgcggcccagagcaccggggccacccggtccccgcaggcccgggaccgcgcccgctggcaggcgacacgtggaagaatacggagttctataccagagttgattgttgatggcacatacttttagaggatgctcattggcatttatgtttataatcacgtggctgttgattaaagcaaaaatagatgcgtgcaagagaggcgatgtgactgtgaagccttcccatgtaattttacttggatccactgtcaatattacatgctctttgaagcccagacaaggctgctttcactattccagacgtaacaagttaatcctgtacaagtttgacagaagaatcaattttcaccatggccactccctcaattctcaagtcacaggtcttccccttggtacaaccttgtttgtctgcaaactggcctgtatcaatagtgatgaaattcaaatatgtggagcagagatcttcgttggtgttgctccagaacagcctcaaaatttatcctgcatacagaagggagaacaggggactgtggcctgcacctgggaaagaggacgagacacccacttatacactgagtatactctacagctaagtggaccaaaaaatttaacctggcagaagcaatgtaaagacatttattgtgactatttggactttggaatcaacctcacccctgaatcacctgaatccaatttcacagccaaggttactgctgtcaatagtcttggaagctcctcttcacttccatccacattcacattcttggacatagtgaggcctcttcctccgtgggacattagaatcaaatttcaaaaggcttctgtgagcagatgtaccctttattggagagatgagggactggtactgcttaatcgactcagatatcggcccagtaacagcaggctctggaatatggttaatgttacaaaggccaaaggaagacatgatttgctggatctgaaaccatttacagaatatgaatttcagatttcctctaagctacatctttataagggaagttggagtgattggagtgaatcattgagagcacaaacaccagaagaagagcctactgggatgttagatgtctggtacatgaaacggcacattgactacagtagacaacagatttctcttttctggaagaatctgagtgtctcagaggcaagaggaaaaattctccactatcaggtgaccttgcaggagctgacaggagggaaagccatgacacagaacatcacaggacacacctcctggaccacagtcattcctagaaccggaaattgggctgtggctgtgtctgcagcaaattcaaaaggcagttctctgcccactcgtattaacataatgaacctgtgtgaggcagggttgctggctcctcgccaggtctctgcaaactcagagggcatggacaacattctggtgacttggcagcctcccaggaaagatccctctgctgttcaggagtacgtggtggaatggagagagctccatccagggggtgacacacaggtccctctaaactggctacggagtcgaccctacaatgtgtctgctctgatttcagaaattccctacagagtctcccaaaattcacatccaataaacagcctgcagccccgagtgacatatgtcctgtggatgacagctctgacagctgctggtgaaagttcccacggaaatgagagggaattttgtctgcaaggtaaagccaattggatggcgtttgtggcaccaagcatttgcattgctatcatcatggtgggcattttctcaacgcattacttccagcaaaaggtgtttgttctcctagcagccctcagacctcagtggtgtagcagagaaattccagatccagcaaatagcacttgcgctaagaaatatcccattgcagaggagaagacacagctgcccttggacaggctcctgatagactggcccacgcctgaagatcctgaaccgctggtcatcagtgaagtccttcatcaagtgaccccagttttcagacatcccccctgctccaactggccacaaagggaaaaaggaatccaaggtcatcaggcctctgagaaagacatgatgcacagtgcctcaagcccaccacctccaagagctctccaagctgagagcagacaactggtggatctgtacaaggtgctggagagcaggggctccgacccaaagcccgaaaacccagcctgtccctggacggtgctcccagcaggtgaccttcccacccatgatggctacttaccctccaacatagatgacctcccctcacatgaggcacctctcgctgactctctggaagaactggagcctcagcacatctccctttctgttttcccctcaagttctcttcacccactcaccttctcctgtggtgataagctgactctggatcagttaaagatgaggtgtgactccctcatgctctgagtggtgaggcttcaagccttaaagtcagtgtgccctcaaccagcacagcctgccccaattcccccagcccctgctccagcagctgtcatctctgggtgccaccatcggtctggctgcagctagaggacaggcaagccagctctgggggagtcttaggaactgggagttggtcttcactcagatgcctcatcttgcctttcccagggccttaaaattacatccttcactgtgtggacctagagactccaacttgaattcctagtaactttcttggtatgctggccagaaagggaaatgaggaggagagtagaaaccacagctcttagtagtaatggcatacagtctagaggaccattcatgcaatgactatttctaaagcacctgctacacagcaggctgtacacagcagatcagtactgttcaacagaacttcctgagatgatggaaatgttctacctctgcactcactgtccagtacattagacactaggcacattggctgttaatcacttggaatgtgtttagcttgactgaggaattaaattttgattgtaaatttaaatcgccacacatggctagtggctactgtattggagtgcacagctctagatggctcctagattattgagagccttcaaaacaaatcaacctagttctatagatgaagacataaaagacactggtaaacaccaaggtaaaagggcccccaaggtggtcatgactggtctcatttgcagaagtctaagaatgtacctttttctggccgggcgtggtagctcatgcctgtaatcccagcactttgggaggctga

SEQ ID NO: 143814 - DNA, 3849 bp, Homo sapiens
  Payload ID: 8418
  Gene Symbol: IL12RB2
  Gene Name: interleukin 12 receptor, beta 2
  ENST ID: ENST00000541374
  CDS Start-End: 641-2548
tgcagagcacagagaaaggacatctgcgaggaaagttccctgatggctgtcaacaaagtgccacgtctctatggctgtgaacgctgagcacacgattttatcgcgcctatcatatcttggtgcataaacgcacctcacctcggtcaacccttgctccgtcttatgagacaggctttattatccgcattttatatgaggggaaactgacggtggagagagaattatcttgctcaaggcgacacagcagagcccacaggtggcagaatcccacccgagcccgcttcgacccgcggggtggaaaccacgggcgcccgcccggctgcgcttccagagctgaactgagaagcgagtcctctccgccctgcggccaccgcccagccccgacccccgccccggcccgatcctcactcgccgccagctccccgcgcccaccccggagttggtggcgcagaggcgggaggcggaggcgggagggcgggcgctggcaccgggaacgcccgagcgccggcagagagcgcggagagcgcgacacgtgcggcccagagcaccggggccacccggtccccgcaggcccgggaccgcgcccgctggcaggcgacacgtggaagaatacggagttctataccagagttgattgttgatggcacatacttttagaggatgctcattggcatttatgtttataatcacgtggctgttgattaaagcaaaaatagatgcgtgcaagagaggcgatgtgactgtgaagccttcccatgtaattttacttggatccactgtcaatattacatgctctttgaagcccagacaaggctgctttcactattccagacgtaacaagttaatcctgtacaagtttgacagaagaatcaattttcaccatggccactccctcaattctcaagtcacaggtcttccccttggtacaaccttgtttgtctgcaaactggcctgtatcaatagtgatgaaattcaaatatgtggagcagagatcttcgttggtgttgctccagaacagcctcaaaatttatcctgcatacagaagggagaacaggggactgtggcctgcacctgggaaagaggacgagacacccacttatacactgagtatactctacagctaagtggaccaaaaaatttaacctggcagaagcaatgtaaagacatttattgtgactatttggactttggaatcaacctcacccctgaatcacctgaatccaatttcacagccaaggttactgctgtcaatagtcttggaagctcctcttcacttccatccacattcacattcttggacatagtgaggcctcttcctccgtgggacattagaatcaaatttcaaaaggcttctgtgagcagatgtaccctttattggagagatgagggactggtactgcttaatcgactcagatatcggcccagtaacagcaggctctggaatatggttaatgttacaaaggccaaaggaagacatgatttgctggatctgaaaccatttacagaatatgaatttcagatttcctctaagctacatctttataagggaagttggagtgattggagtgaatcattgagagcacaaacaccagaagaagagcctactgggatgttagatgtctggtacatgaaacggcacattgactacagtagacaacagatttctcttttctggaagaatctgagtgtctcagaggcaagaggaaaaattctccactatcaggtgaccttgcaggagctgacaggagggaaagccatgacacagaacatcacaggacacacctcctggaccacagtcattcctagaaccggaaattgggctgtggctgtgtctgcagcaaattcaaaaggcagttctctgcccactcgtattaacataatgaacctgtgtgaggcagggttgctggctcctcgccaggtctctgcaaactcagagggcatggacaacattctggtgacttggcagcctcccaggaaagatccctctgctgttcaggagtacgtggtggaatggagagagctccatccagggggtgacacacaggtccctctaaactggctacggagtcgaccctacaatgtgtctgctctgatttcagagaacataaaatcctacatctgttatgaaatccgtgtgtatgcactctcaggggatcaaggaggatgcagctccatcctgggtaactctaagcacaaagcaccactgagtggcccccacattaatgccatcacagaggaaaaggggagcattttaatttcatggaacagcattccagtccaggagcaaatgggctgcctcctccattataggatatactggaaggaacgggactccaactcccagcctcagctctgtgaaattccctacagagtctcccaaaattcacatccaataaacagcctgcagccccgagtgacatatgtcctgtggatgacagctctgacagctgctggtgaaagttcccacggaaatgagagggaattttgtctgcaaggagaagacacagctgcccttggacaggctcctgatagactggcccacgcctgaagatcctgaaccgctggtcatcagtgaagtccttcatcaagtgaccccagttttcagacatcccccctgctccaactggccacaaagggaaaaaggaatccaaggtcatcaggcctctgagaaagacatgatgcacagtgcctcaagcccaccacctccaagagctctccaagctgagagcagacaactggtggatctgtacaaggtgctggagagcaggggctccgacccaaagcccgaaaacccagcctgtccctggacggtgctcccagcaggtgaccttcccacccatgatggctacttaccctccaacatagatgacctcccctcacatgaggcacctctcgctgactctctggaagaactggagcctcagcacatctccctttctgttttcccctcaagttctcttcacccactcaccttctcctgtggtgataagctgactctggatcagttaaagatgaggtgtgactccctcatgctctgagtggtgaggcttcaagccttaaagtcagtgtgccctcaaccagcacagcctgccccaattcccccagcccctgctccagcagctgtcatctctgggtgccaccatcggtctggctgcagctagaggacaggcaagccagctctgggggagtcttaggaactgggagttggtcttcactcagatgcctcatcttgcctttcccagggccttaaaattacatccttcactgtgtggacctagagactccaacttgaattcctagtaactttcttggtatgctggccagaaagggaaatgaggaggagagtagaaaccacagctcttagtagtaatggcatacagtctagaggaccattcatgcaatgactatttctaaagcacctgctacacagcaggctgtacacagcagatcagtactgttcaacagaacttcctgagatgatggaaatgttctacctctgcactcactgtccagtacattagacactaggcacattggctgttaatcacttggaatgtgtttagcttgactgaggaattaaattttgattgtaaatttaaatcgccacacatggctagtggctactgtattggagtgcacagctctagatggctcctagattattgagagccttcaaaacaaatcaacctagttctatagatgaagacataaaagacactggtaaacaccaaggtaaaagggcccccaaggtggtcatgactggtctcatttgcagaagtctaagaatgtacctttttctggccgggcgtggtagctcatgcctgtaatcccagcactttgggaggctga

SEQ ID NO: 143815 - DNA, 1522 bp, Homo sapiens
  Payload ID: 8419
  Gene Symbol: IL12A
  Gene Name: interleukin 12A
  Uniprot ID: P29459
  ENST ID: ENST00000305579
  CDS Start-End: 308-1069
acggggcgtccggctaaggccggggacccagggtggtgggcggggtgtcccgcccgcctgtggaccccgcgcagtaactgcgaacatttcgctttcattttgggccgagctggaggcggcggggccgtcccggaacggctgcggccgggcaccccgggagttaatccgaaagcgccgcaagccccgcgggccggccgcaccgcacgtgtcaccgagaagctgatgtagagagagacacagaaggagacagaaagcaagagaccagagtcccgggaaagtcctgccgcgcctcgggacaattataaaaatgtggccccctgggtcagcctcccagccaccgccctcacctgccgcggccacaggtctgcatccagcggctcgccctgtgtccctgcagtgccggctcagcatgtgtccagcgcgcagcctcctccttgtggctaccctggtcctcctggaccacctcagtttggccagaaacctccccgtggccactccagacccaggaatgttcccatgccttcaccactcccaaaacctgctgagggccgtcagcaacatgctccagaaggccagacaaactctagaattttacccttgcacttctgaagagattgatcatgaagatatcacaaaagataaaaccagcacagtggaggcctgtttaccattggaattaaccaagaatgagagttgcctaaattccagagagacctctttcataactaatgggagttgcctggcctccagaaagacctcttttatgatggccctgtgccttagtagtatttatgaagacttgaagatgtaccaggtggagttcaagaccatgaatgcaaagcttctgatggatcctaagaggcagatctttctagatcaaaacatgctggcagttattgatgagctgatgcaggccctgaatttcaacagtgagactgtgccacaaaaatcctcccttgaagaaccggatttttataaaactaaaatcaagctctgcatacttcttcatgctttcagaattcgggcagtgactattgatagagtgatgagctatctgaatgcttcctaaaaagcgaggtccctccaaaccgttgtcatttttataaaactttgaaatgaggaaactttgataggatgtggattaagaactagggagggggaaagaaggatgggactattacatccacatgatacctctgatcaagtatttttgacatttactgtggataaattgtttttaagttttcatgaatgaattgctaagaagggaaaatatccatcctgaaggtgtttttcattcactttaatagaagggcaaatatttataagctatttctgtaccaaagtgtttgtggaaacaaacatgtaagcataacttattttaaaatatttatttatataacttggtaatcatgaaagcatctgagctaacttatatttatttatgttatatttattaaattatttatcaagtgtatttgaaaaatatttttaagtgttctaaaaataaaagtattgaatt

SEQ ID NO: 143816 - DNA, 1283 bp, Homo sapiens
  Payload ID: 8419
  Gene Symbol: IL12A
  Gene Name: interleukin 12A
  ENST ID: ENST00000466512
  CDS Start-End: 104-823
cgtgtcaccgagaagctgatgtagagagagacacagaaggagacagaaagcaagagaccagagtcccgggaaagtcctgccgcgcctcgggacaattataaaaatgtggccccctgggtcagcctcccagccaccgccctcacctgccgcggccacaggtctgcatccagcggctcgccctgtgtccctgcagtgccggctcagcatgtgtccagcgcgcagcctcctccttgtggctaccctggtcctcctggaccacctcagtttggccagaaacctccccgtggccactccagacccaggaatgttcccatgccttcaccactcccaaaacctgctgagggccgtcagcaacatgctccagaaggccagacaaactctagaattttacccttgcacttctgaagagattgatcatgaagatatcacaaaagataaaaccagcacagtggaggcctgtttaccattggaattaaccaagaatgggagttgcctggcctccagaaagacctcttttatgatggccctgtgccttagtagtatttatgaagacttgaagatgtaccaggtggagttcaagaccatgaatgcaaagcttctgatggatcctaagaggcagatctttctagatcaaaacatgctggcagttattgatgagctgatgcaggccctgaatttcaacagtgagactgtgccacaaaaatcctcccttgaagaaccggatttttataaaactaaaatcaagctctgcatacttcttcatgctttcagaattcgggcagtgactattgatagagtgatgagctatctgaatgcttcctaaaaagcgaggtccctccaaaccgttgtcatttttataaaactttgaaatgaggaaactttgataggatgtggattaagaactagggagggggaaagaaggatgggactattacatccacatgatacctctgatcaagtatttttgacatttactgtggataaattgtttttaagttttcatgaatgaattgctaagaagggaaaatatccatcctgaaggtgtttttcattcactttaatagaagggcaaatatttataagctatttctgtaccaaagtgtttgtggaaacaaacatgtaagcataacttattttaaaatatttatttatataacttggtaatcatgaaagcatctgagctaacttatatttatttatgttatatttattaaattatttatcaagtgtatttgaaaaatatttttaagtgttctaaaaataaaagtattgaattaaagtga

SEQ ID NO: 143817 - DNA, 863 bp, Homo sapiens
  Payload ID: 8419
  Gene Symbol: IL12A
  Gene Name: interleukin 12A
  ENST ID: ENST00000480787
  CDS Start-End: 104-751
cgtgtcaccgagaagctgatgtagagagagacacagaaggagacagaaagcaagagaccagagtcccgggaaagtcctgccgcgcctcgggacaattataaaaatgtggccccctgggtcagcctcccagccaccgccctcacctgccgcggccacaggtctgcatccagcggctcgccctgtgtccctgcagtgccggctcagcatgtgtccagcgcgcagcctcctccttgtggctaccctggtcctcctggaccacctcagtttggccagaaacctccccgtggccactccagacccaggaatgttcccatgccttcaccactcccaaaacctgctgagggccgtcagcaacatgctccagaagaatgagagttgcctaaattccagagagacctctttcataactaatgggagttgcctggcctccagaaagacctcttttatgatggccctgtgccttagtagtatttatgaagacttgaagatgtaccaggtggagttcaagaccatgaatgcaaagcttctgatggatcctaagaggcagatctttctagatcaaaacatgctggcagttattgatgagctgatgcaggccctgaatttcaacagtgagactgtgccacaaaaatcctcccttgaagaaccggatttttataaaactaaaatcaagctctgcatacttcttcatgctttcagaattcgggcagtgactattgatagagtgatgagctatctgaatgcttcctaaaaagcgaggtccctccaaaccgttgtcatttttataaaactttgaaatgaggaaactttgataggatgtggattaagaactagggagggggaaagaaggatgggactattac

SEQ ID NO: 143818 - DNA, 2761 bp, Homo sapiens
  Payload ID: 8420
  Gene Symbol: IL12B
  Gene Name: interleukin 12B
  Uniprot ID: P29460
  ENST ID: ENST00000231228
  CDS Start-End: 457-1443
gggcatacagttgttccatcccgacatgaactcagcctcccgtctgaccgccccttggccttccttcttcctcgatctgtggaacccagggaatctgcctagtgctgtctccaagcaccttggccatgatgtaaacccagagaaattagcatctccatctccttccttattccccacccaaaagtcatttcctcttagttcattacctgggattttgatgtctatgttccctcctcgttattgatacacacacagagagagacaaacaaaaaaggaacttcttgaaattcccccagaaggttttgagagttgttttcaatgttgcaacaagtcagtttctagtttaagtttccatcagaaaggagtagagtatataagttccagtaccagcaacagcagcagaagaaacaacatctgtttcagggccattggactctccgtcctgcccagagcaagatgtgtcaccagcagttggtcatctcttggttttccctggtttttctggcatctcccctcgtggccatatgggaactgaagaaagatgtttatgtcgtagaattggattggtatccggatgcccctggagaaatggtggtcctcacctgtgacacccctgaagaagatggtatcacctggaccttggaccagagcagtgaggtcttaggctctggcaaaaccctgaccatccaagtcaaagagtttggagatgctggccagtacacctgtcacaaaggaggcgaggttctaagccattcgctcctgctgcttcacaaaaaggaagatggaatttggtccactgatattttaaaggaccagaaagaacccaaaaataagacctttctaagatgcgaggccaagaattattctggacgtttcacctgctggtggctgacgacaatcagtactgatttgacattcagtgtcaaaagcagcagaggctcttctgacccccaaggggtgacgtgcggagctgctacactctctgcagagagagtcagaggggacaacaaggagtatgagtactcagtggagtgccaggaggacagtgcctgcccagctgctgaggagagtctgcccattgaggtcatggtggatgccgttcacaagctcaagtatgaaaactacaccagcagcttcttcatcagggacatcatcaaacctgacccacccaagaacttgcagctgaagccattaaagaattctcggcaggtggaggtcagctgggagtaccctgacacctggagtactccacattcctacttctccctgacattctgcgttcaggtccagggcaagagcaagagagaaaagaaagatagagtcttcacggacaagacctcagccacggtcatctgccgcaaaaatgccagcattagcgtgcgggcccaggaccgctactatagctcatcttggagcgaatgggcatctgtgccctgcagttaggttctgatccaggatgaaaatttggaggaaaagtggaagatattaagcaaaatgtttaaagacacaacggaatagacccaaaaagataatttctatctgatttgctttaaaacgtttttttaggatcacaatgatatctttgctgtatttgtatagttagatgctaaatgctcattgaaacaatcagctaatttatgtatagattttccagctctcaagttgccatgggccttcatgctatttaaatatttaagtaatttatgtatttattagtatattactgttatttaacgtttgtctgccaggatgtatggaatgtttcatactcttatgacctgatccatcaggatcagtccctattatgcaaaatgtgaatttaattttatttgtactgacaacttttcaagcaaggctgcaagtacatcagttttatgacaatcaggaagaatgcagtgttctgataccagtgccatcatacacttgtgatggatgggaacgcaagagatacttacatggaaacctgacaatgcaaacctgttgagaagatccaggagaacaagatgctagttcccatgtctgtgaagacttcctggagatggtgttgataaagcaatttagggccacttacacttctaagcaagtttaatctttggatgcctgaattttaaaagggctagaaaaaaatgattgaccagcctgggaaacataacaagaccccgtctctacaaaaaaaatttaaaattagccaggcgtggtggctcatgcttgtggtcccagctgttcaggaggatgaggcaggaggatctcttgagcccaggaggtcaaggctatggtgagccgtgattgtgccactgcataccagcctaggtgacagaatgagaccctgtctcaaaaaaaaaaatgattgaaattaaaattcagctttagcttccatggcagtcctcacccccacctctctaaaagacacaggaggatgacacagaaacaccgtaagtgtctggaaggcaaaaagatcttaagattcaagagagaggacaagtagttatggctaaggacatgaaattgtcagaatggcaggtggcttcttaacagccctgtgagaagcagacagatgcaaagaaaatctggaatccctttctcattagcatgaatgaacctgatacacaattatgaccagaaaatatggctccatgaaggtgctacttttaagtaatgtatgtgcgctctgtaaagtgattacatttgtttcctgtttgtttatttatttatttatttttgcattctgaggctgaactaataaaaactcttctttgtaatc

SEQ ID NO: 143819 - DNA, 1283 bp, Homo sapiens
  Payload ID: 8421
  Gene Symbol: IL13
  Gene Name: interleukin 13
  Uniprot ID: P35225
  ENST ID: ENST00000304506
  CDS Start-End: 15-455
aagccacccagcctatgcatccgctcctcaatcctctcctgttggcactgggcctcatggcgcttttgttgaccacggtcattgctctcacttgccttggcggctttgcctccccaggccctgtgcctccctctacagccctcagggagctcattgaggagctggtcaacatcacccagaaccagaaggctccgctctgcaatggcagcatggtatggagcatcaacctgacagctggcatgtactgtgcagccctggaatccctgatcaacgtgtcaggctgcagtgccatcgagaagacccagaggatgctgagcggattctgcccgcacaaggtctcagctgggcagttttccagcttgcatgtccgagacaccaaaatcgaggtggcccagtttgtaaaggacctgctcttacatttaaagaaactttttcgcgagggacagttcaactgaaacttcgaaagcatcattatttgcagagacaggacctgactattgaagttgcagattcatttttctttctgatgtcaaaaatgtcttgggtaggcgggaaggagggttagggaggggtaaaattccttagcttagacctcagcctgtgctgcccgtcttcagcctagccgacctcagccttccccttgcccagggctcagcctggtgggcctcctctgtccagggccctgagctcggtggacccagggatgacatgtccctacacccctcccctgccctagagcacactgtagcattacagtgggtgccccccttgccagacatgtggtgggacagggacccacttcacacacaggcaactgaggcagacagcagctcaggcacacttcttcttggtcttatttattattgtgtgttatttaaatgagtgtgtttgtcaccgttggggattggggaagactgtggctgctagcacttggagccaagggttcagagactcagggccccagcactaaagcagtggacaccaggagtccctggtaataagtactgtgtacagaattctgctacctcactggggtcctggggcctcggagcctcatccgaggcagggtcaggagaggggcagaacagccgctcctgtctgccagccagcagccagctctcagccaacgagtaatttattgtttttccttgtatttaaatattaaatatgttagcaaagagttaatatatagaagggtaccttgaacactgggggaggggacattgaacaagttgtttcattgactatcaaactgaagccagaaataaagttggtgacagata

SEQ ID NO: 143820 - DNA, 498 bp, Homo sapiens
  Payload ID: 8421
  Gene Symbol: IL13
  Gene Name: interleukin 13
  ENST ID: ENST00000617259
  CDS Start-End: 57-491
aagccacccagcctatgcatccgctcctcaatcctctcctgttggcactgggcctcatggcgcttttgttgaccacggtcattgctctcacttgccttggcggctttgcctccccaggccctgtgcctccctctacagccctcagggagctcattgaggagctggtcaacatcacccagaaccagaaggctccgctctgcaatggcagcatggtatggagcatcaacctgacagctggcatgtactgtgcagccctggaatccctgatcaacgtgtcaggctgcagtgccatcgagaagacccagaggatgctgagcggattctgcccgcacaaggtctcagctgggcagttttccagcttgcatgtccgagacaccaaaatcgaggtggcccagtttgtaaaggacctgctcttacatttaaagaaactttttcgcgagggacagttcaacaacttcgaaagcatcattatttgcagagacaggacctgactattga

SEQ ID NO: 143821 - DNA, 1096 bp, Homo sapiens
  Payload ID: 8422
  Gene Symbol: IL13RA1
  Gene Name: interleukin 13 receptor, alpha 1
  Uniprot ID: P78552
  ENST ID: ENST00000371642
  CDS Start-End: 38-877
ggctccagcccggccgggctccgaggcgagaggctgcatggagtggccggcgcggctctgcgggctgtgggcgctgctgctctgcgccggcggcgggggcgggggcgggggcgccgcgcctacggaaactcagccacctgtgacaaatttgagtgtctctgttgaaaacctctgcacagtaatatggacatggaatccacccgagggagccagctcaaattgtagtctatggtattttagtcattttggcgacaaacaagataagaaaatagctccggaaactcgtcgttcaatagaagtacccctgaatgagaggatttgtctgcaagtggggtcccagtgtagcaccaatgagagtgagaagcctagcattttggttgaaaaatgcatctcacccccagaaggtgatcctgagtctgctgtgactgagcttcaatgcatttggcacaacctgagctacatgaagtgttcttggctccctggaaggaataccagtcccgacactaactatactctctactattggcacagaagcctggaaaaaattcatcaatgtgaaaacatctttagagaaggccaatactttggttgttcctttgatctgaccaaagtgaaggattccagttttgaacaacacagtgtccaaataatggtcaaggataatgcaggaaaaattaaaccatccttcaatatagtgcctttaacttcccgtgtgaaacctgatcctccacatattaaaaacctctccttccacaatgatgacctatatgtgcaatgggagaatccacagaattttattagcagatgcctattttatgaagtagaagtcaataacagccaaactgagacacataatgttttctacgtaaggttttaaaattattgtttttatttggctatttttcttttacttgaatttcttacattgaaatatcaatgaaacatagctcttacatttgtcaccttatgatgatgatggtaatgaaacttcttgtctaaaataaggcatggtggaagatttgaagatttatggtatgatagtatcagctgcaagtttcaagccatttattcatctgtaagcttcttagaaaggcct

SEQ ID NO: 143822 - DNA, 4036 bp, Homo sapiens
  Payload ID: 8422
  Gene Symbol: IL13RA1
  Gene Name: interleukin 13 receptor, alpha 1
  Uniprot ID: P78552
  ENST ID: ENST00000371666
  CDS Start-End: 68-1351
agagggagcgaaggaggcggggactgccaaggctccagcccggccgggctccgaggcgagaggctgcatggagtggccggcgcggctctgcgggctgtgggcgctgctgctctgcgccggcggcgggggcgggggcgggggcgccgcgcctacggaaactcagccacctgtgacaaatttgagtgtctctgttgaaaacctctgcacagtaatatggacatggaatccacccgagggagccagctcaaattgtagtctatggtattttagtcattttggcgacaaacaagataagaaaatagctccggaaactcgtcgttcaatagaagtacccctgaatgagaggatttgtctgcaagtggggtcccagtgtagcaccaatgagagtgagaagcctagcattttggttgaaaaatgcatctcacccccagaaggtgatcctgagtctgctgtgactgagcttcaatgcatttggcacaacctgagctacatgaagtgttcttggctccctggaaggaataccagtcccgacactaactatactctctactattggcacagaagcctggaaaaaattcatcaatgtgaaaacatctttagagaaggccaatactttggttgttcctttgatctgaccaaagtgaaggattccagttttgaacaacacagtgtccaaataatggtcaaggataatgcaggaaaaattaaaccatccttcaatatagtgcctttaacttcccgtgtgaaacctgatcctccacatattaaaaacctctccttccacaatgatgacctatatgtgcaatgggagaatccacagaattttattagcagatgcctattttatgaagtagaagtcaataacagccaaactgagacacataatgttttctacgtccaagaggctaaatgtgagaatccagaatttgagagaaatgtggagaatacatcttgtttcatggtccctggtgttcttcctgatactttgaacacagtcagaataagagtcaaaacaaataagttatgctatgaggatgacaaactctggagtaattggagccaagaaatgagtataggtaagaagcgcaattccacactctacataaccatgttactcattgttccagtcatcgtcgcaggtgcaatcatagtactcctgctttacctaaaaaggctcaagattattatattccctccaattcctgatcctggcaagatttttaaagaaatgtttggagaccagaatgatgatactctgcactggaagaagtacgacatctatgagaagcaaaccaaggaggaaaccgactctgtagtgctgatagaaaacctgaagaaagcctctcagtgatggagataatttatttttaccttcactgtgaccttgagaagattcttcccattctccatttgttatctgggaacttattaaatggaaactgaaactactgcaccatttaaaaacaggcagctcataagagccacaggtctttatgttgagtcgcgcaccgaaaaactaaaaataatgggcgctttggagaagagtgtggagtcattctcattgaattataaaagccagcaggcttcaaactaggggacaaagcaaaaagtgatgatagtggtggagttaatcttatcaagagttgtgacaacttcctgagggatctatacttgctttgtgttctttgtgtcaacatgaacaaattttatttgtaggggaactcatttggggtgcaaatgctaatgtcaaacttgagtcacaaagaacatgtagaaaacaaaatggataaaatctgatatgtattgtttgggatcctattgaaccatgtttgtggctattaaaactcttttaacagtctgggctgggtccggtggctcacgcctgtaatcccagcaatttgggagtccgaggcgggcggatcactcgaggtcaggagttccagaccagcctgaccaaaatggtgaaacctcctctctactaaaactacaaaaattaactgggtgtggtggcgcgtgcctgtaatcccagctactcgggaagctgaggcaggtgaattgtttgaacctgggaggtggaggttgcagtgagcagagatcacaccactgcactctagcctgggtgacagagcaagactctgtctaaaaaacaaaacaaaacaaaacaaaacaaaaaaacctcttaatattctggagtcatcattcccttcgacagcattttcctctgctttgaaagccccagaaatcagtgttggccatgatgacaactacagaaaaaccagaggcagcttctttgccaagacctttcaaagccattttaggctgttaggggcagtggaggtagaatgactccttgggtattagagtttcaaccatgaagtctctaacaatgtattttcttcacctctgctactcaagtagcatttactgtgtctttggtttgtgctaggcccccgggtgtgaagcacagaccccttccaggggtttacagtctatttgagactcctcagttcttgccacttttttttttaatctccaccagtcatttttcagaccttttaactcctcaattccaacactgatttccccttttgcattctccctccttcccttccttgtagccttttgactttcattggaaattaggatgtaaatctgctcaggagacctggaggagcagaggataattagcatctcaggttaagtgtgagtaatctgagaaacaatgactaattcttgcatattttgtaacttccatgtgagggttttcagcattgatatttgtgcattttctaaacagagatgaggtggtatcttcacgtagaacattggtattcgcttgagaaaaaaagaatagttgaacctatttctctttctttacaagatgggtccaggattcctcttttctctgccataaatgattaattaaatagcttttgtgtcttacattggtagccagccagccaaggctctgtttatgcttttggggggcatatattgggttccattctcacctatccacacaacatatccgtatatatcccctctactcttacttcccccaaatttaaagaagtatgggaaatgagaggcatttcccccaccccatttctctcctcacacacagactcatattactggtaggaacttgagaactttatttccaagttgttcaaacatttaccaatcatattaatacaatgatgctatttgcaattcctgctcctaggggaggggagataagaaaccctcactctctacaggtttgggtacaagtggcaacctgcttccatggccgtgtagaagcatggtgccctggcttctctgaggaagctggggttcatgacaatggcagatgtaaagttattcttgaagtcagattgaggctgggagacagccgtagtagatgttctactttgttctgctgttctctagaaagaatatttggttttcctgtataggaatgagattaattcctttccaggtattttataattctgggaagcaaaacccatgcctccccctagccatttttactgttatcctatttagatggccatgaagaggatgctgtgaaattcccaacaaacattgatgctgacagtcatgcagtctgggagtggggaagtgatcttttgttcccatcctcttcttttagcagtaaaatagctgagggaaaagggagggaaaaggaagttatgggaatacctgtggtggttgtgatccctaggtcttgggagctcttggaggtgtctgtatcagtggatttcccatcccctgtgggaaattagtaggctcatttactgttttaggtctagcctatgtggattttttcctaacatacctaagcaaacccagtgtcaggatggtaattcttattctttcgttcagttaagtttttcccttcatctgggcactgaagggatatgtgaaacaatgttaacatttttggtagtcttcaaccagggattgtttctgtttaacttcttataggaaagcttgagtaaaataaatattgtctttttgtatgtcacccaaa

SEQ ID NO: 143823 - DNA, 1371 bp, Homo sapiens
  Payload ID: 8423
  Gene Symbol: IL13RA2
  Gene Name: interleukin 13 receptor, alpha 2
  Uniprot ID: Q14627
  ENST ID: ENST00000243213
  CDS Start-End: 126-1268
gtaagaacactctcgtgagtctaacggtcttccggatgaaggctatttgaagtcgccataacctggtcagaagtgtgcctgtcggcggggagagaggcaatatcaaggttttaaatctcggagaaatggctttcgtttgcttggctatcggatgcttatatacctttctgataagcacaacatttggctgtacttcatcttcagacaccgagataaaagttaaccctcctcaggattttgagatagtggatcccggatacttaggttatctctatttgcaatggcaacccccactgtctctggatcattttaaggaatgcacagtggaatatgaactaaaataccgaaacattggtagtgaaacatggaagaccatcattactaagaatctacattacaaagatgggtttgatcttaacaagggcattgaagcgaagatacacacgcttttaccatggcaatgcacaaatggatcagaagttcaaagttcctgggcagaaactacttattggatatcaccacaaggaattccagaaactaaagttcaggatatggattgcgtatattacaattggcaatatttactctgttcttggaaacctggcataggtgtacttcttgataccaattacaacttgttttactggtatgagggcttggatcatgcattacagtgtgttgattacatcaaggctgatggacaaaatataggatgcagatttccctatttggaggcatcagactataaagatttctatatttgtgttaatggatcatcagagaacaagcctatcagatccagttatttcacttttcagcttcaaaatatagttaaacctttgccgccagtctatcttacttttactcgggagagttcatgtgaaattaagctgaaatggagcatacctttgggacctattccagcaaggtgttttgattatgaaattgagatcagagaagatgatactaccttggtgactgctacagttgaaaatgaaacatacaccttgaaaacaacaaatgaaacccgacaattatgctttgtagtaagaagcaaagtgaatatttattgctcagatgacggaatttggagtgagtggagtgataaacaatgctgggaaggtgaagacctatcgaagaaaactttgctacgtttctggctaccatttggtttcatcttaatattagttatatttgtaaccggtctgcttttgcgtaagccaaacacctacccaaaaatgattccagaatttttctgtgatacatgaagactttccatatcaagagacatggtattgactcaacagtttccagtcatggccaaatgttcaatatgagtctcaataaactgaatttttcttgcgaatgttg

SEQ ID NO: 143824 - DNA, 1498 bp, Homo sapiens
  Payload ID: 8423
  Gene Symbol: IL13RA2
  Gene Name: interleukin 13 receptor, alpha 2
  Uniprot ID: Q14627
  ENST ID: ENST00000371936
  CDS Start-End: 251-1393
taaaaatttgatcctaagattctataaagtagccattgaggcttaccaaagttacaatattacagatggatcaggggagacggttgctatggagatggatgatatcataactccattgtgaaccagtaagaacactctcgtgagtctaacggtcttccggatgaaggctatttgaagtcgccataacctggtcagaagtgtgcctgtcggcggggagagaggcaatatcaaggttttaaatctcggagaaatggctttcgtttgcttggctatcggatgcttatatacctttctgataagcacaacatttggctgtacttcatcttcagacaccgagataaaagttaaccctcctcaggattttgagatagtggatcccggatacttaggttatctctatttgcaatggcaacccccactgtctctggatcattttaaggaatgcacagtggaatatgaactaaaataccgaaacattggtagtgaaacatggaagaccatcattactaagaatctacattacaaagatgggtttgatcttaacaagggcattgaagcgaagatacacacgcttttaccatggcaatgcacaaatggatcagaagttcaaagttcctgggcagaaactacttattggatatcaccacaaggaattccagaaactaaagttcaggatatggattgcgtatattacaattggcaatatttactctgttcttggaaacctggcataggtgtacttcttgataccaattacaacttgttttactggtatgagggcttggatcatgcattacagtgtgttgattacatcaaggctgatggacaaaatataggatgcagatttccctatttggaggcatcagactataaagatttctatatttgtgttaatggatcatcagagaacaagcctatcagatccagttatttcacttttcagcttcaaaatatagttaaacctttgccgccagtctatcttacttttactcgggagagttcatgtgaaattaagctgaaatggagcatacctttgggacctattccagcaaggtgttttgattatgaaattgagatcagagaagatgatactaccttggtgactgctacagttgaaaatgaaacatacaccttgaaaacaacaaatgaaacccgacaattatgctttgtagtaagaagcaaagtgaatatttattgctcagatgacggaatttggagtgagtggagtgataaacaatgctgggaaggtgaagacctatcgaagaaaactttgctacgtttctggctaccatttggtttcatcttaatattagttatatttgtaaccggtctgcttttgcgtaagccaaacacctacccaaaaatgattccagaatttttctgtgatacatgaagactttccatatcaagagacatggtattgactcaacagtttccagtcatggccaaatgttcaatatgagtctcaataaactgaatttttcttgcgaatgttgaa

SEQ ID NO: 143825 - DNA, 2472 bp, Homo sapiens
  Payload ID: 8424
  Gene Symbol: IL15
  Gene Name: interleukin 15
  Uniprot ID: P40933
  ENST ID: ENST00000296545
  CDS Start-End: 845-1333
actccgggtggcaggcgcccgggggaatcccagctgactcgctcactgccttcgaagtccggcgccccccgggagggaactgggtggccgcaccctcccggctgcggtggctgtcgccccccaccctgcagccaggactcgatggaggtacagagctcggcttctttgccttgggaggggagtggtggtggttgaaagggcgatggaattttccccgaaagcctacgcccagggcccctcccagctccagcgttaccctccggtctatcctactggccgagctgccccgccttctcatggggaaaacttagccgcaacttcaatttttggtttttcctttaatgacacttctgaggctctcctagccatcctcccgcttccggaggagcgcagatcgcaggtccctttgcccctggcgtgcgactccctactgcgctgcgctcttacggcgttccaggctgctggctagcgcaaggcgggccgggcaccccgcgctccgctgggagggtgagggacgcgcgtctggcggccccagccaagctgcgggtttctgagaagacgctgtcccgcagccctgagggctgagttctgcacccagtcaagctcaggaaggccaagaaaagaatccattccaatatatggccatgtggctctttggagcaatgttccatcatgttccatgctgctgacgtcacatggagcacagaaatcaatgttagcagatagccagcccatacaagatcgtattgtattgtaggaggcattgtggatggatggctgctggaaaccccttgccatagccagctcttcttcaatacttaaggatttaccgtggctttgagtaatgagaatttcgaaaccacatttgagaagtatttccatccagtgctacttgtgtttacttctaaacagtcattttctaactgaagctggcattcatgtcttcattttgggctgtttcagtgcagggcttcctaaaacagaagccaactgggtgaatgtaataagtgatttgaaaaaaattgaagatcttattcaatctatgcatattgatgctactttatatacggaaagtgatgttcaccccagttgcaaagtaacagcaatgaagtgctttctcttggagttacaagttatttcacttgagtccggagatgcaagtattcatgatacagtagaaaatctgatcatcctagcaaacaacagtttgtcttctaatgggaatgtaacagaatctggatgcaaagaatgtgaggaactggaggaaaaaaatattaaagaatttttgcagagttttgtacatattgtccaaatgttcatcaacacttcttgattgcaattgattctttttaaagtgtttctgttattaacaaacatcactctgctgcttagacataacaaaacactcggcatttcaaatgtgctgtcaaaacaagtttttctgtcaagaagatgatcagaccttggatcagatgaactcttagaaatgaaggcagaaaaatgtcattgagtaatatagtgactatgaacttctctcagacttactttactcatttttttaatttattattgaaattgtacatatttgtggaataatgtaaaatgttgaataaaaatatgtacaagtgttgttttttaagttgcactgatattttacctcttattgcaaaatagcatttgtttaagggtgatagtcaaattatgtattggtggggctgggtaccaatgctgcaggtcaacagctatgctggtaggctcctgccagtgtggaaccactgactactggctctcattgacttccttactaagcatagcaaacagaggaagaatttgttatcagtaagaaaaagaagaactatatgtgaatcctcttctttatactgtaatttagttattgatgtataaagcaactgttatgaaataaagaaattgcaataactggcatataatgtccatcagtaaatcttggtggtggtggcaataataaacttctactgataggtagaatggtgtgcaagcttgtccaatcacggattgcaggccacatgcggcccaggacaactttgaatgtggcccaacacaaattcataaactttcatacatctcgtttttagctcatcagctatcattagcggtagtgtatttaaagtgtggcccaagacaattcttcttattccaatgtggcccagggaaatcaaaagattggatgcccctggtatagaaaactaatagtgacagtgttcatatttcatgctttcccaaatacaggtattttattttcacattctttttgccatgtttatataataataaagaaaaaccctgttgatttgttggagccattgttatctgacagaaaataattgtttatattttttgcactacactgtctaaaattagcaagctctcttctaatggaactgtaagaaagatgaaatatttttgttttattataaatttatttcaccttaa

SEQ ID NO: 143826 - DNA, 1447 bp, Homo sapiens
  Payload ID: 8424
  Gene Symbol: IL15
  Gene Name: interleukin 15
  Uniprot ID: P40933
  ENST ID: ENST00000320650
  CDS Start-End: 372-860
gggactccgggtggcaggcgcccgggggaatcccagctgactcgctcactgccttcgaagtccggcgccccccgggagggaactgggtggccgcaccctcccggctgcggtggctgtcgccccccaccctgcagccaggactcgatggagaatccattccaatatatggccatgtggctctttggagcaatgttccatcatgttccatgctgctgacgtcacatggagcacagaaatcaatgttagcagatagccagcccatacaagatcgtattgtattgtaggaggcattgtggatggatggctgctggaaaccccttgccatagccagctcttcttcaatacttaaggatttaccgtggctttgagtaatgagaatttcgaaaccacatttgagaagtatttccatccagtgctacttgtgtttacttctaaacagtcattttctaactgaagctggcattcatgtcttcattttgggctgtttcagtgcagggcttcctaaaacagaagccaactgggtgaatgtaataagtgatttgaaaaaaattgaagatcttattcaatctatgcatattgatgctactttatatacggaaagtgatgttcaccccagttgcaaagtaacagcaatgaagtgctttctcttggagttacaagttatttcacttgagtccggagatgcaagtattcatgatacagtagaaaatctgatcatcctagcaaacaacagtttgtcttctaatgggaatgtaacagaatctggatgcaaagaatgtgaggaactggaggaaaaaaatattaaagaatttttgcagagttttgtacatattgtccaaatgttcatcaacacttcttgattgcaattgattctttttaaagtgtttctgttattaacaaacatcactctgctgcttagacataacaaaacactcggcatttcaaatgtgctgtcaaaacaagtttttctgtcaagaagatgatcagaccttggatcagatgaactcttagaaatgaaggcagaaaaatgtcattgagtaatatagtgactatgaacttctctcagacttactttactcatttttttaatttattattgaaattgtacatatttgtggaataatgtaaaatgttgaataaaaatatgtacaagtgttgttttttaagttgcactgatattttacctcttattgcaaaatagcatttgtttaagggtgatagtcaaattatgtattggtggggctgggtaccaatgctgcaggtcaacagctatgctggtaggctcctgccagtgtggaaccactgactactggctctcattgacttccttactaagcatagcaaacagaggaagaatttgttatcagtaagaaaaagaagaactatatgtgaatcctcttctttatactgtaatttagttattgatgtataaagcaactgttatgaa

SEQ ID NO: 143827 - DNA, 1545 bp, Homo sapiens
  Payload ID: 8424
  Gene Symbol: IL15
  Gene Name: interleukin 15
  Uniprot ID: P40933
  ENST ID: ENST00000394159
  CDS Start-End: 1-408
atggtattgggaaccatagatttgtgcagctgtttcagtgcagggcttcctaaaacagaagccaactgggtgaatgtaataagtgatttgaaaaaaattgaagatcttattcaatctatgcatattgatgctactttatatacggaaagtgatgttcaccccagttgcaaagtaacagcaatgaagtgctttctcttggagttacaagttatttcacttgagtccggagatgcaagtattcatgatacagtagaaaatctgatcatcctagcaaacaacagtttgtcttctaatgggaatgtaacagaatctggatgcaaagaatgtgaggaactggaggaaaaaaatattaaagaatttttgcagagttttgtacatattgtccaaatgttcatcaacacttcttgattgcaattgattctttttaaagtgtttctgttattaacaaacatcactctgctgcttagacataacaaaacactcggcatttcaaatgtgctgtcaaaacaagtttttctgtcaagaagatgatcagaccttggatcagatgaactcttagaaatgaaggcagaaaaatgtcattgagtaatatagtgactatgaacttctctcagacttactttactcatttttttaatttattattgaaattgtacatatttgtggaataatgtaaaatgttgaataaaaatatgtacaagtgttgttttttaagttgcactgatattttacctcttattgcaaaatagcatttgtttaagggtgatagtcaaattatgtattggtggggctgggtaccaatgctgcaggtcaacagctatgctggtaggctcctgccagtgtggaaccactgactactggctctcattgacttccttactaagcatagcaaacagaggaagaatttgttatcagtaagaaaaagaagaactatatgtgaatcctcttctttatactgtaatttagttattgatgtataaagcaactgttatgaaataaagaaattgcaataactggcatataatgtccatcagtaaatcttggtggtggtggcaataataaacttctactgataggtagaatggtgtgcaagcttgtccaatcacggattgcaggccacatgcggcccaggacaactttgaatgtggcccaacacaaattcataaactttcatacatctcgtttttagctcatcagctatcattagcggtagtgtatttaaagtgtggcccaagacaattcttcttattccaatgtggcccagggaaatcaaaagattggatgcccctggtatagaaaactaatagtgacagtgttcatatttcatgctttcccaaatacaggtattttattttcacattctttttgccatgtttatataataataaagaaaaaccctgttgatttgttggagccattgttatctgacagaaaataattgtttatattttttgcactacactgtctaaaattagcaagctctcttctaatggaactgtaagaaagatgaaatatttttgttttattataaatttatttcacctt

SEQ ID NO: 143828 - DNA, 1388 bp, Homo sapiens
  Payload ID: 8424
  Gene Symbol: IL15
  Gene Name: interleukin 15
  Uniprot ID: P40933
  ENST ID: ENST00000514653
  CDS Start-End: 647-1054
cctgcagccaggactcgatggagaatccattccaatatatggccatgtggctctttggagcaatgttccatcatgttccatgctgctgacgtcacatggagcacagaaatcaatgttagcagatagccagcccatacaagatcgttttcaactagtggccccactgtgtccggaattgatgggttcttggtctcactgacttcaagaatgaagccgcggaccctcgcggtgagtgttacagctcttaaggtggcgcatctggagtttgttccttctgatgttcggatgtgttcggagtttcttccttctggtgggttcgtggtctcgctggctcaggagtgaagctacagaccttcgcggaggcattgtggatggatggctgctggaaaccccttgccatagccagctcttcttcaatacttaaggatttaccgtggctttgagtaatgagaatttcgaaaccacatttgagaagtatttccatccagtgctacttgtgtttacttctaaacagtcattttctaactgaagctggcattcatgtcttcattttgggatgcagctaatatacccagttggcccaaagcacctaacctatagttatataatctgactctcagttcagttttactctactaatgccttcatggtattgggaaccatagatttgtgcagctgtttcagtgcagggcttcctaaaacagaagccaactgggtgaatgtaataagtgatttgaaaaaaattgaagatcttattcaatctatgcatattgatgctactttatatacggaaagtgatgttcaccccagttgcaaagtaacagcaatgaagtgctttctcttggagttacaagttatttcacttgagtccggagatgcaagtattcatgatacagtagaaaatctgatcatcctagcaaacaacagtttgtcttctaatgggaatgtaacagaatctggatgcaaagaatgtgaggaactggaggaaaaaaatattaaagaatttttgcagagttttgtacatattgtccaaatgttcatcaacacttcttgattgcaattgattctttttaaagtgtttctgttattaacaaacatcactctgctgcttagacataacaaaacactcggcatttcaaatgtgctgtcaaaacaagtttttctgtcaagaagatgatcagaccttggatcagatgaactcttagaaatgaaggcagaaaaatgtcattgagtaatatagtgactatgaacttctctcagacttactttactcatttttttaatttattattgaaattgtacatatttgtggaataatgtaaaatgttgaataaaaatatgtacaagtgttgttttttaagttgcactgatattttacctcttattgc

SEQ ID NO: 143829 - DNA, 1355 bp, Homo sapiens
  Payload ID: 8424
  Gene Symbol: IL15
  Gene Name: interleukin 15
  Uniprot ID: P40933
  ENST ID: ENST00000529613
  CDS Start-End: 592-1080
cacttctgaggctctcctagccatcctcccgcttccggaggagcgcagatcgcaggtccctttgcccctggcgtgcgactccctactgcgctgcgctcttacggcgttccaggctgctggctagcgcaaggcgggccgggcaccccgcgctccgctgggagggtgagggacgcgcgtctggcggccccagccaagctgcgggtttctgagaagacgctgtcccgcagccctgagggctgagttctgcacccagtcaagctcaggaaggccaagaaaagtttcaactagtggccccactgtgtccggaattgatgggttcttggtctcactgacttcaagaatgaagccgcggaccctcgcggtgagtgttacagctcttaaggtggcgcatctggagtttgttccttctgatgttcggatgtgttcggagtttcttccttctggtgggttcgtggtctcgctggctcaggagtgaagctacagaccttcgcgattgtattgtaggaggcattgtggatggatggctgctggaaaccccttgccatagccagctcttcttcaatacttaaggatttaccgtggctttgagtaatgagaatttcgaaaccacatttgagaagtatttccatccagtgctacttgtgtttacttctaaacagtcattttctaactgaagctggcattcatgtcttcattttgggctgtttcagtgcagggcttcctaaaacagaagccaactgggtgaatgtaataagtgatttgaaaaaaattgaagatcttattcaatctatgcatattgatgctactttatatacggaaagtgatgttcaccccagttgcaaagtaacagcaatgaagtgctttctcttggagttacaagttatttcacttgagtccggagatgcaagtattcatgatacagtagaaaatctgatcatcctagcaaacaacagtttgtcttctaatgggaatgtaacagaatctggatgcaaagaatgtgaggaactggaggaaaaaaatattaaagaatttttgcagagttttgtacatattgtccaaatgttcatcaacacttcttgattgcaattgattctttttaaagtgtttctgttattaacaaacatcactctgctgcttagacataacaaaacactcggcatttcaaatgtgctgtcaaaacaagtttttctgtcaagaagatgatcagaccttggatcagatgaactcttagaaatgaaggcagaaaaatgtcattgagtaatatagtgactatgaacttctctcagacttactttactcatttttttaatttattattgaaattgtacatatttgtggaataatgtaaaatgttg

SEQ ID NO: 143830 - DNA, 6026 bp, Homo sapiens
  Payload ID: 8424
  Gene Symbol: IL15
  Gene Name: interleukin 15
  Uniprot ID: P40933
  ENST ID: ENST00000477265
  CDS Start-End: 5009-5416
catttgatgtgtccatcattcccttttgctggatatacttcccttgactgacttctagaatatgatactcttcattttccccttattcagtagtcattccttttgatttttctttcctggtccttcttttataatccttgacctaattaatactgaagtatcccatgctcaggttttggtccttttctctacctacatcactccctcatgagcactctgatgagttgcatatctatttccagttcagacacattcctgaactcgagatttatgtatccaatggcatatttgatatttccttgtgcatatctaatgagcctttcaaactcagcatgtccagaactgaaactcctgacctgtcccctctcctcaaggcatcagctgtgtccaaggcttgcttttttcagttgatgtcagctccatcttctcaggtgttcagaggaaaagactcagagtcattctcattctctttttcctcctgtaccctgcaatctgtctggaaattatattagtcctatcataaaaaatgattccagactctaaccacatgtatctatctccactgctaccccaagcagattcaggtcctcctctcctccacctttctgacctcatctcagactactcttgcccttgctcattccactggcttcttttctgtcccttagactcatagccacacagttgcctctgccctagctattccctctgcttcaaatagtcttcactgagataccaccggggctcacaccctttctatctttaccctgactacccaaaatttcaacctcacccttcttaccttgtttcctttttcctagataatttttcactctctaataaaatacataattataataacttatttgtgcattttctatatggttcatctttctttctgaaatcaagattgtgttctgccatcattgatgtattccaaggtcataaaaaatgcctagcccataataaatattcagtgaatatttactaaatgaatcaaggaaagtgatgttgtcttatagtctctatattctattcagtctcggcttgtcttttctagtggtttgaatgaatggatgatgcatttaacccagaaaaccaatacttgtaaatcttttattcttgtatgtttaattaattttaaatgtgtgattagacaagttaataagcagaacaaaacatcaagtatgttagatcatctttcctcactgggaagaactataatattggtatagaatgtaagatgtttacagttattttcacaagcaatgatttgcttgggaaatagcaatggtgtgagccccgacagtatctgggtgaagaatatttgaagcagaaggaaaatctagagcagaggcaactgtgtgactacgagtctaagggacagttttcactccagaatgaaaactatagagatgcctgcctgcgttaacttgctcacctcactatgtattttccctgggcagtaccatcctgctaggatttcagtgctgccatgagtcagcagtcaccttgcagtgagatccaatcacaagattccaaacaattcctaccctgtgagctccttgaggacagggctgggatttagtctcttttatttcacaggcccagagttctaggatggcagaatggtttcgggtgccaggccccacctggttgctctccatgggcatactgcccagggctgccttgggacttggctccctacattttggtgcagcagtcttcagccaccccaactatggcttaagtggccccagctgcagcttgacccactgcttcacaagatacaggtggtaagccttggtgaaattcatgtagtgttaagcctgcagtctcacagaatacaagagctgagggggcatggcttcctccactttgatttcaaaagatgatgctgacttatttggggcacaggcagagactttgcacaggggtagaaccaccacagagagcccccaacagggcggtgcctcatggagccaaggaaatggggttgccaccaaaatcctagaattatggttaacagtgtagagctgcagtctggaaaagcttcaggcatgagactccaacccatgacagctgaagaataggctgagcctaggaaagctatgggagctgagctgcctgaggccttaggggtccaacccccacccagtgtgcccaggatgcagaatatggagtgaaaggaaattattctccaactttaagatttaatattgttctccctgttgggttttggacttgtttcagatgagttatccctcttttcttgcctatttccccattttagaatgggaatgtctcttctataccttcgcacattgtattttggaagcagatagcttattttgatttcacaggctcgtggttgcagaacatttgccttcaggatgaagtcacacccatatttgatttagataagtattacctagataactcgattaactagatttagataagtattaactaacagtattaagagttaatactggagtgacttttgagcctactaggatggaatgaatatattttgcattgtatgaaggatgtgaatttggcagagaggggagggtaggtgcagaatgctatggtttgaatgcctccaccaaaactcatgttgacatttaattgtgaatgtgacagttttaagaagtgggatctttaacaggtaattaggtatctctttaggcactttcattagacagggccctcatgaatggattaatgcagttatggagggagtgagtttgttattgcatgagtgggctccttattaaagggtgattttggctcagtttcctctctgtctcatgtgcttgctttcacttctacccttctgccacaggatgacccttagcagatgtcagtgccatgcacttgtacttcccagcctccagaactgtgagccaaatgagcttgtgtcccttgtaaattaagtttgtggtgttctcttatagcagcagaaaatggattcaggcagcaagcagagctataaaatacttctttttttttttttttgagatggagtttcacttttgttgcccaggctgtagtgcaaaggcatgatctcggctcaccacaacctctttctcccgggttcaagcaattgtctggcctcagcctcccgagtagctgggattacaggcatgcactatcacacccggctgattttgtatttttttgtaaagacggggtttcaccatgttggtcaggctgatctcaaactcccgacatcaggtgatcctcctgcctcggcctcccaaactgctgggattacaggcacgagccaccatgcccggccaatacttcttttcatctacactggcttccattatcatgattttgttagatacttttgaggacattttctattgcattcctccatgtttggcaaccacactctatggtggagtcttctggctaagcacttagtcttcttttacttataccagcaggatgtagttgagcagggtagtgaaaatccattgtgacattgtaaagcctcactgctataagaggccaggaatgaaattttcattgtttacaaaagtagcttcgtaaggcctaattaagaattatatcacccatggcattgctcaatcccaagtcaatattttttttttttgaaaaatgtggattcaaggataccacaactaaaagggatgtagggaatttaagaggctttggatgaaatgatgaagattacggtaaagttttataaaaaatttgaagcactgagataatatagacaaagggaataattataaaatgagagtgataaggaaggtttgctttaaataaaccaatcaatgagtgatttagatcatatgtaacaggaatattagatttgatatgttcttgtggacaaaaaggtatttctattggatacacctttgtatcttgcttaatacctaaataagtgttagctttttctttctatgagttatagacaatacattttaaagcagccattttttatatttcagaaacatctgaaaagtataataatttaattctttgtgtttatggaacttaattcagtgaatatttatgtcatgggttgtggcagattttggttttttgtggaagaggtcaccatgtatatactattttgaagggcagaaaatagttgtttctatttttgtatattttggttataaactgcttttaatggcatggagttgaatttagggatgtttaatcttcatattcttcacttgatttgagtgagaaaaaataaaattttcttggttataaaattctcaaatgattaacaatggtttctttaaaagactgaagatacatattcagtggctgtagaaatggctactgctattgtaaactggattaacaatcagtacttctacaaatctaagtatttgtttgtttttactttttactagtatgactctggaatttttcaattcagggaaataatagaatagaaaagctttgctaaggcattgtaatcagacagaactggcctcaaatcctggctgtcatgtacttgctatgggcctagagtagcttacctaaatgctactaaccttcctccataccattattgtaaagattaaaggtgatgcatctgttaagtaactaatagagtgcttattaaaaggtaggtgttcaataagtattaattccctccctttctttttcttactagtgcacttgtgtttttaatggatcatactttaccctagattgtattgtaggaggcattgtggatggatggctgctggaaaccccttgccatagccagctcttcttcaatacttaaggatttaccgtggctttgagtaatgagaatttcgaaaccacatttgagaagtatttccatccagtgctacttgtgtttacttctaaacagtcattttctaactgaagctggcattcatgtcttcattttgggatgcagctaatatacccagttggcccaaagcacctaacctatagttatataatctgactctcagttcagttttactctactaatgccttcatggtattgggaaccatagatttgtgcagctgtttcagtgcagggcttcctaaaacagaagccaactgggtgaatgtaataagtgatttgaaaaaaattgaagatcttattcaatctatgcatattgatgctactttatatacggaaagtgatgttcaccccagttgcaaagtaacagcaatgaagtgctttctcttggagttacaagttatttcacttgagtccggagatgcaagtattcatgatacagtagaaaatctgatcatcctagcaaacaacagtttgtcttctaatgggaatgtaacagaatctggatgcaaagaatgtgaggaactggaggaaaaaaatattaaagaatttttgcagagttttgtacatattgtccaaatgttcatcaacacttcttgattgcaattgattctttttaaagtgtttctgttattaacaaacatcactctgctgcttagacataacaaaacactcggcatttcaaatgtgctgtcaaaacaagtttttctgtcaagaagatgatcagaccttggatcagatgaactcttagaaatgaaggcagaaaaatgtcattgagtaatatagtgactatgaacttctctcagacttactttactcatttttttaatttattattgaaattgtacatatttgtggaataatgtaaaatgttgaataaaaatatgtacaagtgttgttttttaagttgcactgatattttacctcttattgcaaaatagcatttgtttaagggtgatagtcaaattatgtattggtggggctgggtaccaatgctgcaggtcaacagctatgctggtaggctcctgccagtgtggaaccactgactactggctctcattgacttccttactaagcatagcaaacagaggaagaatttgttatcagtaagaaaaagaagaactatatgtgaatcctcttctttatactgtaatttagttattgatgtataaagcaactgttatgaaataaagaaattgcaataactggc

SEQ ID NO: 143831 - DNA, 588 bp, Homo sapiens
  Payload ID: 8425
  Gene Symbol: IL15RA
  Gene Name: interleukin 15 receptor, alpha
  Uniprot ID: Q13261
  ENST ID: ENST00000379971
  CDS Start-End: 16-480
tgtggagctgccgccatggccccgcggcgggcgcgcggctgccggaccctcggtctcccggcgctgctactgctgctgctgctccggccgccggcgacgcgggagcccgcagcttcatctcccagctcaaacaacacagcggccacaacagcagctattgtcccgggctcccagctgatgccttcaaaatcaccttccacaggaaccacagagataagcagtcatgagtcctcccacggcaccccctctcagacaacagccaagaactgggaactcacagcatccgcctcccaccagccgccaggtgtgtatccacagggccacagcgacaccactgtggctatctccacgtccactgtcctgctgtgtgggctgagcgctgtgtctctcctggcatgctacctcaagtcaagggcctctgtctgctcctgccatccccgcagtgctggacatacatgctcagtgggaagcgtctgttgatttgagggcaaccccctcctcttttcaaaacctatgaaccacctgctttgcaggcaaactcccccgctggccagcgttgaaatggaagccatggaggctctgccggtg

SEQ ID NO: 143832 - DNA, 1626 bp, Homo sapiens
  Payload ID: 8425
  Gene Symbol: IL15RA
  Gene Name: interleukin 15 receptor, alpha
  Uniprot ID: Q13261
  ENST ID: ENST00000379977
  CDS Start-End: 99-902
tggcggggcggcaggtcccagagcagcgctcgccacctccccccggcctgggcagcgctcgcccggggagtccagcggtgtcctgtggagctgccgccatggccccgcggcgggcgcgcggctgccggaccctcggtctcccggcgctgctactgctgctgctgctccggccgccggcgacgcggggcatcacgtgccctccccccatgtccgtggaacacgcagacatctgggtcaagagctacagcttgtactccagggagcggtacatttgtaactctggtttcaagcgtaaagccggcacgtccagcctgacggagtgcgtgttgaacaaggccacgaatgtcgcccactggacaacccccagtctcaaatgcattagagaccctgccctggttcaccaaaggccagcgccaccctccacagtaacgacggcaggggtgaccccacagccagagagcctctccccttctggaaaagagcccgcagcttcatctcccagctcaaacaacacagcggccacaacagcagctattgtcccgggctcccagctgatgccttcaaaatcaccttccacaggaaccacagagataagcagtcatgagtcctcccacggcaccccctctcagacaacagccaagaactgggaactcacagcatccgcctcccaccagccgccaggtgtgtatccacagggccacagcgacaccactgtggctatctccacgtccactgtcctgctgtgtgggctgagcgctgtgtctctcctggcatgctacctcaagtcaaggcaaactcccccgctggccagcgttgaaatggaagccatggaggctctgccggtgacttgggggaccagcagcagagatgaagacttggaaaactgctctcaccacctatgaaactcggggaaaccagcccagctaagtccggagtgaaggagcctctctgctttagctaaagacgactgagaagaggtgcaaggaagcgggctccaggagcaagctcaccaggcctctcagaagtcccagcaggatctcacggactgccgggtcggcgcctcctgcgcgagggagcaggttctccgcattcccatgggcaccacctgcctgcctgtcgtgccttggacccagggcccagcttcccaggagagaccaaaggcttctgagcaggatttttatttcattacagtgtgagctgcctggaatacatgtggtaatgaaataaaaaccctgccccgaatcttccgtccctcatcctaactttcagttcacagagaaaagtgacatacccaaagctctctgtcaattacaaggcttctcctggcgtgggagacgtctacagggaagacaccagcgtttgggcttctaaccaccctgtctccagctgctctgcacacatggacagggacctgggaaaggtgggagagatgctgagcccagcgaatcctctccattgaaggattcaggaagaagaaaactcaactcagtgccattttacgaatatatgcgtttatatttatacttccttgtctattatatctatacattatatattatttgtattttgacattgtaccttgtataaacaaaataaaacatctattttcaatatttttaaaatgca

SEQ ID NO: 143833 - DNA, 858 bp, Homo sapiens
  Payload ID: 8425
  Gene Symbol: IL15RA
  Gene Name: interleukin 15 receptor, alpha
  ENST ID: ENST00000397246
  CDS Start-End: 343-858
actggaggtcccagagcacgacgagcgcggaggaccgggaggctcccgggcttgcgtggatgcaagagacaggctggctgtcctggcgggaaggagcagaatatctgaaagcttcaaccatgaggtccagacacacgaggcctgcgtgagactcaggacaatggaaaactgcccccagtgccaccaccatcggacaagcaggcagcaagcaggcaggtagagaaggacagaagatcagtgtggagcagaacatggagaaaaagcctctgacactccagcaccagatagcaccagaggcctcaaagccagtggggctctgcaggcatcacgtgccctccccccatgtccgtggaacacgcagacatctgggtcaagagctacagcttgtactccagggagcggtacatttgtaactctggtttcaagcgtaaagccggcacgtccagcctgacggagtgcgtgttgaacaaggccacgaatgtcgcccactggacaacccccagtctcaaatgcattaagcccgcagcttcatctcccagctcaaacaacacagcggccacaacagcagctattgtcccgggctcccagctgatgccttcaaaatcaccttccacaggaaccacagagataagcagtcatgagtcctcccacggcaccccctctcagacaacagccaagaactgggaactcacagcatccgcctcccaccagccgccaggtgtgtatccacagggccacagcgacaccactgtggctatctccacgtccactgtcctgctgtgtgggctgagcgctgtgtctctcctggcatgctacctcaagtcaaggcaaactcccccgctggccagcgttgaaatg

SEQ ID NO: 143834 - DNA, 1799 bp, Homo sapiens
  Payload ID: 8425
  Gene Symbol: IL15RA
  Gene Name: interleukin 15 receptor, alpha
  ENST ID: ENST00000397248
  CDS Start-End: 15-1076
aaaagcgaaagcgaatgcgactggcggggcggcaggtcccagagcagcgctcgccacctccccccggcctgggcagcgctcgcccggggagtccagcggtgtcctgtggagctgccgccatggccccgcggcgggcgcgcggctgccggaccctcggtctcccggcgctgctactgctgctgctgctccggccgccggcgacgcgggatgcaagagacaggctggctgtcctggcgggaaggagcagaatatctgaaagcttcaaccatgaggtccagacacacgaggcctgcgtgagactcaggacaatggaaaactgcccccagtgccaccaccatcggacaagcaggcagcaagcaggcatcacgtgccctccccccatgtccgtggaacacgcagacatctgggtcaagagctacagcttgtactccagggagcggtacatttgtaactctggtttcaagcgtaaagccggcacgtccagcctgacggagtgcgtgttgaacaaggccacgaatgtcgcccactggacaacccccagtctcaaatgcattagagaccctgccctggttcaccaaaggccagcgccaccctccacagtaacgacggcaggggtgaccccacagccagagagcctctccccttctggaaaagagcccgcagcttcatctcccagctcaaacaacacagcggccacaacagcagctattgtcccgggctcccagctgatgccttcaaaatcaccttccacaggaaccacagagataagcagtcatgagtcctcccacggcaccccctctcagacaacagccaagaactgggaactcacagcatccgcctcccaccagccgccaggtgtgtatccacagggccacagcgacaccactgtggctatctccacgtccactgtcctgctgtgtgggctgagcgctgtgtctctcctggcatgctacctcaagtcaaggcaaactcccccgctggccagcgttgaaatggaagccatggaggctctgccggtgacttgggggaccagcagcagagatgaagacttggaaaactgctctcaccacctatgaaactcggggaaaccagcccagctaagtccggagtgaaggagcctctctgctttagctaaagacgactgagaagaggtgcaaggaagcgggctccaggagcaagctcaccaggcctctcagaagtcccagcaggatctcacggactgccgggtcggcgcctcctgcgcgagggagcaggttctccgcattcccatgggcaccacctgcctgcctgtcgtgccttggacccagggcccagcttcccaggagagaccaaaggcttctgagcaggatttttatttcattacagtgtgagctgcctggaatacatgtggtaatgaaataaaaaccctgccccgaatcttccgtccctcatcctaactttcagttcacagagaaaagtgacatacccaaagctctctgtcaattacaaggcttctcctggcgtgggagacgtctacagggaagacaccagcgtttgggcttctaaccaccctgtctccagctgctctgcacacatggacagggacctgggaaaggtgggagagatgctgagcccagcgaatcctctccattgaaggattcaggaagaagaaaactcaactcagtgccattttacgaatatatgcgtttatatttatacttccttgtctattatatctatacattatatattatttgtattttgacattgtaccttgtataaacaaaataaaacatctattttcaatatttttaaaatgc

SEQ ID NO: 143835 - DNA, 584 bp, Homo sapiens
  Payload ID: 8425
  Gene Symbol: IL15RA
  Gene Name: interleukin 15 receptor, alpha
  Uniprot ID: Q13261
  ENST ID: ENST00000397250
  CDS Start-End: 31-540
agtccagcggtgtcctgtggagctgccgccatggccccgcggcgggcgcgcggctgccggaccctcggtctcccggcgctgctactgctgctgctgctccggccgccggcgacgcgggagcccgcagcttcatctcccagctcaaacaacacagcggccacaacagcagctattgtcccgggctcccagctgatgccttcaaaatcaccttccacaggaaccacagagataagcagtcatgagtcctcccacggcaccccctctcagacaacagccaagaactgggaactcacagcatccgcctcccaccagccgccaggtgtgtatccacagggccacagcgacaccactgtggctatctccacgtccactgtcctgctgtgtgggctgagcgctgtgtctctcctggcatgctacctcaagtcaaggcaaactcccccgctggccagcgttgaaatggaagccatggaggctctgccggtgacttgggggaccagcagcagagatgaagacttggaaaactgctctcaccacctatgaaactcggggaaaccagcccagctaagtccggagtgaaggagcct

SEQ ID NO: 143836 - DNA, 1046 bp, Homo sapiens
  Payload ID: 8425
  Gene Symbol: IL15RA
  Gene Name: interleukin 15 receptor, alpha
  ENST ID: ENST00000397251
  CDS Start-End: 120-1046
aaaagcgaaagcgaatgcgactggcggggcggcaggtcccagagcagcgctcgccacctccccccggcctgggcagcgctcgcccggggagtccagcggtgtcctgtggagctgccgccatggccccgcggcgggcgcgcggctgccggaccctcggtctcccggcgctgctactgctgctgctgctccggccgccggcgacgcgggatgcaagagacaggctggctgtcctggcgggaaggagcagaatatctgaaagcttcaaccatgaggtccagacacacgaggcctgcgtgagactcaggacaatggaaaactgcccccagtgccaccaccatcggacaagcaggcagcaagcaggcatcacgtgccctccccccatgtccgtggaacacgcagacatctgggtcaagagctacagcttgtactccagggagcggtacatttgtaactctggtttcaagcgtaaagccggcacgtccagcctgacggagtgcgtgttgaacaaggccacgaatgtcgcccactggacaacccccagtctcaaatgcattagagaccctgccctggttcaccaaaggccagcgccaccctccacagtaacgacggcaggggtgaccccacagccagagagcctctccccttctggaaaagagcccgcagcttcatctcccagctcaaacaacacagcggccacaacagcagctattgtcccgggctcccagctgatgccttcaaaatcaccttccacaggaaccacagagataagcagtcatgagtcctcccacggcaccccctctcagacaacagccaagaactgggaactcacagcatccgcctcccaccagccgccaggtgtgtatccacagggccacagcgacaccactgtggctatctccacgtccactgtcctgctgtgtgggctgagcgctgtgtctctcctggcatgctacctcaagtcaagcttagatgccttcatcaaaatcagaggaggcttctccacgtggctgcttgggcttcctcacagcacggtgggctcaggctag

SEQ ID NO: 143837 - DNA, 759 bp, Homo sapiens
  Payload ID: 8425
  Gene Symbol: IL15RA
  Gene Name: interleukin 15 receptor, alpha
  Uniprot ID: Q13261
  ENST ID: ENST00000397255
  CDS Start-End: 1-759
atggccccgcggcgggcgcgcggctgccggaccctcggtctcccggcgctgctactgctgctgctgctccggccgccggcgacgcggggcatcacgtgccctccccccatgtccgtggaacacgcagacatctgggtcaagagctacagcttgtactccagggagcggtacatttgtaactctggtttcaagcgtaaagccggcacgtccagcctgacggagtgcgtgttgaacaaggccacgaatgtcgcccactggacaacccccagtctcaaatgcattagagaccctgccctggttcaccaaaggccagcgccaccctccacagtaacgacggcaggggtgaccccacagccagagagcctctccccttctggaaaagagcccgcagcttcatctcccagctcaaacaacacagcggccacaacagcagctattgtcccgggctcccagctgatgccttcaaaatcaccttccacaggaaccacagagataagcagtcatgagtcctcccacggcaccccctctcagacaacagccaagaactgggaactcacagcatccgcctcccaccagccgccaggtgtgtatccacagggccacagcgacaccactgtggctatctccacgtccactgtcctgctgtgtgggctgagcgctgtgtctctcctggcatgctacctcaagtcaagggcctctgtctgctcctgccatccccgcagtgctggacatacatgctcagtgggaagcgtctgttga

SEQ ID NO: 143838 - DNA, 659 bp, Homo sapiens
  Payload ID: 8425
  Gene Symbol: IL15RA
  Gene Name: interleukin 15 receptor, alpha
  ENST ID: ENST00000435171
  CDS Start-End: 1-596
agcccgcagcttcatctcccagctcaaacaacacagcggccacaacagcagctattgtcccgggctcccagctgatgccttcaaaatcaccttccacaggaaccacagagataagcagtcatgagtcctcccacggcaccccctctcagacaacagccaagaactgggaactcacagcatccgcctcccaccagccgccaggtgtgtatccacagggccacagcgacaccactgtggctatctccacgtccactgtcctgctgtgtgggctgagcgctgtgtctctcctggcatgctacctcaagtcaagctcacagagaaaagtgacatacctgaggctctctgtcaattacaaggctcctcctggcgtgggagatgtctatagggaagacaccagcgtttgggctcctcccaatgaccctgtctccagctgtgctgcacgcactgacagggagccggaaaaggtggaggagatgctaagcccagtgaatcctctccatcgaaggattcaggaagaagaaaactcatctcagcgccattttacatatatatgcatttatacttccttgtctgttatatctacacattatatatgatttgtattttgacattgtgccttgtataaacaaaataaaatatatattttcaatattttaaaa

SEQ ID NO: 143839 - DNA, 547 bp, Homo sapiens
  Payload ID: 8425
  Gene Symbol: IL15RA
  Gene Name: interleukin 15 receptor, alpha
  ENST ID: ENST00000429135
  CDS Start-End: 31-547
agtccagcggtgtcctgtggagctgccgccatggccccgcggcgggcgcgcggctgccggaccctcggtctcccggcgctgctactgctgctgctgctccggccgccggcgacgcggggcatcacgtgccctccccccatgtccgtggaacacgcagacatctgggtcaagagctacagcttgtactccagggagcggtacatttgtaactctggtttcaagcgtaaagccggcacgtccagcctgacggagtgcgtgttgaacaaggccacgaatgtcgcccactggacaacccccagtctcaaatgcattaagcccgcagcttcatctcccagctcaaacaacacagcggccacaacagcagctattgtcccgggctcccagctgatgccttcaaaatcaccttccacaggaaccacagagataagcagtcatgagtcctcccacggcaccccctctcagacaacagccaagaactgggaactcacagcatccgcctcccaccagccgccaggtgtgtatccacagggccacagcgacaccactg

SEQ ID NO: 143840 - DNA, 730 bp, Homo sapiens
  Payload ID: 8425
  Gene Symbol: IL15RA
  Gene Name: interleukin 15 receptor, alpha
  ENST ID: ENST00000453922
  CDS Start-End: 287-730
gggtcgcagggagagcgccgccgctgcgcccgggtcacccacgtaagggagcgggcggcctggctggggtctccgaggccgaggtcaggagcagttctgagaagcccgttttggccacgggagcgcggagccggcggcgtccagcagtttggagacacgggcgagtgcgcttctcccaggcgcctggactgcagggcgggtgttgcatagcacgcggtcctcggaggggtccgggagaaactactcctcccgactcccaggcaaaagcatcacgtgccctccccccatgtccgtggaacacgcagacatctgggtcaagagctacagcttgtactccagggagcggtacatttgtaactctggtttcaagcgtaaagccggcacgtccagcctgacggagtgcgtgttgaacaaggccacgaatgtcgcccactggacaacccccagtctcaaatgcattaaccctgccctggttcaccaaaggccagcgccaccctccacagtaacgacggcaggggtgaccccacagccagagagcctctccccttctggaaaagagcccgcagcttcatctcccagctcaaacaacacagcggccacaacagcagctattgtcccgggctcccagctgatgccttcaaaatcaccttccacaggaaccacagagataagcagtcatgagtcctcccacggcaccccctctcagacaacagccaagaactgggaactc

SEQ ID NO: 143841 - DNA, 906 bp, Homo sapiens
  Payload ID: 8425
  Gene Symbol: IL15RA
  Gene Name: interleukin 15 receptor, alpha
  ENST ID: ENST00000447291
  CDS Start-End: 1-467
ccctggttcaccaaaggccagcgccaccctccacagtaacgacggcaggggtgaccccacagccagagagcctctccccttctggaaaagagcccgcagcttcatctcccagctcaaacaacacagcggccacaacagcagctattgtcccgggctcccagctgatgccttcaaaatcaccttccacaggaaccacagagataagcagtcatgagtcctcccacggcaccccctctcagacaacagccaagaactgggaactcacagcatccgcctcccaccagccgccaggtgtgtatccacagggccacagcgacaccactgtggctatctccacgtccactgtcctgctgtgtgggctgagcgctgtgtctctcctggcatgctacctcaagtcaagggcctctgtctgctcctgccatccccgcagtgctggacatacatgctcagtgggaagcgtctgttgatttgagggcaaccccctcctcttttcaaaacctatgaaccacctgctttgcaggcaaactcccccgctggccagcgttgaaatggaagccatggaggctctgccggtgacttgggggaccagcagcagagatgaagacttggaaaactgctctcaccacctatgaaactcggggaaaccagcccagctaagtccggagtgaaggagcctctctgctttagctaaagacgactgagaagaggtgcaaggaagcgggctccaggagcaagctcaccaggcctctcagaagtcccagcaggatctcacggactgccgggtcggcgcctcctgcgcgagggagcaggttctccgcattcccatgggcaccacctgcctgcctgtcgtgccttggacccagggcccagcttcccaggagagaccaaaggcttctgagcaggatt

SEQ ID NO: 143842 - DNA, 1850 bp, Homo sapiens
  Payload ID: 8425
  Gene Symbol: IL15RA
  Gene Name: interleukin 15 receptor, alpha
  Uniprot ID: Q13261
  ENST ID: ENST00000525219
  CDS Start-End: 432-1127
agctgcagcaggaattcggcgaagtggcggagctggggccccagcgggcgccgggggccgcgggagccagcaggtggcgggggctgcgctccgcccgggccagagcgcaccaggcaggtgcccgcgcctccgcaccgcggcgacacctccgcgggcactcacccaggccggccgctcacaaccgagcgcagggccgcggagggagaccaggaaagccgaaggcggagcagctggaggcgaccagcgccgggcgaggtcaagtggatccgagccgcagagagggctggagagagtctgctctccgatgactttgcccactctcttcgcagtggggacaccggaccgagtgcacactggaggtcccagagcacgacgagcgcggaggaccgggaggctcccgggcttgcgtgggcatcacgtgccctccccccatgtccgtggaacacgcagacatctgggtcaagagctacagcttgtactccagggagcggtacatttgtaactctggtttcaagcgtaaagccggcacgtccagcctgacggagtgcgtgttgaacaaggccacgaatgtcgcccactggacaacccccagtctcaaatgcattagagaccctgccctggttcaccaaaggccagcgccaccctccacagtaacgacggcaggggtgaccccacagccagagagcctctccccttctggaaaagagcccgcagcttcatctcccagctcaaacaacacagcggccacaacagcagctattgtcccgggctcccagctgatgccttcaaaatcaccttccacaggaaccacagagataagcagtcatgagtcctcccacggcaccccctctcagacaacagccaagaactgggaactcacagcatccgcctcccaccagccgccaggtgtgtatccacagggccacagcgacaccactgtggctatctccacgtccactgtcctgctgtgtgggctgagcgctgtgtctctcctggcatgctacctcaagtcaaggcaaactcccccgctggccagcgttgaaatggaagccatggaggctctgccggtgacttgggggaccagcagcagagatgaagacttggaaaactgctctcaccacctatgaaactcggggaaaccagcccagctaagtccggagtgaaggagcctctctgctttagctaaagacgactgagaagaggtgcaaggaagcgggctccaggagcaagctcaccaggcctctcagaagtcccagcaggatctcacggactgccgggtcggcgcctcctgcgcgagggagcaggttctccgcattcccatgggcaccacctgcctgcctgtcgtgccttggacccagggcccagcttcccaggagagaccaaaggcttctgagcaggatttttatttcattacagtgtgagctgcctggaatacatgtggtaatgaaataaaaaccctgccccgaatcttccgtccctcatcctaactttcagttcacagagaaaagtgacatacccaaagctctctgtcaattacaaggcttctcctggcgtgggagacgtctacagggaagacaccagcgtttgggcttctaaccaccctgtctccagctgctctgcacacatggacagggacctgggaaaggtgggagagatgctgagcccagcgaatcctctccattgaaggattcaggaagaagaaaactcaactcagtgccattttacgaatatatgcgtttatatttatacttccttgtctattatatctatacattatatattatttgtattttgacattgtaccttgtataaacaaaataaaacatctattttcaatatttttaaaatgc

SEQ ID NO: 143843 - DNA, 679 bp, Homo sapiens
  Payload ID: 8425
  Gene Symbol: IL15RA
  Gene Name: interleukin 15 receptor, alpha
  ENST ID: ENST00000532039
  CDS Start-End: 1-629
gcatcacgtgccctccccccatgtccgtggaacacgcagacatctgggtcaagagctacagcttgtactccagggagcggtacatttgtaactctggtttcaagcgtaaagccggcacgtccagcctgacggagtgcgtgttgaacaaggccacgaatgtcgcccactggacaacccccagtctcaaatgcattagaaccacagagataagcagtcatgagtcctcccacggcaccccctctcagacaacagccaagaactgggaactcacagcatccgcctcccaccagccgccaggtgtgtatccacagggccacagcgacaccactggaaggaagcaacacttgctaccagatttccaggcatccttccagagagactgtataaataaacatatagaggataaggaatgctggacagttgcttcttttctccttttcttggctatctccacgtccactgtcctgctgtgtgggctgagcgctgtgtctctcctggcatgctacctcaagtcaaggcaaactcccccgctggccagcgttgaaatggaagccatggaggctctgccggtgacttgggggaccagcagcagagatgaagacttggaaaactgctctcaccacctatgaaactcggggaaaccagcccagctaagtccggagtgaaggagcctctctgc

SEQ ID NO: 143844 - DNA, 1037 bp, Homo sapiens
  Payload ID: 8425
  Gene Symbol: IL15RA
  Gene Name: interleukin 15 receptor, alpha
  Uniprot ID: Q13261
  ENST ID: ENST00000528354
  CDS Start-End: 31-735
agtccagcggtgtcctgtggagctgccgccatggccccgcggcgggcgcgcggctgccggaccctcggtctcccggcgctgctactgctgctgctgctccggccgccggcgacgcggggcatcacgtgccctccccccatgtccgtggaacacgcagacatctgggtcaagagctacagcttgtactccagggagcggtacatttgtaactctggtttcaagcgtaaagccggcacgtccagcctgacggagtgcgtgttgaacaaggccacgaatgtcgcccactggacaacccccagtctcaaatgcattaagcccgcagcttcatctcccagctcaaacaacacagcggccacaacagcagctattgtcccgggctcccagctgatgccttcaaaatcaccttccacaggaaccacagagataagcagtcatgagtcctcccacggcaccccctctcagacaacagccaagaactgggaactcacagcatccgcctcccaccagccgccaggtgtgtatccacagggccacagcgacaccactgtggctatctccacgtccactgtcctgctgtgtgggctgagcgctgtgtctctcctggcatgctacctcaagtcaaggcaaactcccccgctggccagcgttgaaatggaagccatggaggctctgccggtgacttgggggaccagcagcagagatgaagacttggaaaactgctctcaccacctatgaaactcggggaaaccagcccagctaagtccggagtgaaggagcctctctgctttagctaaagacgactgagaagaggtgcaaggaagcgggctccaggagcaagctcaccaggcctctcagaagtcccagcaggatctcacggactgccgggtcggcgcctcctgcgcgagggagcaggttctccgcattcccatgggcaccacctgcctgcctgtcgtgccttggacccagggcccagcttcccaggagagaccaaaggcttctgagcaggatttttatttcattacagtgtgagctgcctg

SEQ ID NO: 143845 - DNA, 660 bp, Homo sapiens
  Payload ID: 8425
  Gene Symbol: IL15RA
  Gene Name: interleukin 15 receptor, alpha
  Uniprot ID: Q13261
  ENST ID: ENST00000530685
  CDS Start-End: 1-660
atggccccgcggcgggcgcgcggctgccggaccctcggtctcccggcgctgctactgctgctgctgctccggccgccggcgacgcggggcatcacgtgccctccccccatgtccgtggaacacgcagacatctgggtcaagagctacagcttgtactccagggagcggtacatttgtaactctggtttcaagcgtaaagccggcacgtccagcctgacggagtgcgtgttgaacaaggccacgaatgtcgcccactggacaacccccagtctcaaatgcattaagcccgcagcttcatctcccagctcaaacaacacagcggccacaacagcagctattgtcccgggctcccagctgatgccttcaaaatcaccttccacaggaaccacagagataagcagtcatgagtcctcccacggcaccccctctcagacaacagccaagaactgggaactcacagcatccgcctcccaccagccgccaggtgtgtatccacagggccacagcgacaccactgtggctatctccacgtccactgtcctgctgtgtgggctgagcgctgtgtctctcctggcatgctacctcaagtcaagggcctctgtctgctcctgccatccccgcagtgctggacatacatgctcagtgggaagcgtctgttga

SEQ ID NO: 143846 - DNA, 1037 bp, Homo sapiens
  Payload ID: 8425
  Gene Symbol: IL15RA
  Gene Name: interleukin 15 receptor, alpha
  ENST ID: ENST00000620865
  CDS Start-End: 120-1037
aaaagcgaaagcgaatgcgactggcggggcggcaggtcccagagcagcgctcgccacctccccccggcctgggcagcgctcgcccggggagtccagcggtgtcctgtggagctgccgccatggccccgcggcgggcgcgcggctgccggaccctcggtctcccggcgctgctactgctgctgctgctccggccgccggcgacgcgggatgcaagagacaggctggctgtcctggcgggaaggagcagaatatctgaaagcttcaaccatgaggtccagacacacgaggcctgcgtgagactcaggacaatggaaaactgcccccagtgccaccaccatcggacaagcaggcagcaagcaggcatcacgtgccctccccccatgtccgtggaacacgcagacatctgggtcaagagctacagcttgtactccagggagcggtacatttgtaactctggtttcaagcgtaaagccggcacgtccagcctgacggagtgcgtgttgaacaaggccacgaatgtcgcccactggacaacccccagtctcaaatgcattagagaccctgccctggttcaccaaaggccagcgccaccctccacagtaacgacggcaggggtgaccccacagccagagagcctctccccttctggaaaagagcccgcagcttcatctcccagctcaaacaacacagcggccacaacagcagctattgtcccgggctcccagctgatgccttcaaaatcaccttccacaggaaccacagagataagcagtcatgagtcctcccacggcaccccctctcagacaacagccaagaactgggaactcacagcatccgcctcccaccagccgccaggtgtgtatccacagggccacagcgacaccactggaaggaagcaacacttgctaccagatttccaggcatccttccagagagactgtataaataaacatatagaggataaggaatgctggacagttgcttcttttctccttttctgtaccatgtttgtttccacttgctggtataccttgtag

SEQ ID NO: 143847 - DNA, 1115 bp, Homo sapiens
  Payload ID: 8425
  Gene Symbol: IL15RA
  Gene Name: interleukin 15 receptor, alpha
  ENST ID: ENST00000620345
  CDS Start-End: 120-1115
aaaagcgaaagcgaatgcgactggcggggcggcaggtcccagagcagcgctcgccacctccccccggcctgggcagcgctcgcccggggagtccagcggtgtcctgtggagctgccgccatggccccgcggcgggcgcgcggctgccggaccctcggtctcccggcgctgctactgctgctgctgctccggccgccggcgacgcgggatgcaagagacaggctggctgtcctggcgggaaggagcagaatatctgaaagcttcaaccatgaggtccagacacacgaggcctgcgtgagactcaggacaatggaaaactgcccccagtgccaccaccatcggacaagcaggcagcaagcaggcatcacgtgccctccccccatgtccgtggaacacgcagacatctgggtcaagagctacagcttgtactccagggagcggtacatttgtaactctggtttcaagcgtaaagccggcacgtccagcctgacggagtgcgtgttgaacaaggccacgaatgtcgcccactggacaacccccagtctcaaatgcattagagaccctgccctggttcaccaaaggccagcgccaccctccacagtaacgacggcaggggtgaccccacagccagagagcctctccccttctggaaaagagcccgcagcttcatctcccagctcaaacaacacagcggccacaacagcagctattgtcccgggctcccagctgatgccttcaaaatcaccttccacaggaaccacagagataagcagtcatgagtcctcccacggcaccccctctcagacaacagccaagaactgggaactcacagcatccgcctcccaccagccgccaggtgtgtatccacagggccacagcgacaccactgtggctatctccacgtccactgtcctgctgtgtgggctgagcgctgtgtctctcctggcatgctacctcaagtcaaggtggctggccaagagaagcctgcccggcgacgctgaggcaccgaacatgagcaggggaggaaggaatgcctgggagcagctgagccgagcccctgccaccagcctcctccgcacgcccgtggaatcagcactttctgcttcccgcccctga

SEQ ID NO: 143848 - DNA, 1070 bp, Homo sapiens
  Payload ID: 8425
  Gene Symbol: IL15RA
  Gene Name: interleukin 15 receptor, alpha
  ENST ID: ENST00000618528
  CDS Start-End: 120-1070
aaaagcgaaagcgaatgcgactggcggggcggcaggtcccagagcagcgctcgccacctccccccggcctgggcagcgctcgcccggggagtccagcggtgtcctgtggagctgccgccatggccccgcggcgggcgcgcggctgccggaccctcggtctcccggcgctgctactgctgctgctgctccggccgccggcgacgcgggatgcaagagacaggctggctgtcctggcgggaaggagcagaatatctgaaagcttcaaccatgaggtccagacacacgaggcctgcgtgagactcaggacaatggaaaactgcccccagtgccaccaccatcggacaagcaggcagcaagcaggcatcacgtgccctccccccatgtccgtggaacacgcagacatctgggtcaagagctacagcttgtactccagggagcggtacatttgtaactctggtttcaagcgtaaagccggcacgtccagcctgacggagtgcgtgttgaacaaggccacgaatgtcgcccactggacaacccccagtctcaaatgcattagagaccctgccctggttcaccaaaggccagcgccaccctccacagtaacgacggcaggggtgaccccacagccagagagcctctccccttctggaaaagagcccgcagcttcatctcccagctcaaacaacacagcggccacaacagcagctattgtcccgggctcccagctgatgccttcaaaatcaccttccacaggaaccacagagataagcagtcatgagtcctcccacggcaccccctctcagacaacagccaagaactgggaactcacagcatccgcctcccaccagccgccaggtgtgtatccacagggccacagcgacaccactgtggctatctccacgtccactgtcctgctgtgtgggctgagcgctgtgtctctcctggcatgctacctcaagtcaagtgacagtgctgtaggaaagagtaagctggaaaaagagaaggttcagaacgacagtgctgacgcagacatcacacagcggtatgccagtgctatggtgcctgtttaa

SEQ ID NO: 143849 - DNA, 1160 bp, Homo sapiens
  Payload ID: 8425
  Gene Symbol: IL15RA
  Gene Name: interleukin 15 receptor, alpha
  ENST ID: ENST00000622442
  CDS Start-End: 120-1160
aaaagcgaaagcgaatgcgactggcggggcggcaggtcccagagcagcgctcgccacctccccccggcctgggcagcgctcgcccggggagtccagcggtgtcctgtggagctgccgccatggccccgcggcgggcgcgcggctgccggaccctcggtctcccggcgctgctactgctgctgctgctccggccgccggcgacgcgggatgcaagagacaggctggctgtcctggcgggaaggagcagaatatctgaaagcttcaaccatgaggtccagacacacgaggcctgcgtgagactcaggacaatggaaaactgcccccagtgccaccaccatcggacaagcaggcagcaagcaggcatcacgtgccctccccccatgtccgtggaacacgcagacatctgggtcaagagctacagcttgtactccagggagcggtacatttgtaactctggtttcaagcgtaaagccggcacgtccagcctgacggagtgcgtgttgaacaaggccacgaatgtcgcccactggacaacccccagtctcaaatgcattagagaccctgccctggttcaccaaaggccagcgccaccctccacagtaacgacggcaggggtgaccccacagccagagagcctctccccttctggaaaagagcccgcagcttcatctcccagctcaaacaacacagcggccacaacagcagctattgtcccgggctcccagctgatgccttcaaaatcaccttccacaggaaccacagagataagcagtcatgagtcctcccacggcaccccctctcagacaacagccaagaactgggaactcacagcatccgcctcccaccagccgccaggtgtgtatccacagggccacagcgacaccactgtggctatctccacgtccactgtcctgctgtgtgggctgagcgctgtgtctctcctggcatgctacctcaagtcaagctctcactccagggagctcacactgcttaccttaaaatggcctaaagagctgctgctcctccggagggacatttcaccagccctggtagaaggtgccggccagatgcccagggcatcagcacccaggcagctccagacaggccagccacgtatgaccagtgtcctgcctcgcctgtgcttgtcattcgggagctga

SEQ ID NO: 143850 - DNA, 3999 bp, Homo sapiens
  Payload ID: 8426
  Gene Symbol: IL16
  Gene Name: interleukin 16
  Uniprot ID: Q14005
  ENST ID: ENST00000302987
  CDS Start-End: 1-3999
atggagtcgcacagccgcgctggaaagagcagaaaatctgcaaaatttcggtccatctccaggtccctgatgctctgtaatgctaagaccagtgatgatggctctagccctgatgagaaatatcctgatccctttgagatttccttggcccagggcaaggagggaattttccactcatctgtgcagctggcagacacatcggaggctgggcccagcagtgttcctgatctagcactggcctcggaggctgctcaactccaagcagctgggaatgatcgaggcaagacctgtaggaggatattcttcatgaaggaatcttccacagcttcctctcgagaaaagcctggaaaactagaagcacaaagtagtaacttcctgtttcctaaagcctgccaccaaagggcacgcagcaactcaaccagtgttaatccctattgcacaagagaaattgattttccaatgaccaagaaatctgcagcgcccacggacaggcagccttactctctctgcagtaacaggaagtccctctctcaacaattggactgtccagcaggaaaggctgcgggaacttcgagaccaacacggtccctgagcacagctcagctcgtgcagccatctgggggcctccaggcttcagtcatctccaacatcgtgctgatgaagggccaggctaagggtctgggcttcagcatcgttgggggaaaagacagcatttatggccccattgggatttacgtcaaaaccatttttgcagggggagcagcagcagccgatggaaggctacaggaaggtgatgaaattctggagctcaatggtgaatcaatggctggactaacacatcaggatgctttgcagaagttcaagcaagccaaaaaggggctcctcaccctcaccgtgagaacccgcctgacggcgcctccttccctgtgcagccacctgtctcccccactgtgccgctccctgagctccagcacttgtatcaccaaggacagcagctccttcgccttggaaagcccctcggctcccatcagcaccgccaagcccaattacagaatcatggtggaggtttctctgcagaaagaggccggcgtgggcctgggcatcggcctgtgcagcgttccctacttccaatgcatctctggcattttcgtccacacgctgtcaccaggatccgtggcgcacctggacggacgtctccggtgtggggacgagattgtggaaatcagtgattcccctgtgcactgcctgacgctcaatgaagtctacacgatcctgagtcactgtgatcccggtccagtccccatcattgttagccgacatccagacccacaggtctctgaacagcaactcaaagaagctgtggcccaggctgtggaaaacaccaagtttggaaaggagaggcatcagtggagtctggaaggtgtcaaaaggctggaaagcagttggcacgggcggcccaccttggagaaggaacgagagaagaactcagcacccccgcatcgcagggctcagaaggtcatgatccgctccagcagtgacagcagctacatgtctgggtccccagggggaagtcctgggagtggcagtgctgagaagccgtcctctgacgtggacatcagcacacacagccccagcttgcctctggcacgggagccagtggtgctttctatagcatcctccaggctgccccaggagagcccacccctcccagagagccgggacagccacccgccgctgagactgaagaaatcctttgagattttggtgagaaagcctatgtcctccaagcccaagcctccacccagaaaatactttaaaagtgacagtgaccctcagaagagtctggaagagagagagaactcctcatgctcttctgggcacaccccacccacctgtggccaggaagcgagagagctgctgccactgctgctaccacaggaagacacagcagggagaagccctagtgcctctgccggctgcccaggacctggtatcggcccacagaccaagtcctccacagagggcgagccagggtggagaagagccagcccagtgacccaaacatccccgataaaacacccactgcttaagaggcaggctcggatggactatagctttgataccacagccgaagacccttgggttaggatttctgactgcatcaaaaacttatttagccccatcatgagtgagaaccatggccacatgcctctacagcccaatgccagcctgaatgaagaagaagggacacagggccacccagatgggaccccaccaaagctggacaccgccaatggcactcccaaagtttacaagtcagcagacagcagcactgtgaagaaaggtcctcctgtggctcccaagccagcctggtttcgccaaagcttgaaaggtttgaggaatcgtgcttcagacccaagagggctccctgatcctgccttgtccacccagccagcacctgcttccagggagcacctaggatcacacatccgggcctcctcctcctcctcctccatcaggcagagaatcagctcctttgaaacctttggctcctctcaactgcctgacaaaggagcccagagactgagcctccagccctcctctggggaggcagcaaaacctcttgggaagcatgaggaaggacggttttctggactcttggggcgaggggctgcacccactcttgtgccccagcagcctgagcaagtactgtcctcggggtcccctgcagcctccgaggccagagacccaggtgtgtctgagtcccctcccccagggcggcagcccaatcagaaaactctcccccctggcccggacccgctcctaaggctgctgtcaacacaggctgaggaatctcaaggcccagtgctcaagatgcctagccagcgagcacggagcttccccctgaccaggtcccagtcctgtgagacgaagctacttgacgaaaagaccagcaaactctattctatcagcagccaagtgtcatcggctgtcatgaaatccttgctgtgccttccatcttctatctcctgtgcccagactccctgcatccccaaggaaggggcatctccaacatcatcatccaacgaagactcagctgcaaatggttctgctgaaacatctgccttggacacagggttctcgctcaacctttcagagctgagagaatatacagagggtctcacggaagccaaggaagacgatgatggggaccacagttcccttcagtctggtcagtccgttatctccctgctgagctcagaagaattaaaaaaactcatcgaggaggtgaaggttctggatgaagcaacattaaagcaattagacggcatccatgtcaccatcttacacaaggaggaaggtgctggtcttgggttcagcttggcaggaggagcagatctagaaaacaaggtgattacggttcacagagtgtttccaaatgggctggcctcccaggaagggactattcagaagggcaatgaggttctttccatcaacggcaagtctctcaaggggaccacgcaccatgatgccttggccatcctccgccaagctcgagagcccaggcaagctgtgattgtcacaaggaagctgactccagaggccatgcccgacctcaactcctccactgactctgcagcctcagcctctgcagccagtgatgtttctgtagaatctacagcagaggccacagtctgcacggtgacactggagaagatgtcggcagggctgggcttcagcctggaaggagggaagggctccctacacggagacaagcctctcaccattaacaggattttcaaaggagcagcctcagaacaaagtgagacagtccagcctggagatgaaatcttacagctgggtggcactgccatgcagggcctcacacggtttgaagcctggaacatcatcaaggcactgcctgatggacctgtcacgattgtcatcaggagaaaaagcctccagtccaaggaaaccacagctgctggagactcctag

SEQ ID NO: 143851 - DNA, 2397 bp, Homo sapiens
  Payload ID: 8426
  Gene Symbol: IL16
  Gene Name: interleukin 16
  Uniprot ID: Q14005
  ENST ID: ENST00000394652
  CDS Start-End: 217-2112
ctgtttacaccacaggaagcgagagagctgctgccactgctgctaccacaggaagacacagcagggagaagccctagtgcctctgccggctgcccaggacctggtatcggcccacagaccaagtcctccacagagggcgagccagggtggagaagagccagcccagtgacccaaacatccccgataaaacacccactgcttaagaggcaggctcggatggactatagctttgataccacagccgaagacccttgggttaggatttctgactgcatcaaaaacttatttagccccatcatgagtgagaaccatggccacatgcctctacagcccaatgccagcctgaatgaagaagaagggacacagggccacccagatgggaccccaccaaagctggacaccgccaatggcactcccaaagtttacaagtcagcagacagcagcactgtgaagaaaggtcctcctgtggctcccaagccagcctggtttcgccaaagcttgaaaggtttgaggaatcgtgcttcagacccaagagggctccctgatcctgccttgtccacccagccagcacctgcttccagggagcacctaggatcacacatccgggcctcctcctcctcctcctccatcaggcagagaatcagctcctttgaaacctttggctcctctcaactgcctgacaaaggagcccagagactgagcctccagccctcctctggggaggcagcaaaacctcttgggaagcatgaggaaggacggttttctggactcttggggcgaggggctgcacccactcttgtgccccagcagcctgagcaagtactgtcctcggggtcccctgcagcctccgaggccagagacccaggtgtgtctgagtcccctcccccagggcggcagcccaatcagaaaactctcccccctggcccggacccgctcctaaggctgctgtcaacacaggctgaggaatctcaaggcccagtgctcaagatgcctagccagcgagcacggagcttccccctgaccaggtcccagtcctgtgagacgaagctacttgacgaaaagaccagcaaactctattctatcagcagccaagtgtcatcggctgtcatgaaatccttgctgtgccttccatcttctatctcctgtgcccagactccctgcatccccaaggaaggggcatctccaacatcatcatccaacgaagactcagctgcaaatggttctgctgaaacatctgccttggacacagggttctcgctcaacctttcagagctgagagaatatacagagggtctcacggaagccaaggaagacgatgatggggaccacagttcccttcagtctggtcagtccgttatctccctgctgagctcagaagaattaaaaaaactcatcgaggaggtgaaggttctggatgaagcaacattaaagcaattagacggcatccatgtcaccatcttacacaaggaggaaggtgctggtcttgggttcagcttggcaggaggagcagatctagaaaacaaggtgattacggttcacagagtgtttccaaatgggctggcctcccaggaagggactattcagaagggcaatgaggttctttccatcaacggcaagtctctcaaggggaccacgcaccatgatgccttggccatcctccgccaagctcgagagcccaggcaagctgtgattgtcacaaggaagctgactccagaggccatgcccgacctcaactcctccactgactctgcagcctcagcctctgcagccagtgatgtttctgtagaatctacagcagaggccacagtctgcacggtgacactggagaagatgtcggcagggctgggcttcagcctggaaggagggaagggctccctacacggagacaagcctctcaccattaacaggattttcaaaggagcagcctcagaacaaagtgagacagtccagcctggagatgaaatcttacagctgggtggcactgccatgcagggcctcacacggtttgaagcctggaacatcatcaaggcactgcctgatggacctgtcacgattgtcatcaggagaaaaagcctccagtccaaggaaaccacagctgctggagactcctaggcaggacatgctgaagccaaagccaataacacacagctaacacacagctcccataaccgctgattctcagggtctctgctgccgccccacccagatgggggaaagcacaggtgggcttcccagtggctgctgcccaggcccagaccttctaggacgccacccagcaaaaggttgttcctaaaataagggcagagtcacacgggggcagctgatacaaattgcagactgtgtaaaaagagagcttaatgataatattgtggtgccacaaataaaatggatttatta

SEQ ID NO: 143852 - DNA, 9616 bp, Homo sapiens
  Payload ID: 8426
  Gene Symbol: IL16
  Gene Name: interleukin 16
  Uniprot ID: Q14005
  ENST ID: ENST00000394660
  CDS Start-End: 361-4356
acatttgtcctgagtcacctgtccagagcaggtggtgaatattgtgtcctactcacggcatctcaactatcggagcctgggatctgactcaaaggccggcctccgtctgagaactgagcgtccatttctcaatccttgccggctctgacccaggcctgggccacaggctgtccgggaataagtggtgctgcaatccctgctgggcagatggagagaggagcaagggagatggcagccccgggggactgtgcatagggagggactcatgaagtggcagctaagccctgtccagtggccacccgtcagccaagggccagagaccaggaaaggaagaaaggcagcttcacttcctctttgaggatggagtcgcacagccgcgctggaaagagcagaaaatctgcaaaatttcggtccatctccaggtccctgatgctctgtaatgctaagaccagtgatgatggctctagccctgatgagaaatatcctgatccctttgagatttccttggcccagggcaaggagggaattttccactcatctgtgcagctggcagacacatcggaggctgggcccagcagtgttcctgatctagcactggcctcggaggctgctcaactccaagcagctgggaatgatcgaggcaagacctgtaggaggatattcttcatgaaggaatcttccacagcttcctctcgagaaaagcctggaaaactagaagcacaaagtagtaacttcctgtttcctaaagcctgccaccaaagggcacgcagcaactcaaccagtgttaatccctattgcacaagagaaattgattttccaatgaccaagaaatctgcagcgcccacggacaggcagccttactctctctgcagtaacaggaagtccctctctcaacaattggactgtccagcaggaaaggctgcgggaacttcgagaccaacacggtccctgagcacagctcagctcgtgcagccatctgggggcctccaggcttcagtcatctccaacatcgtgctgatgaagggccaggctaagggtctgggcttcagcatcgttgggggaaaagacagcatttatggccccattgggatttacgtcaaaaccatttttgcagggggagcagcagcagccgatggaaggctacaggaaggtgatgaaattctggagctcaatggtgaatcaatggctggactaacacatcaggatgctttgcagaagttcaagcaagccaaaaaggggctcctcaccctcaccgtgagaacccgcctgacggcgcctccttccctgtgcagccacctgtctcccccactgtgccgctccctgagctccagcacttgtatcaccaaggacagcagctccttcgccttggaaagcccctcggctcccatcagcaccgccaagcccaattacagaatcatggtggaggtttctctgcagaaagaggccggcgtgggcctgggcatcggcctgtgcagcgttccctacttccaatgcatctctggcattttcgtccacacgctgtcaccaggatccgtggcgcacctggacggacgtctccggtgtggggacgagattgtggaaatcagtgattcccctgtgcactgcctgacgctcaatgaagtctacacgatcctgagtcactgtgatcccggtccagtccccatcattgttagccgacatccagacccacaggtctctgaacagcaactcaaagaagctgtggcccaggctgtggaaaacaccaagtttggaaaggagaggcatcagtggagtctggaaggtgtcaaaaggctggaaagcagttggcacgggcggcccaccttggagaaggaacgagagaagaactcagcacccccgcatcgcagggctcagaaggtcatgatccgctccagcagtgacagcagctacatgtctgggtccccagggggaagtcctgggagtggcagtgctgagaagccgtcctctgacgtggacatcagcacacacagccccagcttgcctctggcacgggagccagtggtgctttctatagcatcctccaggctgccccaggagagcccacccctcccagagagccgggacagccacccgccgctgagactgaagaaatcctttgagattttggtgagaaagcctatgtcctccaagcccaagcctccacccagaaaatactttaaaagtgacagtgaccctcagaagagtctggaagagagagagaactcctcatgctcttctgggcacaccccacccacctgtggccaggaagcgagagagctgctgccactgctgctaccacaggaagacacagcagggagaagccctagtgcctctgccggctgcccaggacctggtatcggcccacagaccaagtcctccacagagggcgagccagggtggagaagagccagcccagtgacccaaacatccccgataaaacacccactgcttaagaggcaggctcggatggactatagctttgataccacagccgaagacccttgggttaggatttctgactgcatcaaaaacttatttagccccatcatgagtgagaaccatggccacatgcctctacagcccaatgccagcctgaatgaagaagaagggacacagggccacccagatgggaccccaccaaagctggacaccgccaatggcactcccaaagtttacaagtcagcagacagcagcactgtgaagaaaggtcctcctgtggctcccaagccagcctggtttcgccaaagcttgaaaggtttgaggaatcgtgcttcagacccaagagggctccctgatcctgccttgtccacccagccagcacctgcttccagggagcacctaggatcacacatccgggcctcctcctcctcctcctccatcaggcagagaatcagctcctttgaaacctttggctcctctcaactgcctgacaaaggagcccagagactgagcctccagccctcctctggggaggcagcaaaacctcttgggaagcatgaggaaggacggttttctggactcttggggcgaggggctgcacccactcttgtgccccagcagcctgagcaagtactgtcctcggggtcccctgcagcctccgaggccagagacccaggtgtgtctgagtcccctcccccagggcggcagcccaatcagaaaactctcccccctggcccggacccgctcctaaggctgctgtcaacacaggctgaggaatctcaaggcccagtgctcaagatgcctagccagcgagcacggagcttccccctgaccaggtcccagtcctgtgagacgaagctacttgacgaaaagaccagcaaactctattctatcagcagccaagtgtcatcggctgtcatgaaatccttgctgtgccttccatcttctatctcctgtgcccagactccctgcatccccaaggaaggggcatctccaacatcatcatccaacgaagactcagctgcaaatggttctgctgaaacatctgccttggacacagggttctcgctcaacctttcagagctgagagaatatacagagggtctcacggaagccaaggaagacgatgatggggaccacagttcccttcagtctggtcagtccgttatctccctgctgagctcagaagaattaaaaaaactcatcgaggaggtgaaggttctggatgaagcaacattaaagcaattagacggcatccatgtcaccatcttacacaaggaggaaggtgctggtcttgggttcagcttggcaggaggagcagatctagaaaacaaggtgattacggttcacagagtgtttccaaatgggctggcctcccaggaagggactattcagaagggcaatgaggttctttccatcaacggcaagtctctcaaggggaccacgcaccatgatgccttggccatcctccgccaagctcgagagcccaggcaagctgtgattgtcacaaggaagctgactccagaggccatgcccgacctcaactcctccactgactctgcagcctcagcctctgcagccagtgatgtttctgtagaatctacagaggccacagtctgcacggtgacactggagaagatgtcggcagggctgggcttcagcctggaaggagggaagggctccctacacggagacaagcctctcaccattaacaggattttcaaaggagcagcctcagaacaaagtgagacagtccagcctggagatgaaatcttacagctgggtggcactgccatgcagggcctcacacggtttgaagcctggaacatcatcaaggcactgcctgatggacctgtcacgattgtcatcaggagaaaaagcctccagtccaaggaaaccacagctgctggagactcctaggcaggacatgctgaagccaaagccaataacacacagctaacacacagctcccataaccgctgattctcagggtctctgctgccgccccacccagatgggggaaagcacaggtgggcttcccagtggctgctgcccaggcccagaccttctaggacgccacccagcaaaaggttgttcctaaaataagggcagagtcacacgggggcagctgatacaaattgcagactgtgtaaaaagagagcttaatgataatattgtggtgccacaaataaaatggatttattagaatttcatatgacattcatgcctggcttcgcaaaatgtttcaagtactgtaactgtgtcatgattcacccccaaacagtgacatttatttttctcatgaatctgcaatgtgggcagagattggaatgggcagctcatctctgtcccacttggcatcagctggcgtcatgcaaagtcatgcaaaggctgggaccacgtgagatcattcactcatacatctggccgttgatgttggctgggaactcacctggggctgctggcctgaatgcttataggtggcctctccttgtggcctgggcctcctcacaacatggtgtctggattcccaggatgagcatcccaggatcgcaagagccatgtagaagctgcatcttgtttatacctttgccttggaagttgcatggcatcacctccaccatactccatcagttagagctgacacaaacctgcctgggtttaaggggagaggaaatattgctggggtcatttatgaaaaatacagtttgtcacatgaaacatttgcaaaattgtttttggttggattggagaagtaatcctagggaagggtggtggagccagtaaacagaggagtacaggtgaagcaccaagctcaaagcgtggacaggtgtgccgacagaaggaaccagcgtgtatatgagggtatcaaataaaattgctactacttacctaccacatgccaagcactgtgctcagggctaaacgggcattgcctttagtgatcacagcagcttctacggtgtatggttctgtgccaatgtattgataagagggcacacactgtgtacagtaaatggcttatccagctggtgagtgatgcggcagattgagttttcttctgtgattcggtggagactatcagcccaagatgctttaagtgcacaacattacagggaatgcctgagtgcctggccaaagggatatttggtttggccatctctggatgcctgattgccaagctcaggaccaggcaatgtgactttgcatcagcaacaaccagcatcccttgaccaggcctgggccagagtattggtctcctctcagcccctgatcctgtgaagtaaggatgtgggggaagacctggcaaggacacagatgaaacacaaacaatagtaattctcaggccatcatcagtggagccatgttaatgtaatctgatggcttctccagggtccacaggaagtgaagaatctgtttcccagcagtggactcaaaacccatctgggctcctaaccttcctgtaaacccctttagtggcttcattagagcaggcgttcagctcactgttctattcatctcaaggaataatgggcttagagcagtttctgtcctgctggttaacttgtttggcctattccattctggattttgtcaagcagtagacaagcaattagacaagaacttggaggcaccatttgtatccactttttagacttaatagaaacattgaagatgaacataatctaccaacgaaagacgtgattcaattcaacactcccttcccatgacccaggctgggcaaggaggccacgtgatgtggagggcacattccttgcctgcacaaactcaccatctgtgcacgcagtggccttccctaaaatcagggaattgttttaagtcttatcaagcagccaagggatgaaagagaaggtgggttttcatcaagactggaaggtggggacagggatgagcatggagctggccgtgggcctggggtaccaagagactccttgagagaccaggcaaagcaagtgattgggacagaggttatctgtcccaggttatctgggcatagatgcaggtgagcccatggccctcccagtacctcctgtctctggcctgttttagaaggttctctcctccccaaggagacacaacaactcctagggccactgaagatataactattgcccaggtttctggtctctaggctggggaagtcctctgggtaggaatcagcaagaagatcctaaaacaaaagctcatccatttgcgttccatgatgctgggatttacacttgaggcttagctttgctctgccaacttcttcagagctgacacaggatgaaggcaatgccatcctcaaacactgcaggcatcacagctaacaattgtgaagtcgtcttaactcaccataaaaaggaatccactcccaggcagccctacttctttgctttgcccagcattttactgattcatacattatctcacttgtgccaacactcaagaagcaggctacactgacactggtattcctgcctccatattttctttaaaagacaaatcaaagcagatatattaagtgactgttcaagagcacacttggcccaagtggcagagcttggactggatgcatgttttccagctcctcatccagggctctgaccagtttaacctgatgcagtcacgtggaggagcagtgcaggcacagtatgtcccataggcccagtgagatgcattcttggttggctggccttccacttggctacacagggatgtacaaggcgatcccatcttgataagaccaccacctcagagtatggagctcagagagggcaggcatgaagtttccttggctggtgcacctagaattggctgaactcatgagaagttgatatagaacagtgcttgccacagagcggggactcggtaagcacttaatgaatgaatgaattctaagtcaatccaagagtctgatgatttcttgaaaagggtgttagctaaaggatcttaggcatgactgtagaatttgtagttgcaatagaacagagaaagaggaagctttctgtctccttaacactgagctgtcatgttttaaagcttgctcacatcttggcacatttaagagacagtcaccccaggactcaaaaatagggaagtaacagtaacgcaggggaaacgttttctgtttggaggagcaaaggctgagaacactgtgaaaacattttgcgcgcacaatagtaacctgggtaaatgcagcgtgaagggattttagtcacacgtggtctttcttacaaggaaggtggtgggggtgcagatgaggttgctagagaatgttagaggatccctctctggattggagatagggaaagaaagttgcacggctgctgaggccccttctaggtggcaaggctgtgctccctggttctgatgatgtgcctgggtggacatggcccctgtgagtttgtacagtcttgcagcaggatctagaggggggatttccagccagggctgctagacggaggcctactcttccatctttcctgatggcaggatggcctggccagggcctggaagacagagacctcctgcctccgcctcagtaagacgacaaggaaaggcaaatgcccaagggaaagaaaaggaaggctcttctccccagagttccccatgcagacatgagtgcgtgctcagttcagaatcacttctgagaactcatccctaatgctgcagatttgggctggaacagattcacactgtctggtttcaccgaggacatgaaactccaccttgcggggataaagagagaaaaacaaattcatcaaatggaagacacattgaaagtgtttttccttaatgcttatcctgtttttaaaccattatttccaagttgacaccttttttaaggaaaaataaatattttgcggcattaaagccatatacaaggtctatatcagaaaaatatatttggggggctgcagcacaggactgagggagcggtacatgcttaaaaggcaacagggcctggttttcagtggcgatgatgattctctatgacagtcagggaaacgtggtctctgagagtgatgggcacataaagccttggtgccagagtgcatcgcatggtgtccaggccgagtctctgtcagatggttagaggcctgggtctaccctgccaggagaggcgtgtttgggtaacaggcagatggagtttggaacacatgaatggctcatcacacgccaaccctgagtggggcaggaggcaggaagggtgggctgccgcctctggttggcattctcagagatgcgcagtccatcagcttgttccaaagagtgaacacaggcctctgcgtgctcccaggctccttggtgtcccaacagctggagctcctcgatgagtcacgggagttctttgccaagaagtaacgatagcattactcatggaattgcttcactgctttctgaaggttggcataaaaccgggtcatgctgcgggggaagaaggagtccaccacgttctgtgggaggtaaccgctgaggtcggtatggaagaatgtgaccaggttggtcttggtgggttccctgtgaaggcaacagcagagctgtgttatgatctgcagcagaggtgctggggacgagcgccaggcaggtgagcagagcccagcccagtggaaatggccatgatacagtgatcgcgtctcatcccttgctgtgccctccacccaggagtcctctctggacctgctgattttcaggatggaaacccatcctgtcggggatgcattccacagcctctcccggcctccagggaggaagaagtccctactcccagcccaaaaacccagtaccctgctgcccgattcactcagcaaatgctttcagagaactcactttgtgccaggccctgagaggaacgaagagatgctgcccttcactatttagggtctgcaacctcctgggggctcctgggaccctttcaaggggtctacaaagttaacactatttttataacaacacgaacatgtgattcgccttctctcacatgcatacagtggggttttccggaggttacatgatatgtgatattgcaacagactacacgcacaagcaggtatgagtttctgttaagcctggcatgaaagagatgggcaaaaatataaaaacaatgccactcttttcacagtattttttgttttaaaaaaatagttttttaaaataaaaatgttatctatgttaa

SEQ ID NO: 143853 - DNA, 2977 bp, Homo sapiens
  Payload ID: 8426
  Gene Symbol: IL16
  Gene Name: interleukin 16
  ENST ID: ENST00000560241
  CDS Start-End: 399-1763
catttgcttctcaaggagggcaggagttggaagcgaccgttgtgaaacgttaaagattttctggcagagggaaagggattttttttttctccctccctgccgaggaaaaaacagttctaacgaggagttactttgtagttttaactcatattcaaatactcccagccgagaagctgccatcgatcctcccatggacccctgatcctggtttggaggaacttttcacagctctctctccctccctcaaaccctgtgcaatgagtttgcagaagagagtcttcccgagaaggcagaacgggactcatgaagtggcagctaagccctgtccagtggccacccgtcagccaagggccagagaccaggaaaggaagaaaggcagcttcacttcctctttgaggatggagtcgcacagccgcgctggaaagagcagaaaatctgcaaaatttcggtccatctccaggtccctgatgctctgtaatgctaagaccagtgatgatggctctagccctgatgagaaatatcctgatccctttgagatttccttggcccagggcaaggagggaattttccactcatctgtgcagctggcagacacatcggaggctgggcccagcagtgttcctgatctagcactggcctcggaggctgctcaactccaagcagctgggaatgatcgaggcaagacctgtaggaggatattcttcatgaaggaatcttccacagcttcctctcgagaaaagcctggaaaactagaagcacaaagtagtaacttcctgtttcctaaagcctgccaccaaagggcacgcagcaactcaaccagtgttaatccctattgcacaagagaaattgattttccaatgaccaagaaatctgcagcgcccacggacaggcagccttactctctctgcagtaacaggaagtccctctctcaacaattggactgtccagcaggaaaggctgcgggaacttcgagaccaacacggtccctgagcacagctcagctcgtgcagccatctgggggcctccaggcttcagtcatctccaacatcgtgctgatgaagggccaggctaagggtctgggcttcagcatcgttgggggaaaagacagcatttatggccccattgggatttacgtcaaaaccatttttgcagggggagcagcagcagccgatggaaggctacaggaaggtgatgaaattctggagctcaatggtgaatcaatggctggactaacacatcaggatgctttgcagaagttcaagcaagccaaaaaggggctcctcaccctcaccgtgagaacccgcctgacggcgcctccttccctgtgcagccacctgtctcccccactgtgccgctccctgagctccagcacttgtatcaccaaggacagcagctccttcgccttggaaagcccctcggctcccatcagcaccgccaagcccaattacagaatcatggtggaggtttctctgcagaaagaggccggcgtgggcctgggcatcggcctgtgcagcgttccctacttccaatgcatctctggcattttcgtccacacgctgtcaccaggatccgtggcgcacctggacggacgtctccggtgtggggacgagattgtggaaatcagtgattcccctgtgcactgcctgacgctcaatgaagtctacacgatcctgagtcactgtgatcccggtccagtccccatcattgttagccgacatccagacccacagaaggaagaaatggaggctcaggaggttaagtaacttgtctaggtgttcacacctagacagtagaggaaccgggactagaacacaagcctttttgactctaggactcatactcttaactattactccaaagtgataataaactgtctctgaacagcaactcaaagaagctgtggcccaggctgtggaaaacaccaagtttggaaaggagaggcatcagtggagtctggaagatgcagaaatggagttgggtcccccaggaagctgactctgagatggagtttggtctgcaggcagtgtcctggggttcactacctgtggcagggaggggagcaggcagggtagacagagggaggacggagctgaggtgcacacccaacagcttcagccaagccctggagctctgcagccaaagtccccattagagttgtcctatgttggccaacatagctgggcctctgtaaccctatctccagcagtccctggagatgggctgccccattggacaaggcagctgtctgcagctgtggcagcccctggagggacccacagctgaaagtagtctgccagcagcactccccacagctgggacaccaagcccttcctcgatgggtgatctgggtggcatatctccatatacatcagtcataggctcagaaagcttgaatgattttcccaacccaaagtcatacagctcgccagggaccaacaccaagactgccatactccagatccacagtgacttcagataagaagcagatggccgatgtgcagtgtgctgcccgtggcagtcacaggtgaggccagggggtatttctgttttctgaagctcagctgtgaagattctcttgtgcttcccacacaggtgtcaaaaggctggaaagcagttggcacgggcggcccaccttggagaaggaacgagagaagaactcagcacccccgcatcgcagggctcagaaggtcatgatccgctccagcagtgacagcagctacatgtctgggtccccagggggaagtcctgggagtggcagtgctgagaagccgtcctctgacgtggacatcagcacacacagccccagcttgcctctggcacgggagccagtggtgctttctatagcatcctccaggctgccccaggagagcccacccctcccagagagccgggacagccacccgccgctgagactgaagaaatcctttgagattttggtgagaaagcctatgtcctccaagcccaagcctccacccag

SEQ ID NO: 143854 - DNA, 1922 bp, Homo sapiens
  Payload ID: 8426
  Gene Symbol: IL16
  Gene Name: interleukin 16
  ENST ID: ENST00000558857
  CDS Start-End: 1-135
agtgcctctgccggctgcccaggacctggtatcggcccacagaccaagtcctccacagagggcgagccagggtggagaagagccagcccagcttggaaactagaatttaggaagaaaagtcactgtatgatgtaatgcacagctttggccttgtttctgcactgtagtgacccaaacatccccgataaaacacccactgcttaagaggcaggctcggatggactatagctttgataccacagccgaagacccttgggttaggatttctgactgcatcaaaaacttatttagccccatcatgagtgagaaccatggccacatgcctctacagcccaatgccagcctgaatgaagaagaagggacacagggccacccagatgggaccccaccaaagctggacaccgccaatggcactcccaaagtttacaagtcagcagacagcagcactgtgaagaaaggtcctcctgtggctcccaagccagcctggtttcgccaaagcttgaaaggtttgaggaatcgtgcttcagacccaagagggctccctgatcctgccttgtccacccagccagcacctgcttccagggagcacctaggatcacacatccgggcctcctcctcctcctcctccatcaggcagagaatcagctcctttgaaacctttggctcctctcaactgcctgacaaaggagcccagagactgagcctccagccctcctctggggaggcagcaaaacctcttgggaagcatgaggaaggacggttttctggactcttggggcgaggggctgcacccactcttgtgccccagcagcctgagcaagtactgtcctcggggtcccctgcagcctccgaggccagagacccaggtgtgtctgagtcccctcccccagggcggcagcccaatcagaaaactctcccccctggcccggacccgctcctaaggctgctgtcaacacaggctgaggaatctcaaggcccagtgctcaagatgcctagccagcgagcacggagcttccccctgaccaggtcccagtcctgtgagacgaagctacttgacgaaaagaccagcaaactctattctatcagcagccaagtgtcatcggctgtcatgaaatccttgctgtgccttccatcttctatctcctgtgcccagactccctgcatccccaaggaaggggcatctccaacatcatcatccaacgaagactcagctgcaaatggttctgctgaaacatctgccttggacacagggttctcgctcaacctttcagagctgagagaatatacagagggtctcacggaagccaaggaagacgatgatggggaccacagttcccttcagtctggtcagtccgttatctccctgctgagctcagaagaattaaaaaaactcatcgaggaggtgaaggttctggatgaagcaacattaaagcaattagacggcatccatgtcaccatcttacacaaggaggaaggtgctggtcttgggttcagcttggcaggaggagcagatctagaaaacaaggtgattacggttcacagagtgtttccaaatgggctggcctcccaggaagggactattcagaagggcaatgaggttctttccatcaacggcaagtctctcaaggggaccacgcaccatgatgccttggccatcctccgccaagctcgagagcccaggcaagctgtgattgtcacaaggaagctgactccagaggccatgcccgacctcaactcctccactgactctgcagcctcagcctctgcagccagtgatgtttctgtagaatctacagcagaggccacagtctgcacggtgacactggagaagatgtcggcagggctgggcttcagcctggaaggagggaagggctccctacacggagacaagcctctcaccattaacaggattttcaaaggtg

SEQ ID NO: 143855 - DNA, 2020 bp, Homo sapiens
  Payload ID: 8426
  Gene Symbol: IL16
  Gene Name: interleukin 16
  ENST ID: ENST00000558332
  CDS Start-End: 1-1835
agaggcaggctcggatggactatagctttgataccacagccgaagacccttgggttaggatttctgactgcatcaaaaacttatttagccccatcatgagtgagaaccatggccacatgcctctacagcccaatgccagcctgaatgaagaagaagggacacagggccacccagatgggaccccaccaaagctggacaccgccaatggcactcccaaagtttacaagtcagcagacagcagcactgtgaagaaaggtcctcctgtggctcccaagccagcctggtttcgccaaagcttgaaaggtttgaggaatcgtgcttcagacccaagagggctccctgatcctgccttgtccacccagccagcacctgcttccagggagcacctaggatcacacatccgggcctcctcctcctcctcctccatcaggcagagaatcagctcctttgaaacctttggctcctctcaactgcctgacaaaggagcccagagactgagcctccagccctcctctggggaggcagcaaaacctcttgggaagcatgaggaaggacggttttctggactcttggggcgaggggctgcacccactcttgtgccccagcagcctgagcaagtactgtcctcggggtcccctgcagcctccgaggccagagacccaggtgtgtctgagtcccctcccccagggcggcagcccaatcagaaaactctcccccctggcccggacccgctcctaaggctgctgtcaacacaggctgaggaatctcaaggcccagtgctcaagatgcctagccagcgagcacggagcttccccctgaccaggtcccagtcctgtgagacgaagctacttgacgaaaagaccagcaaactctattctatcagcagccaagtgtcatcggctgtcatgaaatccttgctgtgccttccatcttctatctcctgtgcccagactccctgcatccccaaggaaggggcatctccaacatcatcatccaacgaagactcagctgcaaatggttctgctgaaacatctgccttggacacagggttctcgctcaacctttcagagctgagagaatatacagagggtctcacggaagccaaggaagacgatgatggggaccacagttcccttcagtctggtcagtccgttatctccctgctgagctcagaagaattaaaaaaactcatcgaggaggtgaaggttctggatgaagcaacattaaagcaattagacggcatccatgtcaccatcttacacaaggaggaaggtgctggtcttgggttcagcttggcaggaggagcagatctagaaaacaaggtgattacggttcacagagtgtttccaaatgggctggcctcccaggaagggactattcagaagggcaatgaggttctttccatcaacggcaagtctctcaaggggaccacgcaccatgatgccttggccatcctccgccaagctcgagagcccaggcaagctgtgattgtcacaaggaagctgactccagaggccatgcccgacctcaactcctccactgactctgcagcctcagcctctgcagccagtgatgtttctgtagaatctacagaggccacagtctgcacggtgacactggagaagatgtcggcagggctgggcttcagcctggaaggagggaagggctccctacacggagacaagcctctcaccattaacaggattttcaaaggtgtggggtgtgtctggttctttgcgtgctctccagttgtgggcatgtggccaggcccccaaaaggcttctgggcactttctgggctatgttgtttcccacaactccatgtcctcttcataggcatgctggtccttttagggctcaattctgctttttctactttttctcctttgctcagacatcccctcaatcccccctctgttttgatgggtcttcaaaaatacctaagtcctgggcttggttcgggttggcagggccaggactctagagtggggcagtgaggcactggcctgtggggcagaatt

SEQ ID NO: 143856 - DNA, 2158 bp, Homo sapiens
  Payload ID: 8426
  Gene Symbol: IL16
  Gene Name: interleukin 16
  ENST ID: ENST00000559383
  CDS Start-End: 377-2158
cacatttgtcctgagtcacctgtccagagcaggtggtgaatattgtgtcctactcacggcatctcaactatcggagcctgggatctgactcaaaggccggcctccgtctgagaactgagcgtccatttctcaatccttgccggctctgacccaggcctgggccacaggctgtccgggaataagtggtgctgcaatccctgctgggcagatggagagaggagcaagggagatggcagccccgggggactgtgcatagggaggtaggtgggcaccagggactcatgaagtggcagctaagccctgtccagtggccacccgtcagccaagggccagagaccaggaaaggaagaaaggcagcttcacttcctctttgaggatggagtcgcacagccgcgctggaaagagcagaaaatctgcaaaatttcggtccatctccaggtccctgatgctctgtaatgctaagaccagtgatgatggctctagccctgatgagaaatatcctgatccctttgagatttccttggcccagggcaaggagggaattttccactcatctgtgcagctggcagacacatcggaggctgggcccagcagtgttcctgatctagcactggcctcggaggctgctcaactccaagcagctgggaatgatcgaggcaagacctgtaggaggatattcttcatgaaggaatcttccacagcttcctctcgagaaaagcctggaaaactagaagcacaaagtagtaacttcctgtttcctaaagcctgccaccaaagggcacgcagcaactcaaccagtgttaatccctattgcacaagagaaattgattttccaatgaccaagaaatctgcagcgcccacggacaggcagccttactctctctgcagtaacaggaagtccctctctcaacaattggactgtccagcaggaaaggctgcgggaacttcgagaccaacacggtccctgagcacagctcagctcgtgcagccatctgggggcctccaggcttcagtcatctccaacatcgtgctgatgaagggccaggctaagggtctgggcttcagcatcgttgggggaaaagacagcatttatggccccattgggatttacgtcaaaaccatttttgcagggggagcagcagcagccgatggaaggctacaggaaggtgatgaaattctggagctcaatggtgaatcaatggctggactaacacatcaggatgctttgcagaagttcaagcaagccaaaaaggggctcctcaccctcaccgtgagaacccgcctgacggcgcctccttccctgtgcagccacctgtctcccccactgtgccgctccctgagctccagcacttgtatcaccaaggacagcagctccttcgccttggaaagcccctcggctcccatcagcaccgccaagcccaattacagaatcatggtggaggtttctctgcagaaagaggccggcgtgggcctgggcatcggcctgtgcagcgttccctacttccaatgcatctctggcattttcgtccacacgctgtcaccaggatccgtggcgcacctggacggacgtctccggtgtggggacgagattgtggaaatcagtgattcccctgtgcactgcctgacgctcaatgaagtctacacgatcctgagtcactgtgatcccggtccagtccccatcattgttagccgacatccagacccacaggtctctgaacagcaactcaaagaagctgtggcccaggctgtggaaaacaccaagtttggaaaggagaggcatcagtggagtctggaaggtgtcaaaaggctggaaagcagttggcacgggcggcccaccttggagaaggaacgagagaagaactcagcacccccgcatcgcagggctcagaaggtcatgatccgctccagcagtgacagcagctacatgtctgggtccccagggggaagtcctgggagtggcagtgctgagaagccgtcctctgacgtggacatcagcacacacagccccagcttgcctctggcacgggagccagtggtgctttctatagcatcctccaggctgccccaggagagcccacccctcccagagagccgggacagccacccgccgctgagactgaagaaatcctttgagattttggtgagaaagcctatgtcc

SEQ ID NO: 143857 - DNA, 3775 bp, Homo sapiens
  Payload ID: 8426
  Gene Symbol: IL16
  Gene Name: interleukin 16
  ENST ID: ENST00000560115
  CDS Start-End: 1-604
gcagaagttcaagcaagccaaaaaggggctcctcaccctcaccgtgagaacccgcctgacggcgcctccttccctgtgcagccacctgtctcccccactgtgccgctccctgagctccagcacttgtatcaccaaggacagcagctccttcgccttggaaagcccctcggctcccatcagcaccgccaagcccaattacagaatcatggtggaggtttctctgcagaaagaggccggcgtgggcctgggcatcggcctgtgcagcgttccctacttccaatgcatctctggcattttcgtccacacgctgtcaccaggatccgtggcgcacctggacggacgtctccggtgtggggacgagattgtggaaatcagtgattcccctgtgcactgcctgacgctcaatgaagtctacacgatcctgagtcactgtgatcccggtccagtccccatcattgttagccgacatccagacccacaggtctctgaacagcaactcaaagaagctgtggcccaggctgtggaaaacaccaagtttggaaaggagaggcatcagtggagtctggaagatgcagaaatggagttgggtcccccaggaagctgactctgagatggagtttggtctgcaggcagtgtcctggggttcactacctgtggcagggaggggagcaggcagggtagacagagggaggacggagctgaggtgcacacccaacagcttcagccaagccctggagctctgcagccaaagtccccattagagttgtcctatgttggccaacatagctgggcctctgtaaccctatctccagcagtccctggagatgggctgccccattggacaaggcagctgtctgcagctgtggcagcccctggagggacccacagctgaaagtagtctgccagcagcactccccacagctgggacaccaagcccttcctcgatgggtgatctgggtggcatatctccatatacatcagtcataggctcagaaagcttgaatgattttcccaacccaaagtcatacagctcgccagggaccaacaccaagactgccatactccagatccacagtgacttcagataagaagcagatggccgatgtgcagtgtgctgcccgtggcagtcacaggtgaggccagggggtatttctgttttctgaagctcagctgtgaagattctcttgtgcttcccacacaggtgtcaaaaggctggaaagcagttggcacgggcggcccaccttggagaaggaacgagagaagaactcagcacccccgcatcgcagggctcagaaggtcatgatccgctccagcagtgacagcagctacatgtctgggtccccagggggaagtcctgggagtggcagtgctgagaagccgtcctctgacgtggacatcagcacacacagccccagcttgcctctggcacgggagccagtggtgctttctatagcatcctccaggctgccccaggagagcccacccctcccagagagccgggacagccacccgccgctgagactgaagaaatcctttgagattttggtgagaaagcctatgtcctccaagcccaagcctccacccagaaaatactttaaaagtgacagtgaccctcagaagagtctggaagagagagagaactcctcatgctcttctgggcacaccccacccacctgtggccaggggctaattctgaagtctcccatgaagaggatgcaatattggatgtgttgatgaaaagacaaaacacatttgtgctgttctaagttgtaaagctgcattgactgcagttggtatcacatgtggctgcctgtaaaagagctaacaattcatgaatgtcaacagatgtcaacttacagagctcccaaccaggaagcgagagagctgctgccactgctgctaccacaggaagacacagcagggagaagccctagtgcctctgccggctgcccaggacctggtatcggcccacagaccaagtcctccacagagggcgagccagggtggagaagagccagcccagtgacccaaacatccccgataaaacacccactgcttaagaggcaggctcggatggactatagctttgataccacagccgaagacccttgggttaggatttctgactgcatcaaaaacttatttagccccatcatgagtgagaaccatggccacatgcctctacagcccaatgccagcctgaatgaagaagaagggacacagggccacccagatgggaccccaccaaagctggacaccgccaatggcactcccaaagtttacaagtcagcagacagcagcactgtgaagaaaggtcctcctgtggctcccaagccagcctggtttcgccaaagcttgaaaggtttgaggaatcgtgcttcagacccaagagggctccctgatcctgccttgtccacccagccagcacctgcttccagggagcacctaggatcacacatccgggcctcctcctcctcctcctccatcaggcagagaatcagctcctttgaaacctttggctcctctcaactgcctgacaaaggagcccagagactgagcctccagccctcctctggggaggcagcaaaacctcttgggaagcatgaggaaggacggttttctggactcttggggcgaggggctgcacccactcttgtgccccagcagcctgagcaagtactgtcctcggggtcccctgcagcctccgaggccagagacccaggtgtgtctgagtcccctcccccagggcggcagcccaatcagaaaactctcccccctggcccggacccgctcctaaggctgctgtcaacacaggctgaggaatctcaaggcccagtgctcaagatgcctagccagcgagcacggagcttccccctgaccaggtcccagtcctgtgagacgaagctacttgacgaaaagaccagcaaactctattctatcagcagccaagtgtcatcggctgtcatgaaatccttgctgtgccttccatcttctatctcctgtgcccagactccctgcatccccaaggaaggggcatctccaacatcatcatccaacgaagactcagctgcaaatggttctgctgaaacatctgccttggacacagggttctcgctcaacctttcagagctgagagaatatacagagggtctcacggaagccaaggaagacgatgatggggaccacagttcccttcagtctggtcagtccgttatctccctgctgagctcagaagaattaaaaaaactcatcgaggaggtgaaggttctggatgaagcaacattaaagcaattagacggcatccatgtcaccatcttacacaaggaggaaggtgctggtcttgggttcagcttggcaggaggagcagatctagaaaacaaggtgattacggttcacagagtgtttccaaatgggctggcctcccaggaagggactattcagaagggcaatgaggttctttccatcaacggcaagtctctcaaggggaccacgcaccatgatgccttggccatcctccgccaagctcgagagcccaggcaagctgtgattgtcacaaggaagctgactccagaggccatgcccgacctcaactcctccactgactctgcagcctcagcctctgcagccagtgatgtttctgtagaatctacagaggccacagtctgcacggtgacactggagaagatgtcggcagggctgggcttcagcctggaaggagggaagggctccctacacggagacaagcctctcaccattaacaggattttcaaaggtg

SEQ ID NO: 143858 - DNA, 5120 bp, Homo sapiens
  Payload ID: 8426
  Gene Symbol: IL16
  Gene Name: interleukin 16
  ENST ID: ENST00000360547
  CDS Start-End: 190-1644
agtttgcagaagagagtcttcccgagaaggcagaacgagggtgtgtggagcactgcgggcgagatggagctgagggaaggcagagctgggactcatgaagtggcagctaagccctgtccagtggccacccgtcagccaagggccagagaccaggaaaggaagaaaggcagcttcacttcctctttgaggatggagtcgcacagccgcgctggaaagagcagaaaatctgcaaaatttcggtccatctccaggtccctgatgctctgtaatgctaagaccagtgatgatggctctagccctgatgagaaatatcctgatccctttgagatttccttggcccagggcaaggagggaattttccactcatctgtgcagctggcagacacatcggaggctgggcccagcagtgttcctgatctagcactggcctcggaggctgctcaactccaagcagctgggaatgatcgaggcaagacctgtaggaggatattcttcatgaaggaatcttccacagcttcctctcgagaaaagcctggaaaactagaagcacaaagtagtaacttcctgtttcctaaagcctgccaccaaagggcacgcagcaactcaaccagtgttaatccctattgcacaagagaaattgattttccaatgaccaagaaatctgcagcgcccacggacaggcagccttactctctctgcagtaacaggaagtccctctctcaacaattggactgtccagcaggaaaggctgcgggaacttcgagaccaacacggtccctgagcacagctcagctcgtgcagccatctgggggcctccaggcttcagtcatctccaacatcgtgctgatgaagggccaggctaagggtctgggcttcagcatcgttgggggaaaagacagcatttatggccccattgggatttacgtcaaaaccatttttgcagggggagcagcagcagccgatggaaggctacaggaaggtgatgaaattctggagctcaatggtgaatcaatggctggactaacacatcaggatgctttgcagaagttcaagcaagccaaaaaggggctcctcaccctcaccgtgagaacccgcctgacggcgcctccttccctgtgcagccacctgtctcccccactgtgccgctccctgagctccagcacttgtatcaccaaggacagcagctccttcgccttggaaagcccctcggctcccatcagcaccgccaagcccaattacagaatcatggtggaggtttctctgcagaaagaggccggcgtgggcctgggcatcggcctgtgcagcgttccctacttccaatgcatctctggcattttcgtccacacgctgtcaccaggatccgtggcgcacctggacggacgtctccggtgtggggacgagattgtggaaatcagtgattcccctgtgcactgcctgacgctcaatgaagtctacacgatcctgagtcactgtgatcccggtccagtccccatcattgttagccgacatccagacccacaggtctctgaacagcaactcaaagaagctgtggcccaggctgtggaaaacaccaagtttggaaaggagaggcatcagtggagtctggaagatgcagaaatggagttgggtcccccaggaagctgactctgagatggagtttggtctgcaggcagtgtcctggggttcactacctgtggcagggaggggagcaggcagggtagacagagggaggacggagctgaggtgcacacccaacagcttcagccaagccctggagctctgcagccaaagtccccattagagttgtcctatgttggccaacatagctgggcctctgtaaccctatctccagcagtccctggagatgggctgccccattggacaaggcagctgtctgcagctgtggcagcccctggagggacccacagctgaaagtagtctgccagcagcactccccacagctgggacaccaagcccttcctcgatgggtgatctgggtggcatatctccatatacatcagtcataggctcagaaagcttgaatgattttcccaacccaaagtcatacagctcgccagggaccaacaccaagactgccatactccagatccacagtgacttcagataagaagcagatggccgatgtgcagtgtgctgcccgtggcagtcacaggtgaggccagggggtatttctgttttctgaagctcagctgtgaagattctcttgtgcttcccacacaggtgtcaaaaggctggaaagcagttggcacgggcggcccaccttggagaaggaacgagagaagaactcagcacccccgcatcgcagggctcagaaggtcatgatccgctccagcagtgacagcagctacatgtctgggtccccagggggaagtcctgggagtggcagtgctgagaagccgtcctctgacgtggacatcagcacacacagccccagcttgcctctggcacgggagccagtggtgctttctatagcatcctccaggctgccccaggagagcccacccctcccagagagccgggacagccacccgccgctgagactgaagaaatcctttgagattttggtgagaaagcctatgtcctccaagcccaagcctccacccagaaaatactttaaaagtgacagtgaccctcagaagagtctggaagagagagagaactcctcatgctcttctgggcacaccccacccacctgtggccaggaagcgagagagctgctgccactgctgctaccacaggaagacacagcagggagaagccctagtgcctctgccggctgcccaggacctggtatcggcccacagaccaagtcctccacagagggcgagccagggtggagaagagccagcccagtgacccaaacatccccgataaaacacccactgcttaagaggcaggctcggatggactatagctttgataccacagccgaagacccttgggttaggatttctgactgcatcaaaaacttatttagccccatcatgagtgagaaccatggccacatgcctctacagcccaatgccagcctgaatgaagaagaagggacacagggccacccagatgggaccccaccaaagctggacaccgccaatggcactcccaaagtttacaagtcagcagacagcagcactgtgaagaaaggtcctcctgtggctcccaagccagcctggtttcgccaaagcttgaaaggtttgaggaatcgtgcttcagacccaagagggctccctgatcctgccttgtccacccagccagcacctgcttccagggagcacctaggatcacacatccgggcctcctcctcctcctcctccatcaggcagagaatcagctcctttgaaacctttggctcctctcaactgcctgacaaaggagcccagagactgagcctccagccctcctctggggaggcagcaaaacctcttgggaagcatgaggaaggacggttttctggactcttggggcgaggggctgcacccactcttgtgccccagcagcctgagcaagtactgtcctcggggtcccctgcagcctccgaggccagagacccaggtgtgtctgagtcccctcccccagggcggcagcccaatcagaaaactctcccccctggcccggacccgctcctaaggctgctgtcaacacaggctgaggaatctcaaggcccagtgctcaagatgcctagccagcgagcacggagcttccccctgaccaggtcccagtcctgtgagacgaagctacttgacgaaaagaccagcaaactctattctatcagcagccaagtgtcatcggctgtcatgaaatccttgctgtgccttccatcttctatctcctgtgcccagactccctgcatccccaaggaaggggcatctccaacatcatcatccaacgaagactcagctgcaaatggttctgctgaaacatctgccttggacacagggttctcgctcaacctttcagagctgagagaatatacagagggtctcacggaagccaaggaagacgatgatggggaccacagttcccttcagtctggtcagtccgttatctccctgctgagctcagaagaattaaaaaaactcatcgaggaggtgaaggttctggatgaagcaacattaaagcaattagacggcatccatgtcaccatcttacacaaggaggaaggtgctggtcttgggttcagcttggcaggaggagcagatctagaaaacaaggtgattacggttcacagagtgtttccaaatgggctggcctcccaggaagggactattcagaagggcaatgaggttctttccatcaacggcaagtctctcaaggggaccacgcaccatgatgccttggccatcctccgccaagctcgagagcccaggcaagctgtgattgtcacaaggaagctgactccagaggccatgcccgacctcaactcctccactgactctgcagcctcagcctctgcagccagtgatgtttctgtagaatctacagcagaggccacagtctgcacggtgacactggagaagatgtcggcagggctgggcttcagcctggaaggagggaagggctccctacacggagacaagcctctcaccattaacaggattttcaaaggagcagcctcagaacaaagtgagacagtccagcctggagatgaaatcttacagctgggtggcactgccatgcagggcctcacacggtttgaagcctggaacatcatcaaggcactgcctgatggacctgtcacgattgtcatcaggagaaaaagcctccagtccaaggaaaccacagctgctggagactcctaggcaggacatgctgaagccaaagccaataacacacagctaacacacagctcccataaccgctgattctcagggtctctgctgccgccccacccagatgggggaaagcacaggtgggcttcccagtggctgctgcccaggcccagaccttctaggacgccacccagcaaaaggttgttcctaaaataagggcagagtcacacgggggcagctgatacaaattgcagactgtgtaaaaagagagcttaatgataatattgtggtgccacaaataaaatggatttattagaatttcatatgaca

SEQ ID NO: 143859 - DNA, 2018 bp, Homo sapiens
  Payload ID: 8426
  Gene Symbol: IL16
  Gene Name: interleukin 16
  Uniprot ID: Q14005
  ENST ID: ENST00000559388
  CDS Start-End: 15-1697
agaggcaggctcggatggactatagctttgataccacagccgaagacccttgggttaggatttctgactgcatcaaaaacttatttagccccatcatgagtgagaaccatggccacatgcctctacagcccaatgccagcctgaatgaagaagaagggacacagggccacccagatgggaccccaccaaagctggacaccgccaatggcactcccaaagtttacaagtcagcagacagcagcactgtgaagaaaggtcctcctgtggctcccaagccagcctggtttcgccaaagcttgaaaggtttgaggaatcgtgcttcagacccaagagggctccctgatcctgccttgtccacccagccagcacctgcttccagggagcacctaggatcacacatccgggcctcctcctcctcctcctccatcaggcagagaatcagctcctttgaaacctttggctcctctcaactgcctgacaaaggagcccagagactgagcctccagccctcctctggggaggcagcaaaacctcttgggaagcatgaggaaggacggttttctggactcttggggcgaggggctgcacccactcttgtgccccagcagcctgagcaagtactgtcctcggggtcccctgcagcctccgaggccagagacccaggtgtgtctgagtcccctcccccagggcggcagcccaatcagaaaactctcccccctggcccggacccgctcctaaggctgctgtcaacacaggctgaggaatctcaaggcccagtgctcaagatgcctagccagcgagcacggagcttccccctgaccaggtcccagtcctgtgagacgaagctacttgacgaaaagaccagcaaactctattctatcagcagccaagtgtcatcggctgtcatgaaatccttgctgtgccttccatcttctatctcctgtgcccagactccctgcatccccaaggaaggggcatctccaacatcatcatccaacgaagactcagctgcaaatggttctgctgaaacatctgccttggacacagggttctcgctcaacctttcagagctgagagaatatacagagggtctcacggaagccaaggaagacgatgatggggaccacagttcccttcagtctggtcagtccgttatctccctgctgagctcagaagaattaaaaaaactcatcgaggaggtgaaggttctggatgaagcaacattaaagcaattagacggcatccatgtcaccatcttacacaaggaggaaggtgctggtcttgggttcagcttggcaggaggagcagatctagaaaacaaggtgattacggttcacagagtgtttccaaatgggctggcctcccaggaagggactattcagaagggcaatgaggttctttccatcaacggcaagtctctcaaggggaccacgcaccatgatgccttggccatcctccgccaagctcgagagcccaggcaagctgtgattgtcacaaggaagctgactccagaggccatgcccgacctcaactcctccactgactctgcagcctcagcctctgcagccagtgatgtttctgtagaatctacagaggccacagtctgcacggtgacactggaagatgtcggcagggctgggcttcagcctggaaggagggaagggctccctacacggagacaagcctctcaccattaacaggattttcaaaggtgtggggtgtgtctggttctttgcgtgctctccagttgtgggcatgtggccaggcccccaaaaggcttctgggcactttctgggctatgttgtttcccacaactccatgtcctcttcataggcatgctggtccttttagggctcaattctgctttttctactttttctcctttgctcagacatcccctcaatcccccctctgttttgatgggtcttcaaaaatacctaagtcctgggcttggttcgggttggcagggccaggactctagagtggggcagtgaggcactggcctgtggggcagaatt

SEQ ID NO: 143860 - DNA, 8607 bp, Homo sapiens
  Payload ID: 8427
  Gene Symbol: IL17RA
  Gene Name: interleukin 17 receptor A
  Uniprot ID: Q96F46
  ENST ID: ENST00000319363
  CDS Start-End: 134-2734
ctgggcccgggctggaagccggaagcgagcaaagtggagccgactcgaactccaccgcggaaaagaaagcctcagaacgttcgttcgctgcgtccccagccggggccgagccctccgcgacgccagccgggccatgggggccgcacgcagcccgccgtccgctgtcccggggcccctgctggggctgctcctgctgctcctgggcgtgctggccccgggtggcgcctccctgcgactcctggaccaccgggcgctggtctgctcccagccggggctaaactgcacggtcaagaatagtacctgcctggatgacagctggattcaccctcgaaacctgaccccctcctccccaaaggacctgcagatccagctgcactttgcccacacccaacaaggagacctgttccccgtggctcacatcgaatggacactgcagacagacgccagcatcctgtacctcgagggtgcagagttatctgtcctgcagctgaacaccaatgaacgtttgtgcgtcaggtttgagtttctgtccaaactgaggcatcaccacaggcggtggcgttttaccttcagccactttgtggttgaccctgaccaggaatatgaggtgaccgttcaccacctgcccaagcccatccctgatggggacccaaaccaccagtccaagaatttccttgtgcctgactgtgagcacgccaggatgaaggtaaccacgccatgcatgagctcaggcagcctgtgggaccccaacatcaccgtggagaccctggaggcccaccagctgcgtgtgagcttcaccctgtggaacgaatctacccattaccagatcctgctgaccagttttccgcacatggagaaccacagttgctttgagcacatgcaccacatacctgcgcccagaccagaagagttccaccagcgatccaacgtcacactcactctacgcaaccttaaagggtgctgtcgccaccaagtgcagatccagcccttcttcagcagctgcctcaatgactgcctcagacactccgcgactgtttcctgcccagaaatgccagacactccagaaccaattccggactacatgcccctgtgggtgtactggttcatcacgggcatctccatcctgctggtgggctccgtcatcctgctcatcgtctgcatgacctggaggctagctgggcctggaagtgaaaaatacagtgatgacaccaaatacaccgatggcctgcctgcggctgacctgatccccccaccgctgaagcccaggaaggtctggatcatctactcagccgaccaccccctctacgtggacgtggtcctgaaattcgcccagttcctgctcaccgcctgcggcacggaagtggccctggacctgctggaagagcaggccatctcggaggcaggagtcatgacctgggtgggccgtcagaagcaggagatggtggagagcaactctaagatcatcgtcctgtgctcccgcggcacgcgcgccaagtggcaggcgctcctgggccggggggcgcctgtgcggctgcgctgcgaccacggaaagcccgtgggggacctgttcactgcagccatgaacatgatcctcccggacttcaagaggccagcctgcttcggcacctacgtagtctgctacttcagcgaggtcagctgtgacggcgacgtccccgacctgttcggcgcggcgccgcggtacccgctcatggacaggttcgaggaggtgtacttccgcatccaggacctggagatgttccagccgggccgcatgcaccgcgtaggggagctgtcgggggacaactacctgcggagcccgggcggcaggcagctccgcgccgccctggacaggttccgggactggcaggtccgctgtcccgactggttcgaatgtgagaacctctactcagcagatgaccaggatgccccgtccctggacgaagaggtgtttgaggagccactgctgcctccgggaaccggcatcgtgaagcgggcgcccctggtgcgcgagcctggctcccaggcctgcctggccatagacccgctggtcggggaggaaggaggagcagcagtggcaaagctggaacctcacctgcagccccggggtcagccagcgccgcagcccctccacaccctggtgctcgccgcagaggagggggccctggtggccgcggtggagcctgggcccctggctgacggtgccgcagtccggctggcactggcgggggagggcgaggcctgcccgctgctgggcagcccgggcgctgggcgaaatagcgtcctcttcctccccgtggaccccgaggactcgccccttggcagcagcacccccatggcgtctcctgacctccttccagaggacgtgagggagcacctcgaaggcttgatgctctcgctcttcgagcagagtctgagctgccaggcccaggggggctgcagtagacccgccatggtcctcacagacccacacacgccctacgaggaggagcagcggcagtcagtgcagtctgaccagggctacatctccaggagctccccgcagccccccgagggactcacggaaatggaggaagaggaggaagaggagcaggacccagggaagccggccctgccactctctcccgaggacctggagagcctgaggagcctccagcggcagctgcttttccgccagctgcagaagaactcgggctgggacacgatggggtcagagtcagaggggcccagtgcatgagggcggctccccagggaccgcccagatcccagctttgagagaggagtgtgtgtgcacgtattcatctgtgtgtacatgtctgcatgtgtatatgttcgtgtgtgaaatgtaggctttaaaatgtaaatgtctggattttaatcccaggcatccctcctaacttttctttgtgcagcggtctggttatcgtctatccccaggggaatccacacagcccgctcccaggagctaatggtagagcgtccttgaggctccattattcgttcattcagcatttattgtgcacctactatgtggcgggcatttgggataccaagataaattgcatgcggcatggccccagccatgaaggaacttaaccgctagtgccgaggacacgttaaacgaacaggatgggccgggcacggtggctcacgcctgtaatcccagcacactgggaggccgaggcaggtggatcactctgaggtcaggagtttgagccagcctggccaacatggtgaaaccccatctccactaaaaatagaaaaattagccgggcatggtgacacatgcctgtagtcctagctacttgggaggctgaggcaggagaattgcttgaatctgggaggcagaggttgcagtgagccgagattgtgccattgcactgcagcctggatgacagagcgagactctatctcaaaaaaaaaaaaaaaaaaagatggtcacgcgggatgtaaacgctgaatgggccaggtgcagtggctcatgcttgtaatcccagcactttgggaaggcgaggcaggtggattgcttgagctcaggagttcaagaccagcctgggcgacatagtgagacctcatctctacctaaatttttttttagtcagtcatggtggcacatgcctgtagtcccagctactcgggaggctgatgccagatgatcacttgagcccaggaggtagaggctgcagtgagctataatggtaccattgcaatccagcctgggcagcagagtgagaccctgtctcaaaaaaaataaaaaagtagaaagatggagtggaagcctgcccagggttgtgagcatgcacgggaaaggcacccaggtcaggggggatccccgaggagatgcctgagctgaaggattgtggttggggaaagcgtagtcccagcaaggaagcagtttgtgggtaagtgctgggaggtgagtggagtgagcttgtcagggagctgctggtggagcctggaggggaaggagggaggcagtgagagagatcggggtggggggtggggggatgtcgccagagctcaggggtggggacagccttgtgcgcatcagtcctgaggcctggggcacctttcgtctgatgagcctctgcatggagagaggctgagggctaaacacagctggatgtcacctgagttcatttataggaagagagaaatgtcgaggtgaaacgtaaaagcatctggcaggaaggtgagtctgaagccctgcacccgcgttccgactatcagtggggagctgttagcacgtaggattcttcagagcagctgggctggagctcccctgagctcaggaagccccagggtgcaagggcaaggaaatgaggggtggtgggtcagtgaagatctgggcagaccttgtgtggggaaggggtgctgctgtgacttcagggtctgaggtccaaagacagcatttgaaaagaggctctgaagccagtgtttgaagaatttgttcctgaagtacctcctgggggtaggctagaggcttctggcttcagggtcctgaagaacacattgaggtgccgtctgacactggaatagggtgcccttcattcctatgcctgagtccttaactatatttccaacctccagtgaggaggagaagattcggaaatgtgacaggagagcaaacaggacagtttgcatgtgtgtgtgcgcacacatacatgtgcgtgaaagattatcaataaaagtgcataaatttgttgatctggtaagagtttctagcaggaaggtcgagccacttactgtaggtcaagaagttgctagttgcggagttttttcttgcagttagactttacctagtggtagcagggccaccaaagctctgtgtcccagatggtgtatggcccataatccacccaacagcagcaaaggaccaggcaaaggagaacaggagcagaagcctcccagccactagccttttgggctcagtctctccaataatcctggagaggggcttcgttgggtctggacacctaccatgcattctgtgacctttccctagcttccaataaataactgtttgacgcccagagtacaggataccacaatgcactcttcctgcgtagagcacatgttcccatctgctcccattcctcaggaaccttgaattctagctctgctggcctttgagcccatgccagtaaatgtcctgatgggcattgcctactatctccagggcagctgcctttgtcctcctaacagctttattggagtacagttcacttaccatacaatccacaattgaccctgcacaatttgatgccggtttagtatagtcacagttcagcagccatcagcacagtcagtcttagagtttactacccccaaaagaaatccagccccccttagtcaccaccccaacctccccatccctaggcacccctaggctactttgatctctgtagacttgcctcttctggacatgacatagagaaaggagtcataaattctccaaggtgtctgtttcttctttaatgtcattccctgtttctcctcacattccctccccatttcctgggcccagtctcacactggtccttgcttaccctaaatgctattaattccatcactctgagtatggtgtttgctgtccgctgaatgccaagagcttcaagagtgtgtgtaaataaagccacacctttatttttgtattattctgaaccatggctaataaattgtttcaccaagaaatgtctctctaagaacaggtgccctccacgctgtgcccctcccacctcttcagctcgtctcctgagtgtgcagaggtggttccggttgggaaagaagcagcggagcatctaaccatgcctgtgtccaggccgattatgcacgcagccaccaacaagctcccaactcccgcgtagagtttcatgactttttcctgcctactatcttgatcctagttttttttttgttttttttttttttaaggaataattactttgattcaaaaccagtttctcttttctgcataggaaggtccttgaaggtgtttagggtctaaaaagggtggtgttcggtctctgaaacatccattcagcagtttgagctgggatctctgaatgcaagggtatgatggatatacttctttcttgcttttgttgtgttttggttttttgtttgtttttaagtcagggtctctctgtcaccaggctgtattacagtggtgcaatcatggctcactgcagcctcgacctcccaggctcaagccatctttccacctcagcctgccagtggctagaactacaggcgtgcaccactgtgcccggctaatttgtgtgtatatattttgtagaaatggggtttcaccatgttgtccaggctggtcacgaactcctgggctcaagccatctgcccgcctcatcctcccaaagtgctgggattataggcctgagcccaccgtgcctggcctttcctgtttatctttgaaaattaaatagggcataagagagaagaagatgtacttacaatgcagtgggtggttttaactctatagcctttgggctctgtggttggtgctccccttcctaaataaatgaggtgtatgcagggccctcttctgccttagcgccctgccagctgggactccagcaaggcccggggcacctgaggacagagtgagatggagggccgctgctccagcagccgggcctgcatcccacaagtcaactgtgtcggacagaggatccttacaaagaagaggcagcagggttgggggctggccagctgctcgtccgccctaggtagcttgctcatctgtaaagtgggtggggcaggagttcccacctcatggggtcctggcaagcctgcagtatccccgagtggcaccagcctgcttctggggcagagcagtttgtgccccctgaggtaccactgatcctctttccctgctattaggtattgctctcttcctccggtgtttgccttttcagattatagaagtaatatgtgttcccatatttggcgtctctcaggagctcaggaagtacttggctgagtgaacatgtccattgtggaaaaatggcaacaatatggattccatgggtatattttatagaagaatatgaagaaaagcagctacccctaaacccattgcacaagctgttcatgttaattctgtacccgacgctttccccacggggcctcccctcactctgaaatggcatccaggtccatcttgccctccacctctgcatggctctccatgccccatcgcctctcccagatcctagcactgggtccacactctcgccctgtccatttaggttgatgaaagcaggcagtcacccgggtgggccagtcttgcctgtgggaggaacatgcagtctcctgtctcatggtttgaagtgtgccaggaagcctggcccagcccacctccccctggagtccttcccaggaggaataaccccttaggtcattgactataagatgagttcgctcactggatccttcctctctgatgagacaggaagaaggtacacagtgaccaggtaggaggaggagagggagtagaaaggagggatgcgggtggctggtccctgcatttgcctgcttccctgcacgggtgtcccactggccgcctctgctcaccagtgtcatgggattctctcagaagatgaaaacagcccctgcttttttgctagaatggctgagctttcatggaaaggaagctggacccaagcaacagccgactaccgaaggttgcctggagcagtgcagatgtgggaggaagaagggccttggtgcacactggcttttcttcctgactgcaatgtggcattgtgccagctacctcctctttctcggcctcaggaaaatggagagaaagcagccctgaaggtggctgtgacgagggaaggggcagagggcctgacagtcaaccacgcgctatattttcctgttcttccttagggcaagaactgcatggccagactcaggcaaggcctaggtgtgggctgggcattgcctacacgtgaagagatcactccgcgtccctactgcacctgtcacaaagtgccttctgatatgcctggcaaaccaaaatcggtgagcgccagcttgcttccctagaagacatttctaaatattcataacatgcttgctcaaatcaatcaccttattttacatccgctccagggagaaatgaagacatggtcctacgttgttctgtaattattttctatgtaaattttgttccttgttacaattatatatgtcttaggggaaaggaccatttcacatgtgtcacctcatgtgattctcaccacagccctgtgattgctcctgttttataaataatgacatagttccagttgatggccaaagccacagctaacgagaggcagagagagctcaggctcccaggagcttccactctcagaccttgcctcccgggctgccctgagtgaaacgcctgcttagcatttggcacagccagaagcagcaagctagggtcacaacacagagaggggctgtgtaatactggctgcctctgtgctaagaaaaaaaaaaaatcactgtgtgtttgtttattttggtgcaggcccagtgttcttgcttagacttaatactacccttcatgttaaaataaaaccaaacaaaaaccca

SEQ ID NO: 143861 - DNA, 8506 bp, Homo sapiens
  Payload ID: 8427
  Gene Symbol: IL17RA
  Gene Name: interleukin 17 receptor A
  Uniprot ID: Q96F46
  ENST ID: ENST00000612619
  CDS Start-End: 134-2632
ctgggcccgggctggaagccggaagcgagcaaagtggagccgactcgaactccaccgcggaaaagaaagcctcagaacgttcgttcgctgcgtccccagccggggccgagccctccgcgacgccagccgggccatgggggccgcacgcagcccgccgtccgctgtcccggggcccctgctggggctgctcctgctgctcctgggcgtgctggccccgggtggcgcctccctgcgactcctggaccaccgggcgctggtctgctcccagccggggctaaactgcacggtcaagaatagtacctgcctggatgacagctggattcaccctcgaaacctgaccccctcctccccaaaggacctgcagatccagctgcactttgcccacacccaacaaggagacctgttccccgtggctcacatcgaatggacactgcagacagacgccagcatcctgtacctcgagggtgcagagttatctgtcctgcagctgaacaccaatgaacgtttgtgcgtcaggtttgagtttctgtccaaactgaggcatcaccacaggcggtggcgttttaccttcagccactttgtggttgaccctgaccaggaatatgaggtgaccgttcaccacctgcccaagcccatccctgatggggacccaaaccaccagtccaagaatttccttgtgcctgactgtgagcacgccaggatgaaggtaaccacgccatgcatgagctcaggcagcctgtgggaccccaacatcaccgtggagaccctggaggcccaccagctgcgtgtgagcttcaccctgtggaacgaatctacccattaccagatcctgctgaccagttttccgcacatggagaaccacagttgctttgagcacatgcaccacatacctgcgcccagaccagaagagttccaccagcgatccaacgtcacactcactctacgcaaccttaaagggtgctgtcgccaccaagtgcagatccagcccttcttcagcagctgcctcaatgactgcctcagacactccgcgactgtttcctgcccagaaatgccagacactccagaaccaattccggggcctggaagtgaaaaatacagtgatgacaccaaatacaccgatggcctgcctgcggctgacctgatccccccaccgctgaagcccaggaaggtctggatcatctactcagccgaccaccccctctacgtggacgtggtcctgaaattcgcccagttcctgctcaccgcctgcggcacggaagtggccctggacctgctggaagagcaggccatctcggaggcaggagtcatgacctgggtgggccgtcagaagcaggagatggtggagagcaactctaagatcatcgtcctgtgctcccgcggcacgcgcgccaagtggcaggcgctcctgggccggggggcgcctgtgcggctgcgctgcgaccacggaaagcccgtgggggacctgttcactgcagccatgaacatgatcctcccggacttcaagaggccagcctgcttcggcacctacgtagtctgctacttcagcgaggtcagctgtgacggcgacgtccccgacctgttcggcgcggcgccgcggtacccgctcatggacaggttcgaggaggtgtacttccgcatccaggacctggagatgttccagccgggccgcatgcaccgcgtaggggagctgtcgggggacaactacctgcggagcccgggcggcaggcagctccgcgccgccctggacaggttccgggactggcaggtccgctgtcccgactggttcgaatgtgagaacctctactcagcagatgaccaggatgccccgtccctggacgaagaggtgtttgaggagccactgctgcctccgggaaccggcatcgtgaagcgggcgcccctggtgcgcgagcctggctcccaggcctgcctggccatagacccgctggtcggggaggaaggaggagcagcagtggcaaagctggaacctcacctgcagccccggggtcagccagcgccgcagcccctccacaccctggtgctcgccgcagaggagggggccctggtggccgcggtggagcctgggcccctggctgacggtgccgcagtccggctggcactggcgggggagggcgaggcctgcccgctgctgggcagcccgggcgctgggcgaaatagcgtcctcttcctccccgtggaccccgaggactcgccccttggcagcagcacccccatggcgtctcctgacctccttccagaggacgtgagggagcacctcgaaggcttgatgctctcgctcttcgagcagagtctgagctgccaggcccaggggggctgcagtagacccgccatggtcctcacagacccacacacgccctacgaggaggagcagcggcagtcagtgcagtctgaccagggctacatctccaggagctccccgcagccccccgagggactcacggaaatggaggaagaggaggaagaggagcaggacccagggaagccggccctgccactctctcccgaggacctggagagcctgaggagcctccagcggcagctgcttttccgccagctgcagaagaactcgggctgggacacgatggggtcagagtcagaggggcccagtgcatgagggcggctccccagggaccgcccagatcccagctttgagagaggagtgtgtgtgcacgtattcatctgtgtgtacatgtctgcatgtgtatatgttcgtgtgtgaaatgtaggctttaaaatgtaaatgtctggattttaatcccaggcatccctcctaacttttctttgtgcagcggtctggttatcgtctatccccaggggaatccacacagcccgctcccaggagctaatggtagagcgtccttgaggctccattattcgttcattcagcatttattgtgcacctactatgtggcgggcatttgggataccaagataaattgcatgcggcatggccccagccatgaaggaacttaaccgctagtgccgaggacacgttaaacgaacaggatgggccgggcacggtggctcacgcctgtaatcccagcacactgggaggccgaggcaggtggatcactctgaggtcaggagtttgagccagcctggccaacatggtgaaaccccatctccactaaaaatagaaaaattagccgggcatggtgacacatgcctgtagtcctagctacttgggaggctgaggcaggagaattgcttgaatctgggaggcagaggttgcagtgagccgagattgtgccattgcactgcagcctggatgacagagcgagactctatctcaaaaaaaaaaaaaaaaaaagatggtcacgcgggatgtaaacgctgaatgggccaggtgcagtggctcatgcttgtaatcccagcactttgggaaggcgaggcaggtggattgcttgagctcaggagttcaagaccagcctgggcgacatagtgagacctcatctctacctaaatttttttttagtcagtcatggtggcacatgcctgtagtcccagctactcgggaggctgatgccagatgatcacttgagcccaggaggtagaggctgcagtgagctataatggtaccattgcaatccagcctgggcagcagagtgagaccctgtctcaaaaaaaataaaaaagtagaaagatggagtggaagcctgcccagggttgtgagcatgcacgggaaaggcacccaggtcaggggggatccccgaggagatgcctgagctgaaggattgtggttggggaaagcgtagtcccagcaaggaagcagtttgtgggtaagtgctgggaggtgagtggagtgagcttgtcagggagctgctggtggagcctggaggggaaggagggaggcagtgagagagatcggggtggggggtggggggatgtcgccagagctcaggggtggggacagccttgtgcgcatcagtcctgaggcctggggcacctttcgtctgatgagcctctgcatggagagaggctgagggctaaacacagctggatgtcacctgagttcatttataggaagagagaaatgtcgaggtgaaacgtaaaagcatctggcaggaaggtgagtctgaagccctgcacccgcgttccgactatcagtggggagctgttagcacgtaggattcttcagagcagctgggctggagctcccctgagctcaggaagccccagggtgcaagggcaaggaaatgaggggtggtgggtcagtgaagatctgggcagaccttgtgtggggaaggggtgctgctgtgacttcagggtctgaggtccaaagacagcatttgaaaagaggctctgaagccagtgtttgaagaatttgttcctgaagtacctcctgggggtaggctagaggcttctggcttcagggtcctgaagaacacattgaggtgccgtctgacactggaatagggtgcccttcattcctatgcctgagtccttaactatatttccaacctccagtgaggaggagaagattcggaaatgtgacaggagagcaaacaggacagtttgcatgtgtgtgtgcgcacacatacatgtgcgtgaaagattatcaataaaagtgcataaatttgttgatctggtaagagtttctagcaggaaggtcgagccacttactgtaggtcaagaagttgctagttgcggagttttttcttgcagttagactttacctagtggtagcagggccaccaaagctctgtgtcccagatggtgtatggcccataatccacccaacagcagcaaaggaccaggcaaaggagaacaggagcagaagcctcccagccactagccttttgggctcagtctctccaataatcctggagaggggcttcgttgggtctggacacctaccatgcattctgtgacctttccctagcttccaataaataactgtttgacgcccagagtacaggataccacaatgcactcttcctgcgtagagcacatgttcccatctgctcccattcctcaggaaccttgaattctagctctgctggcctttgagcccatgccagtaaatgtcctgatgggcattgcctactatctccagggcagctgcctttgtcctcctaacagctttattggagtacagttcacttaccatacaatccacaattgaccctgcacaatttgatgccggtttagtatagtcacagttcagcagccatcagcacagtcagtcttagagtttactacccccaaaagaaatccagccccccttagtcaccaccccaacctccccatccctaggcacccctaggctactttgatctctgtagacttgcctcttctggacatgacatagagaaaggagtcataaattctccaaggtgtctgtttcttctttaatgtcattccctgtttctcctcacattccctccccatttcctgggcccagtctcacactggtccttgcttaccctaaatgctattaattccatcactctgagtatggtgtttgctgtccgctgaatgccaagagcttcaagagtgtgtgtaaataaagccacacctttatttttgtattattctgaaccatggctaataaattgtttcaccaagaaatgtctctctaagaacaggtgccctccacgctgtgcccctcccacctcttcagctcgtctcctgagtgtgcagaggtggttccggttgggaaagaagcagcggagcatctaaccatgcctgtgtccaggccgattatgcacgcagccaccaacaagctcccaactcccgcgtagagtttcatgactttttcctgcctactatcttgatcctagttttttttttgttttttttttttttaaggaataattactttgattcaaaaccagtttctcttttctgcataggaaggtccttgaaggtgtttagggtctaaaaagggtggtgttcggtctctgaaacatccattcagcagtttgagctgggatctctgaatgcaagggtatgatggatatacttctttcttgcttttgttgtgttttggttttttgtttgtttttaagtcagggtctctctgtcaccaggctgtattacagtggtgcaatcatggctcactgcagcctcgacctcccaggctcaagccatctttccacctcagcctgccagtggctagaactacaggcgtgcaccactgtgcccggctaatttgtgtgtatatattttgtagaaatggggtttcaccatgttgtccaggctggtcacgaactcctgggctcaagccatctgcccgcctcatcctcccaaagtgctgggattataggcctgagcccaccgtgcctggcctttcctgtttatctttgaaaattaaatagggcataagagagaagaagatgtacttacaatgcagtgggtggttttaactctatagcctttgggctctgtggttggtgctccccttcctaaataaatgaggtgtatgcagggccctcttctgccttagcgccctgccagctgggactccagcaaggcccggggcacctgaggacagagtgagatggagggccgctgctccagcagccgggcctgcatcccacaagtcaactgtgtcggacagaggatccttacaaagaagaggcagcagggttgggggctggccagctgctcgtccgccctaggtagcttgctcatctgtaaagtgggtggggcaggagttcccacctcatggggtcctggcaagcctgcagtatccccgagtggcaccagcctgcttctggggcagagcagtttgtgccccctgaggtaccactgatcctctttccctgctattaggtattgctctcttcctccggtgtttgccttttcagattatagaagtaatatgtgttcccatatttggcgtctctcaggagctcaggaagtacttggctgagtgaacatgtccattgtggaaaaatggcaacaatatggattccatgggtatattttatagaagaatatgaagaaaagcagctacccctaaacccattgcacaagctgttcatgttaattctgtacccgacgctttccccacggggcctcccctcactctgaaatggcatccaggtccatcttgccctccacctctgcatggctctccatgccccatcgcctctcccagatcctagcactgggtccacactctcgccctgtccatttaggttgatgaaagcaggcagtcacccgggtgggccagtcttgcctgtgggaggaacatgcagtctcctgtctcatggtttgaagtgtgccaggaagcctggcccagcccacctccccctggagtccttcccaggaggaataaccccttaggtcattgactataagatgagttcgctcactggatccttcctctctgatgagacaggaagaaggtacacagtgaccaggtaggaggaggagagggagtagaaaggagggatgcgggtggctggtccctgcatttgcctgcttccctgcacgggtgtcccactggccgcctctgctcaccagtgtcatgggattctctcagaagatgaaaacagcccctgcttttttgctagaatggctgagctttcatggaaaggaagctggacccaagcaacagccgactaccgaaggttgcctggagcagtgcagatgtgggaggaagaagggccttggtgcacactggcttttcttcctgactgcaatgtggcattgtgccagctacctcctctttctcggcctcaggaaaatggagagaaagcagccctgaaggtggctgtgacgagggaaggggcagagggcctgacagtcaaccacgcgctatattttcctgttcttccttagggcaagaactgcatggccagactcaggcaaggcctaggtgtgggctgggcattgcctacacgtgaagagatcactccgcgtccctactgcacctgtcacaaagtgccttctgatatgcctggcaaaccaaaatcggtgagcgccagcttgcttccctagaagacatttctaaatattcataacatgcttgctcaaatcaatcaccttattttacatccgctccagggagaaatgaagacatggtcctacgttgttctgtaattattttctatgtaaattttgttccttgttacaattatatatgtcttaggggaaaggaccatttcacatgtgtcacctcatgtgattctcaccacagccctgtgattgctcctgttttataaataatgacatagttccagttgatggccaaagccacagctaacgagaggcagagagagctcaggctcccaggagcttccactctcagaccttgcctcccgggctgccctgagtgaaacgcctgcttagcatttggcacagccagaagcagcaagctagggtcacaacacagagaggggctgtgtaatactggctgcctctgtgctaagaaaaaaaaaaaatcactgtgtgtttgtttattttggtgcaggcccagtgttcttgcttagacttaatactacccttcatgttaaaataaaaccaaacaaaaacccat

SEQ ID NO: 143862 - DNA, 2010 bp, Homo sapiens
  Payload ID: 8428
  Gene Symbol: IL17RB
  Gene Name: interleukin 17 receptor B
  Uniprot ID: Q9NRM6
  ENST ID: ENST00000288167
  CDS Start-End: 10-1518
ggcccggcgatgtcgctcgtgctgctaagcctggccgcgctgtgcaggagcgccgtaccccgagagccgaccgttcaatgtggctctgaaactgggccatctccagagtggatgctacaacatgatctaatccccggagacttgagggacctccgagtagaacctgttacaactagtgttgcaacaggggactattcaattttgatgaatgtaagctgggtactccgggcagatgccagcatccgcttgttgaaggccaccaagatttgtgtgacgggcaaaagcaacttccagtcctacagctgtgtgaggtgcaattacacagaggccttccagactcagaccagaccctctggtggtaaatggacattttcctacatcggcttccctgtagagctgaacacagtctatttcattggggcccataatattcctaatgcaaatatgaatgaagatggcccttccatgtctgtgaatttcacctcaccaggctgcctagaccacataatgaaatataaaaaaaagtgtgtcaaggccggaagcctgtgggatccgaacatcactgcttgtaagaagaatgaggagacagtagaagtgaacttcacaaccactcccctgggaaacagatacatggctcttatccaacacagcactatcatcgggttttctcaggtgtttgagccacaccagaagaaacaaacgcgagcttcagtggtgattccagtgactggggatagtgaaggtgctacggtgcagctgactccatattttcctacttgtggcagcgactgcatccgacataaaggaacagttgtgctctgcccacaaacaggcgtccctttccctctggataacaacaaaagcaagccgggaggctggctgcctctcctcctgctgtctctgctggtggccacatgggtgctggtggcagggatctatctaatgtggaggcacgaaaggatcaagaagacttccttttctaccaccacactactgccccccattaaggttcttgtggtttacccatctgaaatatgtttccatcacacaatttgttacttcactgaatttcttcaaaaccattgcagaagtgaggtcatccttgaaaagtggcagaaaaagaaaatagcagagatgggtccagtgcagtggcttgccactcaaaagaaggcagcagacaaagtcgtcttccttctttccaatgacgtcaacagtgtgtgcgatggtacctgtggcaagagcgagggcagtcccagtgagaactctcaagacctcttcccccttgcctttaaccttttctgcagtgatctaagaagccagattcatctgcacaaatacgtggtggtctactttagagagattgatacaaaagacgattacaatgctctcagtgtctgccccaagtaccacctcatgaaggatgccactgctttctgtgcagaacttctccatgtcaagcagcaggtgtcagcaggaaaaagatcacaagcctgccacgatggctgctgctccttgtagcccacccatgagaagcaagagaccttaaaggcttcctatcccaccaattacagggaaaaaacgtgtgatgatcctgaagcttactatgcagcctacaaacagccttagtaattaaaacattttataccaataaaattttcaaatattgctaactaatgtagcattaactaacgattggaaactacatttacaacttcaaagctgttttatacatagaaatcaattacagttttaattgaaaactataaccattttgataatgcaacaataaagcatcttcagccaaacatctagtcttccatagaccatgcattgcagtgtacccagaactgtttagctaatattctatgtttaattaatgaatactaactctaagaacccctcactgattcactcaatagcatcttaagtgaaaaaccttctattacatgcaaaaaatcattgtttttaagataacaaaagtagggaataaacaagctgaacccactttta

SEQ ID NO: 143863 - DNA, 1048 bp, Homo sapiens
  Payload ID: 8428
  Gene Symbol: IL17RB
  Gene Name: interleukin 17 receptor B
  ENST ID: ENST00000494338
  CDS Start-End: 5-1048
ggcgatgtcgctcgtgctgctaagcctggccgcgctgtgcaggagcgccgtaccccgagagccgaccgttcaatgtggctctgaaactgggccatctccagagtggatgctacaacatgatctaatccccggagacttgagggacctccgagtagaacctgttacaactagtgttgcaacaggggactattcaattttgatgaatgtaagctgggtactccgggcagatgccagcatccgcttgttgaaggccaccaagatttgtgtgacgggcaaaagcaacttccagtcctacagctgtgtgaggtgcaattacacagaggccttccagactcagaccagaccctctggtggtaaatggacattttcctacatcggcttccctgtagagctgaacacagtctatttcattggggcccataatattcctaatgcaaatatgaatgaagatggcccttccatgtctgtgaatttcacctcaccaggaagcctgtgggatccgaacatcactgcttgtaagaagaatgaggagacagtagaagtgaacttcacaaccactcccctgggaaacagatacatggctcttatccaacacagcactatcatcgggttttctcaggtgtttgagccacaccagaagaaacaaacgcgagcttcagtggtgattccagtgactggggatagtgaaggtgctacggtgcagctgactccatattttcctacttgtggcagcgactgcatccgacataaaggaacagttgtgctctgcccacaaacaggcgtccctttccctctggataacaacaaaagcaagccgggaggctggctgcctctcctcctgctgtctctgctggtggccacatgggtgctggtggcagggatctatctaatgtggaggcacgaaaggatcaagaagacttccttttctaccaccacactactgccccccattaaggttcttgtggtttacccatctgaaatatgtttccatcacacaatttgttacttcactgaatttcttcaaaaccattgcagaagtgaggtcatc

SEQ ID NO: 143864 - DNA, 2621 bp, Homo sapiens
  Payload ID: 8429
  Gene Symbol: IL17RC
  Gene Name: interleukin 17 receptor C
  Uniprot ID: Q8NAC3
  ENST ID: ENST00000295981
  CDS Start-End: 219-2594
aaaacgaaagcactccgtgctggaagtaggaggagagtcaggactcccaggacagagagtgcacaaactacccagcacagccccctccgccccctctggaggctgaagagggattccagcccctgccacccacagacacgggctgactggggtgtctgccccccttgggggggggcagcacagggcctcaggcctgggtgccacctggcacctagaagatgcctgtgccctggttcttgctgtccttggcactgggccgaagcccagtggtcctttctctggagaggcttgtggggcctcaggacgctacccactgctctccggtgagtctggaaccctggggagacgaggaaaggctcagggttcagtttttggctcagcaaagccttagcctggctcctgtcactgctgccactgccagaactgccctgtctggtctgtctggtgctgatggtagaagagaagaacggggaaggggcaagagctgggtctgtctttctctgggagggtctgggaatacggagccccagaaaaagggcctctcctgccgcctctgggacagtgacatactctgcctgcctggggacatcgtgcctgctccgggccccgtgctggcgcctacgcacctgcagacagagctggtgctgaggtgccagaaggagaccgactgtgacctctgtctgcgtgtggctgtccacttggccgtgcatgggcactgggaagagcctgaagatgaggaaaagtttggaggagcagctgactcaggggtggaggagcctaggaatgcctctctccaggcccaagtcgtgctctccttccaggcctaccctactgcccgctgcgtcctgctggaggtgcaagtgcctgctgcccttgtgcagtttggtcagtctgtgggctctgtggtatatgactgcttcgaggctgccctagggagtgaggtacgaatctggtcctatactcagcccaggtacgagaaggaactcaaccacacacagcagctgcctgactgcagggggctcgaagtctggaacagcatcccgagctgctgggccctgccctggctcaacgtgtcagcagatggtgacaacgtgcatctggttctgaatgtctctgaggagcagcacttcggcctctccctgtactggaatcaggtccagggccccccaaaaccccggtggcacaaaaacctgactggaccgcagatcattaccttgaaccacacagacctggttccctgcctctgtattcaggtgtggcctctggaacctgactccgttaggacgaacatctgccccttcagggaggacccccgcgcacaccagaacctctggcaagccgcccgactgcaactgctgaccctgcagagctggctgctggacgcaccgtgctcgctgcccgcagaagcggcactgtgctggcgggctccgggtggggacccctgccagccactggtcccaccgctttcctgggagaacgtcactgtggacaaggttctcgagttcccattgctgaaaggccaccctaacctctgtgttcaggtgaacagctcggagaagctgcagctgcaggagtgcttgtgggctgactccctggggcctctcaaagacgatgtgctactgttggagacacgaggcccccaggacaacagatccctctgtgccttggaacccagtggctgtacttcactacccagcaaagcctccacgagggcagctcgccttggagagtacttactacaagacctgcagtcaggccagtgtctgcagctatgggacgatgacttgggagcgctatgggcctgccccatggacaaatacatccacaagcgctgggccctcgtgtggctggcctgcctactctttgccgctgcgctttccctcatcctccttctcaaaaaggatcacgcgaaagggtggctgaggctcttgaaacaggacgtccgctcgggggcggccgccaggggccgcgcggctctgctcctctactcagccgatgactcgggtttcgagcgcctggtgggcgccctggcgtcggccctgtgccagctgccgctgcgcgtggccgtagacctgtggagccgtcgtgaactgagcgcgcaggggcccgtggcttggtttcacgcgcagcggcgccagaccctgcaggagggcggcgtggtggtcttgctcttctctcccggtgcggtggcgctgtgcagcgagtggctacaggatggggtgtccgggcccggggcgcacggcccgcacgacgccttccgcgcctcgctcagctgcgtgctgcccgacttcttgcagggccgggcgcccggcagctacgtgggggcctgcttcgacaggctgctccacccggacgccgtacccgcccttttccgcaccgtgcccgtcttcacactgccctcccaactgccagacttcctgggggccctgcagcagcctcgcgccccgcgttccgggcggctccaagagagagcggagcaagtgtcccgggcccttcagccagccctggatagctacttccatcccccggggactcccgcgccgggacgcggggtgggaccaggcgcgggacctggggcgggggacgggacttaaataaaggcagacgctgtttttctaccc

SEQ ID NO: 143865 - DNA, 2384 bp, Homo sapiens
  Payload ID: 8429
  Gene Symbol: IL17RC
  Gene Name: interleukin 17 receptor C
  Uniprot ID: Q8NAC3
  ENST ID: ENST00000383812
  CDS Start-End: 243-2360
acagccagcagcctgccgggagccaaaacgaaagcactccgtgctggaagtaggaggagagtcaggactcccaggacagagagtgcacaaactacccagcacagccccctccgccccctctggaggctgaagagggattccagcccctgccacccacagacacgggctgactggggtgtctgccccccttgggggggggcagcacagggcctcaggcctgggtgccacctggcacctagaagatgcctgtgccctggttcttgctgtccttggcactgggccgaagcccagtggtcctttctctggagaggcttgtggggcctcaggacgctacccactgctctccgggcctctcctgccgcctctgggacagtgacatactctgcctgcctggggacatcgtgcctgctccgggccccgtgctggcgcctacgcacctgcagacagagctggtgctgaggtgccagaaggagaccgactgtgacctctgtctgcgtgtggctgtccacttggccgtgcatgggcactgggaagagcctgaagatgaggaaaagtttggaggagcagctgactcaggggtggaggagcctaggaatgcctctctccaggcccaagtcgtgctctccttccaggcctaccctactgcccgctgcgtcctgctggaggtgcaagtgcctgctgcccttgtgcagtttggtcagtctgtgggctctgtggtatatgactgcttcgaggctgccctagggagtgaggtacgaatctggtcctatactcagcccaggtacgagaaggaactcaaccacacacagcagctgcctgccctgccctggctcaacgtgtcagcagatggtgacaacgtgcatctggttctgaatgtctctgaggagcagcacttcggcctctccctgtactggaatcaggtccagggccccccaaaaccccggtggcacaaaaacctgactggaccgcagatcattaccttgaaccacacagacctggttccctgcctctgtattcaggtgtggcctctggaacctgactccgttaggacgaacatctgccccttcagggaggacccccgcgcacaccagaacctctggcaagccgcccgactgcaactgctgaccctgcagagctggctgctggacgcaccgtgctcgctgcccgcagaagcggcactgtgctggcgggctccgggtggggacccctgccagccactggtcccaccgctttcctgggagaacgtcactgtggacaaggttctcgagttcccattgctgaaaggccaccctaacctctgtgttcaggtgaacagctcggagaagctgcagctgcaggagtgcttgtgggctgactccctggggcctctcaaagacgatgtgctactgttggagacacgaggcccccaggacaacagatccctctgtgccttggaacccagtggctgtacttcactacccagcaaagcctccacgagggcagctcgccttggagagtacttactacaagacctgcagtcaggccagtgtctgcagctatgggacgatgacttgggagcgctatgggcctgccccatggacaaatacatccacaagcgctgggccctcgtgtggctggcctgcctactctttgccgctgcgctttccctcatcctccttctcaaaaaggatcacgcgaaagggtggctgaggctcttgaaacaggacgtccgctcgggggcggccgccaggggccgcgcggctctgctcctctactcagccgatgactcgggtttcgagcgcctggtgggcgccctggcgtcggccctgtgccagctgccgctgcgcgtggccgtagacctgtggagccgtcgtgaactgagcgcgcaggggcccgtggcttggtttcacgcgcagcggcgccagaccctgcaggagggcggcgtggtggtcttgctcttctctcccggtgcggtggcgctgtgcagcgagtggctacaggatggggtgtccgggcccggggcgcacggcccgcacgacgccttccgcgcctcgctcagctgcgtgctgcccgacttcttgcagggccgggcgcccggcagctacgtgggggcctgcttcgacaggctgctccacccggacgccgtacccgcccttttccgcaccgtgcccgtcttcacactgccctcccaactgccagacttcctgggggccctgcagcagcctcgcgccccgcgttccgggcggctccaagagagagcggagcaagtgtcccgggcccttcagccagccctggatagctacttccatcccccggggactcccgcgccgggacgcggggtgggaccaggcgcgggacctggggcgggggacgggacttaaataaaggcagacgctgtttttcta

SEQ ID NO: 143866 - DNA, 2388 bp, Homo sapiens
  Payload ID: 8429
  Gene Symbol: IL17RC
  Gene Name: interleukin 17 receptor C
  Uniprot ID: Q8NAC3
  ENST ID: ENST00000403601
  CDS Start-End: 198-2360
ggaagtaggaggagagtcaggactcccaggacagagagtgcacaaactacccagcacagccccctccgccccctctggaggctgaagagggattccagcccctgccacccacagacacgggctgactggggtgtctgccccccttgggggggggcagcacagggcctcaggcctgggtgccacctggcacctagaagatgcctgtgccctggttcttgctgtccttggcactgggccgaagcccagtggtcctttctctggagaggcttgtggggcctcaggacgctacccactgctctccgggcctctcctgccgcctctgggacagtgacatactctgcctgcctggggacatcgtgcctgctccgggccccgtgctggcgcctacgcacctgcagacagagctggtgctgaggtgccagaaggagaccgactgtgacctctgtctgcgtgtggctgtccacttggccgtgcatgggcactgggaagagcctgaagatgaggaaaagtttggaggagcagctgactcaggggtggaggagcctaggaatgcctctctccaggcccaagtcgtgctctccttccaggcctaccctactgcccgctgcgtcctgctggaggtgcaagtgcctgctgcccttgtgcagtttggtcagtctgtgggctctgtggtatatgactgcttcgaggctgccctagggagtgaggtacgaatctggtcctatactcagcccaggtacgagaaggaactcaaccacacacagcagctgcctgactgcagggggctcgaagtctggaacagcatcccgagctgctgggccctgccctggctcaacgtgtcagcagatggtgacaacgtgcatctggttctgaatgtctctgaggagcagcacttcggcctctccctgtactggaatcaggtccagggccccccaaaaccccggtggcacaaaaacctgactggaccgcagatcattaccttgaaccacacagacctggttccctgcctctgtattcaggtgtggcctctggaacctgactccgttaggacgaacatctgccccttcagggaggacccccgcgcacaccagaacctctggcaagccgcccgactgcaactgctgaccctgcagagctggctgctggacgcaccgtgctcgctgcccgcagaagcggcactgtgctggcgggctccgggtggggacccctgccagccactggtcccaccgctttcctgggagaacgtcactgtggacaaggttctcgagttcccattgctgaaaggccaccctaacctctgtgttcaggtgaacagctcggagaagctgcagctgcaggagtgcttgtgggctgactccctggggcctctcaaagacgatgtgctactgttggagacacgaggcccccaggacaacagatccctctgtgccttggaacccagtggctgtacttcactacccagcaaagcctccacgagggcagctcgccttggagagtacttactacaagacctgcagtcaggccagtgtctgcagctatgggacgatgacttgggagcgctatgggcctgccccatggacaaatacatccacaagcgctgggccctcgtgtggctggcctgcctactctttgccgctgcgctttccctcatcctccttctcaaaaaggatcacgcgaaagggtggctgaggctcttgaaacaggacgtccgctcgggggcggccgccaggggccgcgcggctctgctcctctactcagccgatgactcgggtttcgagcgcctggtgggcgccctggcgtcggccctgtgccagctgccgctgcgcgtggccgtagacctgtggagccgtcgtgaactgagcgcgcaggggcccgtggcttggtttcacgcgcagcggcgccagaccctgcaggagggcggcgtggtggtcttgctcttctctcccggtgcggtggcgctgtgcagcgagtggctacaggatggggtgtccgggcccggggcgcacggcccgcacgacgccttccgcgcctcgctcagctgcgtgctgcccgacttcttgcagggccgggcgcccggcagctacgtgggggcctgcttcgacaggctgctccacccggacgccgtacccgcccttttccgcaccgtgcccgtcttcacactgccctcccaactgccagacttcctgggggccctgcagcagcctcgcgccccgcgttccgggcggctccaagagagagcggagcaagtgtcccgggcccttcagccagccctggatagctacttccatcccccggggactcccgcgccgggacgcggggtgggaccaggcgcgggacctggggcgggggacgggacttaaataaaggcagacgctgtttttctaccca

SEQ ID NO: 143867 - DNA, 1053 bp, Homo sapiens
  Payload ID: 8429
  Gene Symbol: IL17RC
  Gene Name: interleukin 17 receptor C
  ENST ID: ENST00000451165
  CDS Start-End: 219-494
aaaacgaaagcactccgtgctggaagtaggaggagagtcaggactcccaggacagagagtgcacaaactacccagcacagccccctccgccccctctggaggctgaagagggattccagcccctgccacccacagacacgggctgactggggtgtctgccccccttgggggggggcagcacagggcctcaggcctgggtgccacctggcacctagaagatgcctgtgccctggttcttgctgtccttggcactgggccgaagcccagtggtcctttctctggagaggcttgtggggcctcaggacgctacccactgctctccgggcctctcctgccgcctctggggtgccaccaaattctgggcttggaacagcttcagctcccacccgctcctccacacacagacagtgacatactctgcctgcctggggacatcgtgcctgctccgggccccgtgctggcgcctacgcacctgcagacagagctggtgctgaggtgccagaaggagaccgactgtgacctctgtctgcgtgtggctgtccacttggccgtgcatgggcactgggaagagcctgaagatgaggaaaagtttggaggagcagctgactcaggggtggaggagcctaggaatgcctctctccaggcccaagtcgtgctctccttccaggcctaccctactgcccgctgcgtcctgctggaggtgcaagtgcctgctgcccttgtgcagtttggtcagtctgtgggctctgtggtatatgactgcttcgaggctgccctagggagtgaggtacgaatctggtcctatactcagcccaggtacgagaaggaactcaaccacacacagcagctgcctgccctgccctggctcaacgtgtcagcagatggtgacaacgtgcatctggttctgaatgtctctgaggagcagcacttcggcctctccctgtactggaatcaggtccagggccccccaaaaccccggtggcacaaaaacctgactggaccgcagatcattaccttgaaccacacagacctggttccctgcctctgtattca

SEQ ID NO: 143868 - DNA, 949 bp, Homo sapiens
  Payload ID: 8429
  Gene Symbol: IL17RC
  Gene Name: interleukin 17 receptor C
  ENST ID: ENST00000424206
  CDS Start-End: 183-653
gtcaggactcccaggacagagagtgcacaaactacccagcacagccccctccgccccctctggaggctgaagagggattccagcccctgccacccacagacacgggctgactggggtgtctgccccccttgggggggggcagcacagggcctcaggcctgggtgccacctggcacctagaagatgcctgtgccctggttcttgctgtccttggcactgggccgaagcccagtggtcctttctctggagaggcttgtggggcctcaggacgctacccactgctctccgggcctctcctgccgcctctgggacagtgacatactctgcctgcctggggacatcgtgcctgctccgggccccgtgctggcgcctacgcacctgcagacagagctggtgctgaggtgccagaaggagaccgactgtgacctctgtctgcgtgtggctgtccacttggccgtgcatgggcactgggaagagcctgaagatgaggaaaagtttggaggagcagctgactcaggggtggaggagcctaggaatgcctctctccaggcccaagtcgtgctctccttccaggcctaccctactgcccgctgcgtcctgctggaggtgcaagtgcctgctgcccttgtgcagtttgggctctgtggtatatgactgcttcgaggctgccctagggagtgaggtacgaatctggtcctatactcagcccaggtacgagaaggaactcaaccacacacagcagctgcctgccctgccctggctcaacgtgtcagcagatggtgacaacgtgcatctggttctgaatgtctctgaggagcagcacttcggcctctccctgtactggaatcaggtccagggccccccaaaaccccggtggcacaaaaacctgactggaccgcagatcattaccttgaaccacacagacctggttccctgcctctgtattcagg

SEQ ID NO: 143869 - DNA, 946 bp, Homo sapiens
  Payload ID: 8429
  Gene Symbol: IL17RC
  Gene Name: interleukin 17 receptor C
  ENST ID: ENST00000434756
  CDS Start-End: 219-515
aaaacgaaagcactccgtgctggaagtaggaggagagtcaggactcccaggacagagagtgcacaaactacccagcacagccccctccgccccctctggaggctgaagagggattccagcccctgccacccacagacacgggctgactggggtgtctgccccccttgggggggggcagcacagggcctcaggcctgggtgccacctggcacctagaagatgcctgtgccctggttcttgctgtccttggcactgggccgaagcccagtggtcctttctctggagaggcttgtggggcctcaggacgctacccactgctctccgggcctctcctgccgcctctgggacagtgacatactctgcctgcctggggacatcgtgcctgctccgggccccgtgctggcgcctacgcacctgcagacagagctggtgctgaggtgccagaaggagaccgactgtgacctctgtctgcgtgtggctgtccacttggccgtgcatgggctctgtggtatatgactgcttcgaggctgccctagggagtgaggtacgaatctggtcctatactcagcccaggtacgagaaggaactcaaccacacacagcagctgcctgccctgccctggctcaacgtgtcagcagatggtgacaacgtgcatctggttctgaatgtctctgaggagcagcacttcggcctctccctgtactggaatcaggtccagggccccccaaaaccccggtggcacaaaaacctgactggaccgcagatcattaccttgaaccacacagacctggttccctgcctctgtattcaggtgtggcctctggaacctgactccgttaggacgaacatctgccccttcagggaggacccccgcgcacaccagaacctctggcaagccgcccgactgcaactgctgaccctgcagagctggctgctggacgcaccgt

SEQ ID NO: 143870 - DNA, 2342 bp, Homo sapiens
  Payload ID: 8429
  Gene Symbol: IL17RC
  Gene Name: interleukin 17 receptor C
  ENST ID: ENST00000416074
  CDS Start-End: 243-2315
acagccagcagcctgccgggagccaaaacgaaagcactccgtgctggaagtaggaggagagtcaggactcccaggacagagagtgcacaaactacccagcacagccccctccgccccctctggaggctgaagagggattccagcccctgccacccacagacacgggctgactggggtgtctgccccccttgggggggggcagcacagggcctcaggcctgggtgccacctggcacctagaagatgcctgtgccctggttcttgctgtccttggcactgggccgaagcccagtggtcctttctctggagaggcttgtggggcctcaggacgctacccactgctctccgggcctctcctgccgcctctgggacagtgacatactctgcctgcctggggacatcgtgcctgctccgggccccgtgctggcgcctacgcacctgcagacagagctggtgctgaggtgccagaaggagaccgactgtgacctctgtctgcgtgtggctgtccacttggccgtgcatgggcactgggaagagcctgaagatgaggaaaagtttggaggagcagctgactcaggggtggaggagcctaggaatgcctctctccaggcccaagtcgtgctctccttccaggcctaccctactgcccgctgcgtcctgctggaggtgcaagtgcctgctgcccttgtgcagtttggtcagtctgtgggctctgtggtatatgactgcttcgaggctgccctagggagtgaggtacgaatctggtcctatactcagcccaggtacgagaaggaactcaaccacacacagcagctgcctgactgcagggggctcgaagtctggaacagcatcccgagctgctgggccctgccctggctcaacgtgtcagcagatggtgacaacgtgcatctggttctgaatgtctctgaggagcagcacttcggcctctccctgtactggaatcaggtccagggccccccaaaaccccggtggcacaaaaacctgactggaccgcagatcattaccttgaaccacacagacctggttccctgcctctgtattcaggtgtggcctctggaacctgactccgttaggacgaacatctgccccttcagggaggacccccgcgcacaccagaacctctggcaagccgcccgactgcaactgctgaccctgcagagctggctgctggacgcaccgtgctcgctgcccgcagaagcggcactgtgctggcgggctccgggtggggacccctgccagccactggtcccaccgctttcctgggagaacgtcactgtggacgtgaacagctcggagaagctgcagctgcaggagtgcttgtgggctgactccctggggcctctcaaagacgatgtgctactgttggagacacgaggcccccaggacaacagatccctctgtgccttggaacccagtggctgtacttcactacccagcaaagcctccacgagggcagctcgccttggagagtacttactacaagacctgcagtcaggccagtgtctgcagctatgggacgatgacttgggagcgctatgggcctgccccatggacaaatacatccacaagcgctgggccctcgtgtggctggcctgcctactctttgccgctgcgctttccctcatcctccttctcaaaaaggatcacgcgaaagcggccgccaggggccgcgcggctctgctcctctactcagccgatgactcgggtttcgagcgcctggtgggcgccctggcgtcggccctgtgccagctgccgctgcgcgtggccgtagacctgtggagccgtcgtgaactgagcgcgcaggggcccgtggcttggtttcacgcgcagcggcgccagaccctgcaggagggcggcgtggtggtcttgctcttctctcccggtgcggtggcgctgtgcagcgagtggctacaggatggggtgtccgggcccggggcgcacggcccgcacgacgccttccgcgcctcgctcagctgcgtgctgcccgacttcttgcagggccgggcgcccggcagctacgtgggggcctgcttcgacaggctgctccacccggacgccgtacccgcccttttccgcaccgtgcccgtcttcacactgccctcccaactgccagacttcctgggggccctgcagcagcctcgcgccccgcgttccgggcggctccaagagagagcggagcaagtgtcccgggcccttcagccagccctggatagctacttccatcccccggggactcccgcgccgggacgcggggtgggaccaggcgcgggacctggggcgggggacgggacttaaataaaggcagacgctgtttttctaccc

SEQ ID NO: 143871 - DNA, 2147 bp, Homo sapiens
  Payload ID: 8429
  Gene Symbol: IL17RC
  Gene Name: interleukin 17 receptor C
  Uniprot ID: Q8NAC3
  ENST ID: ENST00000413608
  CDS Start-End: 1-2124
atgcctgtgccctggttcttgctgtccttggcactgggccgaagcccagtggtcctttctctggagaggcttgtggggcctcaggacgctacccactgctctccgggcctctcctgccgcctctgggacagtgacatactctgcctgcctggggacatcgtgcctgctccgggccccgtgctggcgcctacgcacctgcagacagagctggtgctgaggtgccagaaggagaccgactgtgacctctgtctgcgtgtggctgtccacttggccgtgcatgggcactgggaagagcctgaagatgaggaaaagtttggaggagcagctgactcaggggtggaggagcctaggaatgcctctctccaggcccaagtcgtgctctccttccaggcctaccctactgcccgctgcgtcctgctggaggtgcaagtgcctgctgcccttgtgcagtttggtcagtctgtgggctctgtggtatatgactgcttcgaggctgccctagggagtgaggtacgaatctggtcctatactcagcccaggtacgagaaggaactcaaccacacacagcagctgcctgactgcagggggctcgaagtctggaacagcatcccgagctgctgggccctgccctggctcaacgtgtcagcagatggtgacaacgtgcatctggttctgaatgtctctgaggagcagcacttcggcctctccctgtactggaatcaggtccagggccccccaaaaccccggtggcacaaaaacctgactggaccgcagatcattaccttgaaccacacagacctggttccctgcctctgtattcaggtgtggcctctggaacctgactccgttaggacgaacatctgccccttcagggaggacccccgcgcacaccagaacctctggcaagccgcccgactgcaactgctgaccctgcagagctggctgctggacgcaccgtgctcgctgcccgcagaagcggcactgtgctggcgggctccgggtggggacccctgccagccactggtcccaccgctttcctgggagaacgtcactgtggacaaggttctcgagttcccattgctgaaaggccaccctaacctctgtgttcaggtgaacagctcggagaagctgcagctgcaggagtgcttgtgggctgactccctggggcctctcaaagacgatgtgctactgttggagacacgaggcccccaggacaacagatccctctgtgccttggaacccagtggctgtacttcactacccagcaaagcctccacgagggcagctcgccttggagagtacttactacaagacctgcagtcaggccagtgtctgcagctatgggacgatgacttgggagcgctatgggcctgccccatggacaaatacatccacaagcgctgggccctcgtgtggctggcctgcctactctttgccgctgcgctttccctcatcctccttctcaaaaaggatcacgcgaaagcggccgccaggggccgcgcggctctgctcctctactcagccgatgactcgggtttcgagcgcctggtgggcgccctggcgtcggccctgtgccagctgccgctgcgcgtggccgtagacctgtggagccgtcgtgaactgagcgcgcaggggcccgtggcttggtttcacgcgcagcggcgccagaccctgcaggagggcggcgtggtggtcttgctcttctctcccggtgcggtggcgctgtgcagcgagtggctacaggatggggtgtccgggcccggggcgcacggcccgcacgacgccttccgcgcctcgctcagctgcgtgctgcccgacttcttgcagggccgggcgcccggcagctacgtgggggcctgcttcgacaggctgctccacccggacgccgtacccgcccttttccgcaccgtgcccgtcttcacactgccctcccaactgccagacttcctgggggccctgcagcagcctcgcgccccgcgttccgggcggctccaagagagagcggagcaagtgtcccgggcccttcagccagccctggatagctacttccatcccccggggactcccgcgccgggacgcggggtgggaccaggcgcgggacctggggcgggggacgggacttaaataaaggcagacgctgtttttct

SEQ ID NO: 143872 - DNA, 1354 bp, Homo sapiens
  Payload ID: 8429
  Gene Symbol: IL17RC
  Gene Name: interleukin 17 receptor C
  ENST ID: ENST00000412901
  CDS Start-End: 219-947
aaaacgaaagcactccgtgctggaagtaggaggagagtcaggactcccaggacagagagtgcacaaactacccagcacagccccctccgccccctctggaggctgaagagggattccagcccctgccacccacagacacgggctgactggggtgtctgccccccttgggggggggcagcacagggcctcaggcctgggtgccacctggcacctagaagatgcctgtgccctggttcttgctgtccttggcactgggccgaagcccagtggtcctttctctggagaggcttgtggggcctcaggacgctacccactgctctccgggcctctcctgccgcctctgggacagtgacatactctgcctgcctggggacatcgtgcctgctccgggccccgtgctggcgcctacgcacctgcagacagagctggtgctgaggtgccagaaggagaccgactgtgacctctgtctgcgtgtggctgtccacttggccgtgcatgcctctctccaggcccaagtcgtgctctccttccaggcctaccctactgcccgctgcgtcctgctggaggtgcaagtgcctgctgcccttgtgcagtttggtcagtctgtgggctctgtggtatatgactgcttcgaggctgccctagggagtgaggtacgaatctggtcctatactcagcccaggtacgagaaggaactcaaccacacacagcagctgcctgccctgccctggctcaacgtgtcagcagatggtgacaacgtgcatctggttctgaatgtctctgaggagcagcacttcggcctctccctgtactggaatcaggtccagggccccccaaaaccccggtggcacaaaaacctggtgaggcctcccccttcccaagtccattcccactgtaggccgatgcctgtgcaaaggacgcagtgccatatcagagaggatccttgaagaggactcaccccaagcaagggaaaattgactggaccgcagatcattaccttgaaccacacagacctggttccctgcctctgtattcaggtgtggcctctggaacctgactccgttaggacgaacatctgccccttcagggaggacccccgcgcacaccagaacctctggcaagccgcccgactgcaactgctgaccctgcagagctggctgctggacgcaccgtgctcgctgcccgcagaagcggcactgtgctggcgggctccgggtggggacccctgccagccactggtcccaccgctttcctgggagaacgtcactgtggacaaggttctcgagttcccattgctgaaaggccaccctaacctctgtgttcaggtgaacagctcggagaagctgcagctgca

SEQ ID NO: 143873 - DNA, 1445 bp, Homo sapiens
  Payload ID: 8429
  Gene Symbol: IL17RC
  Gene Name: interleukin 17 receptor C
  ENST ID: ENST00000436503
  CDS Start-End: 198-1445
ggaagtaggaggagagtcaggactcccaggacagagagtgcacaaactacccagcacagccccctccgccccctctggaggctgaagagggattccagcccctgccacccacagacacgggctgactggggtgtctgccccccttgggggggggcagcacagggcctcaggcctgggtgccacctggcacctagaagatgcctgtgccctggttcttgctgtccttggcactgggccgaagcccagtggtcctttctctggagaggcttgtggggcctcaggacgctacccactgctctccgggcctctcctgccgcctctgggacagtgacatactctgcctgcctggggacatcgtgcctgctccgggccccgtgctggcgcctacgcacctgcagacagagctggtgctgaggtgccagaaggagaccgactgtgacctctgtctgcgtgtggctgtccacttggccgtgcatgcctctctccaggcccaagtcgtgctctccttccaggcctaccctactgcccgctgcgtcctgctggaggtgcaagtgcctgctgcccttgtgcagtttggtcagtctgtgggctctgtggtatatgactgcttcgaggctgccctagggagtgaggtacgaatctggtcctatactcagcccaggtacgagaaggaactcaaccacacacagcagctgcctgactgcagggggctcgaagtctggaacagcatcccgagctgctgggccctgccctggctcaacgtgtcagcagatggtgacaacgtgcatctggttctgaatgtctctgaggagcagcacttcggcctctccctgtactggaatcaggtccagggccccccaaaaccccggtggcacaaaaacctgactggaccgcagatcattaccttgaaccacacagacctggttccctgcctctgtattcaggtgtggcctctggaacctgactccgttaggacgaacatctgccccttcagggaggacccccgcgcacaccagaacctctggcaagccgcccgactgcaactgctgaccctgcagagctggctgctggacgcaccgtgctcgctgcccgcagaagcggcactgtgctggcgggctccgggtggggacccctgccagccactggtcccaccgctttcctgggagaacgtcactgtggacaaggttctcgagttcccattgctgaaaggccaccctaacctctgtgttcaggtgaacagctcggagaagctgcagctgcaggagtgcttgtgggctgactccctggggcctctcaaagacgatgtgctactgttggagacacgaggcccccaggacaacagatccctctgtgccttggaacccagtggctgtacttcactacccagcaaagcctccacgagggcagctcgccttggagagtacttactacaagacctgcagtca

SEQ ID NO: 143874 - DNA, 2244 bp, Homo sapiens
  Payload ID: 8429
  Gene Symbol: IL17RC
  Gene Name: interleukin 17 receptor C
  Uniprot ID: Q8NAC3
  ENST ID: ENST00000455057
  CDS Start-End: 154-2220
aactacccagcacagccccctccgccccctctggaggctgaagagggattccagcccctgccacccacagacacgggctgactggggtgtctgccccccttgggggggggcagcacagggcctcaggcctgggtgccacctggcacctagaagatgcctgtgccctggttcttgctgtccttggcactgggccgaagcccagtggtcctttctctggagaggcttgtggggcctcaggacgctacccactgctctccgggcctctcctgccgcctctgggacagtgacatactctgcctgcctggggacatcgtgcctgctccgggccccgtgctggcgcctacgcacctgcagacagagctggtgctgaggtgccagaaggagaccgactgtgacctctgtctgcgtgtggctgtccacttggccgtgcatgggcactgggaagagcctgaagatgaggaaaagtttggaggagcagctgactcaggggtggaggagcctaggaatgcctctctccaggcccaagtcgtgctctccttccaggcctaccctactgcccgctgcgtcctgctggaggtgcaagtgcctgctgcccttgtgcagtttggtcagtctgtgggctctgtggtatatgactgcttcgaggctgccctagggagtgaggtacgaatctggtcctatactcagcccaggtacgagaaggaactcaaccacacacagcagctgcctgccctgccctggctcaacgtgtcagcagatggtgacaacgtgcatctggttctgaatgtctctgaggagcagcacttcggcctctccctgtactggaatcaggtccagggccccccaaaaccccggtggcacaaaaacctgactggaccgcagatcattaccttgaaccacacagacctggttccctgcctctgtattcaggtgtggcctctggaacctgactccgttaggacgaacatctgccccttcagggaggacccccgcgcacaccagaacctctggcaagccgcccgactgcaactgctgaccctgcagagctggctgctggacgcaccgtgctcgctgcccgcagaagcggcactgtgctggcgggctccgggtggggacccctgccagccactggtcccaccgctttcctgggagaacgtcactgtggacgtgaacagctcggagaagctgcagctgcaggagtgcttgtgggctgactccctggggcctctcaaagacgatgtgctactgttggagacacgaggcccccaggacaacagatccctctgtgccttggaacccagtggctgtacttcactacccagcaaagcctccacgagggcagctcgccttggagagtacttactacaagacctgcagtcaggccagtgtctgcagctatgggacgatgacttgggagcgctatgggcctgccccatggacaaatacatccacaagcgctgggccctcgtgtggctggcctgcctactctttgccgctgcgctttccctcatcctccttctcaaaaaggatcacgcgaaagggtggctgaggctcttgaaacaggacgtccgctcgggggcggccgccaggggccgcgcggctctgctcctctactcagccgatgactcgggtttcgagcgcctggtgggcgccctggcgtcggccctgtgccagctgccgctgcgcgtggccgtagacctgtggagccgtcgtgaactgagcgcgcaggggcccgtggcttggtttcacgcgcagcggcgccagaccctgcaggagggcggcgtggtggtcttgctcttctctcccggtgcggtggcgctgtgcagcgagtggctacaggatggggtgtccgggcccggggcgcacggcccgcacgacgccttccgcgcctcgctcagctgcgtgctgcccgacttcttgcagggccgggcgcccggcagctacgtgggggcctgcttcgacaggctgctccacccggacgccgtacccgcccttttccgcaccgtgcccgtcttcacactgccctcccaactgccagacttcctgggggccctgcagcagcctcgcgccccgcgttccgggcggctccaagagagagcggagcaagtgtcccgggcccttcagccagccctggatagctacttccatcccccggggactcccgcgccgggacgcggggtgggaccaggcgcgggacctggggcgggggacgggacttaaataaaggcagacgctgtttttcta

SEQ ID NO: 143875 - DNA, 2163 bp, Homo sapiens
  Payload ID: 8429
  Gene Symbol: IL17RC
  Gene Name: interleukin 17 receptor C
  ENST ID: ENST00000451231
  CDS Start-End: 219-590
aaaacgaaagcactccgtgctggaagtaggaggagagtcaggactcccaggacagagagtgcacaaactacccagcacagccccctccgccccctctggaggctgaagagggattccagcccctgccacccacagacacgggctgactggggtgtctgccccccttgggggggggcagcacagggcctcaggcctgggtgccacctggcacctagaagatgcctgtgccctggttcttgctgtccttggcactgggccgaagcccagtggtcctttctctggagaggcttgtggggcctcaggacgctacccactgctctccgggcctctcctgccgcctctgggacagtgacatactctgcctgcctggggacatcgtgcctgctccgggccccgtgctggcgcctacgcacctgcagacagagctggtgctgaggtgccagaaggagaccgactgtgacctctgtctgcgtgtggctgtccacttggccgtgcatggcctaccctactgcccgctgcgtcctgctggaggtgcaagtgcctgctgcccttgtgcagtttggtcagtctgtgggctctgtggtatatgactgcttcgaggctgccctagggagtgaggtacgaatctggtcctatactcagcccaggtacgagaaggaactcaaccacacacagcagctgcctgccctgccctggctcaacgtgtcagcagatggtgacaacgtgcatctggttctgaatgtctctgaggagcagcacttcggcctctccctgtactggaatcaggtccagggccccccaaaaccccggtggcacaaaaacctgactggaccgcagatcattaccttgaaccacacagacctggttccctgcctctgtattcaggtgtggcctctggaacctgactccgttaggacgaacatctgccccttcagggaggacccccgcgcacaccagaacctctggcaagccgcccgactgcaactgctgaccctgcagagctggctgctggacgcaccgtgctcgctgcccgcagaagcggcactgtgctggcgggctccgggtggggacccctgccagccactggtcccaccgctttcctgggagaacgtcactgtggacgtgaacagctcggagaagctgcagctgcaggagtgcttgtgggctgactccctggggcctctcaaagacgatgtgctactgttggagacacgaggcccccaggacaacagatccctctgtgccttggaacccagtggctgtacttcactacccagcaaagcctccacgagggcagctcgccttggagagtacttactacaagacctgcagtcaggccagtgtctgcagctatgggacgatgacttgggagcgctatgggcctgccccatggacaaatacatccacaagcgctgggccctcgtgtggctggcctgcctactctttgccgctgcgctttccctcatcctccttctcaaaaaggatcacgcgaaagcggccgccaggggccgcgcggctctgctcctctactcagccgatgactcgggtttcgagcgcctggtgggcgccctggcgtcggccctgtgccagctgccgctgcgcgtggccgtagacctgtggagccgtcgtgaactgagcgcgcaggggcccgtggcttggtttcacgcgcagcggcgccagaccctgcaggagggcggcgtggtggtcttgctcttctctcccggtgcggtggcgctgtgcagcgagtggctacaggatggggtgtccgggcccggggcgcacggcccgcacgacgccttccgcgcctcgctcagctgcgtgctgcccgacttcttgcagggccgggcgcccggcagctacgtgggggcctgcttcgacaggctgctccacccggacgccgtacccgcccttttccgcaccgtgcccgtcttcacactgccctcccaactgccagacttcctgggggccctgcagcagcctcgcgccccgcgttccgggcggctccaagagagagcggagcaagtgtcccgggcccttcagccagccctggatagctacttccatcccccggggactcccgcgccgggacgcggggtgggaccaggcgcgggacctggggcgggggacgggacttaaataaaggcagacgctgtttttctaccc

SEQ ID NO: 143876 - DNA, 2284 bp, Homo sapiens
  Payload ID: 8429
  Gene Symbol: IL17RC
  Gene Name: interleukin 17 receptor C
  ENST ID: ENST00000451271
  CDS Start-End: 192-404
aggaggagagtcaggactcccaggacagagagtgcacaaactacccagcacagccccctccgccccctctggaggctgaagagggattccagcccctgccacccacagacacgggctgactggggtgtctgccccccttgggggggggcagcacagggcctcaggcctgggtgccacctggcacctagaagatgcctgtgccctggttcttgctgtccttggcactgggccgaagcccagtggtcctttctctggagaggcttgtggggcctcaggacgctacccactgctctccgggcctctcctgccgcctctgggtgacatactctgcctgcctggggacatcgtgcctgctccgggccccgtgctggcgcctacgcacctgcagacagagctggtgctgaggtgccagaaggagaccgactgtgacctctgtctgcgtgtggctgtccacttggccgtgcatgggcactgggaagagcctgaagatgaggaaaagtttggaggagcagctgactcaggggtggaggagcctaggaatgcctctctccaggcccaagtcgtgctctccttccaggcctaccctactgcccgctgcgtcctgctggaggtgcaagtgcctgctgcccttgtgcagtttggtcagtctgtgggctctgtggtatatgactgcttcgaggctgccctagggagtgaggtacgaatctggtcctatactcagcccaggtacgagaaggaactcaaccacacacagcagctgcctgactgcagggggctcgaagtctggaacagcatcccgagctgctgggccctgccctggctcaacgtgtcagcagatggtgacaacgtgcatctggttctgaatgtctctgaggagcagcacttcggcctctccctgtactggaatcaggtccagggccccccaaaaccccggtggcacaaaaacctgactggaccgcagatcattaccttgaaccacacagacctggttccctgcctctgtattcaggtgtggcctctggaacctgactccgttaggacgaacatctgccccttcagggaggacccccgcgcacaccagaacctctggcaagccgcccgactgcaactgctgaccctgcagagctggctgctggacgcaccgtgctcgctgcccgcagaagcggcactgtgctggcgggctccgggtggggacccctgccagccactggtcccaccgctttcctgggagaacgtcactgtggacgtgaacagctcggagaagctgcagctgcaggagtgcttgtgggctgactccctggggcctctcaaagacgatgtgctactgttggagacacgaggcccccaggacaacagatccctctgtgccttggaacccagtggctgtacttcactacccagcaaagcctccacgagggcagctcgccttggagagtacttactacaagacctgcagtcaggccagtgtctgcagctatgggacgatgacttgggagcgctatgggcctgccccatggacaaatacatccacaagcgctgggccctcgtgtggctggcctgcctactctttgccgctgcgctttccctcatcctccttctcaaaaaggatcacgcgaaagcggccgccaggggccgcgcggctctgctcctctactcagccgatgactcgggtttcgagcgcctggtgggcgccctggcgtcggccctgtgccagctgccgctgcgcgtggccgtagacctgtggagccgtcgtgaactgagcgcgcaggggcccgtggcttggtttcacgcgcagcggcgccagaccctgcaggagggcggcgtggtggtcttgctcttctctcccggtgcggtggcgctgtgcagcgagtggctacaggatggggtgtccgggcccggggcgcacggcccgcacgacgccttccgcgcctcgctcagctgcgtgctgcccgacttcttgcagggccgggcgcccggcagctacgtgggggcctgcttcgacaggctgctccacccggacgccgtacccgcccttttccgcaccgtgcccgtcttcacactgccctcccaactgccagacttcctgggggccctgcagcagcctcgcgccccgcgttccgggcggctccaagagagagcggagcaagtgtcccgggcccttcagccagccctggatagctacttccatcccccggggactcccgcgccgggacgcggggtgggaccaggcgcgggacctggggcgggggacgggacttaaataaaggcagacgctgtttttcta

SEQ ID NO: 143877 - DNA, 772 bp, Homo sapiens
  Payload ID: 8429
  Gene Symbol: IL17RC
  Gene Name: interleukin 17 receptor C
  ENST ID: ENST00000440502
  CDS Start-End: 162-461
agtgcacaaactacccagcacagccccctccgccccctctggaggctgaagagggattccagcccctgccacccacagacacgggctgactggggtgtctgccccccttgggggggggcagcacagggcctcaggcctgggtgccacctggcacctagaagatgcctgtgccctggttcttgctgtccttggcactgggccgaagcccagtggtcctttctctggagaggcttgtggggcctcaggacgctacccactgctctccgggcctctcctgccgcctctgggacagtgacatactctgcctgcctggggacatcgtgcctgctccgggccccgtgctggcgcctacgcacctgcagacagagctggtgctgaggtgccagaaggagaccgactgtgacctctgtctgcgtgtggctgtccacttggccgtgcatggtgagcaagtcatcctgtgacagtgcatgtgtacacggcactgggaagagcctgaagatgaggaaaagtttggaggagcagctgactcaggggtggaggagcctaggaatgcctctctccaggcccaagtcgtgctctccttccaggcctaccctactgcccgctgcgtcctgctggaggtgcaagtgcctgctgcccttgtgcagtttggtcagtctgtgggctctgtggtatatgactgcttcgaggctgccctagggagtgaggtacgaatctggtcctatactcagcccaggtacgagaaggaactcaaccacacacagcagctgcc

SEQ ID NO: 143878 - DNA, 1208 bp, Homo sapiens
  Payload ID: 8429
  Gene Symbol: IL17RC
  Gene Name: interleukin 17 receptor C
  ENST ID: ENST00000438091
  CDS Start-End: 219-1208
aaaacgaaagcactccgtgctggaagtaggaggagagtcaggactcccaggacagagagtgcacaaactacccagcacagccccctccgccccctctggaggctgaagagggattccagcccctgccacccacagacacgggctgactggggtgtctgccccccttgggggggggcagcacagggcctcaggcctgggtgccacctggcacctagaagatgcctgtgccctggttcttgctgtccttggcactgggccgaagcccagtggtcctttctctggagaggcttgtggggcctcaggacgctacccactgctctccgggcctctcctgccgcctctgggacagtgacatactctgcctgcctggggacatcgtgcctgctccgggccccgtgctggcgcctacgcacctgcagacagagctggtgctgaggtgccagaaggagaccgactgtgacctctgtctgcgtgtggctgtccacttggccgtgcatgcctctctccaggcccaagtcgtgctctccttccaggcctaccctactgcccgctgcgtcctgctggaggtgcaagtgcctgctgcccttgtgcagtttggtcagtctgtgggctctgtggtatatgactgcttcgaggctgccctagggagtgaggtacgaatctggtcctatactcagcccaggtacgagaaggaactcaaccacacacagcagctgcctgccctgccctggctcaacgtgtcagcagatggtgacaacgtgcatctggttctgaatgtctctgaggagcagcacttcggcctctccctgtactggaatcaggtccagggccccccaaaaccccggtggcacaaaaacctgactggaccgcagatcattaccttgaaccacacagacctggttccctgcctctgtattcaggtgtggcctctggaacctgactccgttaggacgaacatctgccccttcagggaggacccccgcgcacaccagaacctctggcaagccgcccgactgcaactgctgaccctgcagagctggctgctggacgcaccgtgctcgctgcccgcagaagcggcactgtgctggcgggctccgggtggggacccctgccagccactggtcccaccgctttcctgggagaacgtcactgtggacaaggttctcgagttcccattgctgaaaggccaccctaacctctgtgttcag

SEQ ID NO: 143879 - DNA, 1044 bp, Homo sapiens
  Payload ID: 8429
  Gene Symbol: IL17RC
  Gene Name: interleukin 17 receptor C
  ENST ID: ENST00000476810
  CDS Start-End: 192-326
aggaggagagtcaggactcccaggacagagagtgcacaaactacccagcacagccccctccgccccctctggaggctgaagagggattccagcccctgccacccacagacacgggctgactggggtgtctgccccccttgggggggggcagcacagggcctcaggcctgggtgccacctggcacctagaagatgcctgtgccctggttcttgctgtccttggcactgggccgaagcccagtggtcctttctctggagaggcttgtggggcctcaggacgctacccactgctctccgaactgccctgtctggtctgtctggtgctgatggtagaagagaagaacggggaaggggcaagagctgggtctgtctttctctgggagggtctgggaatacggagccccagaaaaagggcctctcctgccgcctctgggtgacatactctgcctgcctggggacatcgtgcctgctccgggccccgtgctggcgcctacgcacctgcagacagagctggtgctgaggtgccagaaggagaccgactgtgacctctgtctgcgtgtggctgtccacttggccgtgcatgggcactgggaagagcctgaagatgaggaaaagtttggaggagcagctgactcaggggtggaggagcctaggaatgcctctctccaggcccaagtcgtgctctccttccaggcctaccctactgcccgctgcgtcctgctggaggtgcaagtgcctgctgcccttgtgcagtttggtcagtctgtgggctctgtggtatatgactgcttcgaggctgccctagggagtgaggtacgaatctggtcctatactcagcccaggtacgagaaggaactcaaccacacacagcagctgcctgccctgccctggctcaacgtgtcagcagatggtgacaacgtgcatctggttctgaatgtctctgaggagcagcacttcggcctctccctgtactggaatcaggtccagggccccccaaaaccccggtggcacaaaaacctggtgaggcctcccccttcccaagtcc

SEQ ID NO: 143880 - DNA, 8720 bp, Homo sapiens
  Payload ID: 8430
  Gene Symbol: IL17RD
  Gene Name: interleukin 17 receptor D
  Uniprot ID: Q8NFM7
  ENST ID: ENST00000296318
  CDS Start-End: 90-2309
gcggccgccgcggccaccgcccactcggggctggccagcggcgggcggccggggcgcagagaacggcctggctgggcgagcgcacggccatggccccgtggctgcagctctgctccgtcttctttacggtcaacgcctgcctcaacggctcgcagctggctgtggccgctggcgggtccggccgcgcgcggggcgccgacacctgtggctggaggggagtggggccagccagcagaaacagtgggctgtacaacatcaccttcaaatatgacaattgtaccacctacttgaatccagtggggaagcatgtgattgctgacgcccagaatatcaccatcagccagtatgcttgccatgaccaagtggcagtcaccattctttggtccccaggggccctcggcatcgaattcctgaaaggatttcgggtaatactggaggagctgaagtcggagggaagacagtgccaacaactgattctaaaggatccgaagcagctcaacagtagcttcaaaagaactggaatggaatctcaacctttcctgaatatgaaatttgaaacggattatttcgtaaaggttgtcccttttccttccattaaaaacgaaagcaattaccaccctttcttctttagaacccgagcctgtgacctgttgttacagccggacaatctagcttgtaaacccttctggaagcctcggaacctgaacatcagccagcatggctcggacatgcaggtgtccttcgaccatgcaccgcacaacttcggcttccgtttcttctatcttcactacaagctcaagcacgaaggacctttcaagcgaaagacctgtaagcaggagcaaactacagagacgaccagctgcctccttcaaaatgtttctccaggggattatataattgagctggtggatgacactaacacaacaagaaaagtgatgcattatgccttaaagccagtgcactccccgtgggccgggcccatcagagccgtggccatcacagtgccactggtagtcatatcggcattcgcgacgctcttcactgtgatgtgccgcaagaagcaacaagaaaatatatattcacatttagatgaagagagctctgagtcttccacatacactgcagcactcccaagagagaggctccggccgcggccgaaggtctttctctgctattccagtaaagatggccagaatcacatgaatgtcgtccagtgtttcgcctacttcctccaggacttctgtggctgtgaggtggctctggacctgtgggaagacttcagcctctgtagagaagggcagagagaatgggtcatccagaagatccacgagtcccagttcatcattgtggtttgttccaaaggtatgaagtactttgtggacaagaagaactacaaacacaaaggaggtggccgaggctcggggaaaggagagctcttcctggtggcggtgtcagccattgccgaaaagctccgccaggccaagcagagttcgtccgcggcgctcagcaagtttatcgccgtctactttgattattcctgcgagggagacgtccccggtatcctagacctgagtaccaagtacagactcatggacaatcttcctcagctctgttcccacttgcactcccgagaccacggcctccaggagccggggcagcacacgcgacagggcagcagaaggaactacttccggagcaagtcaggccggtccctatacgtcgccatttgcaacatgcaccagtttattgacgaggagcccgactggttcgaaaagcagttcgttcccttccatcctcctccactgcgctaccgggagccagtcttggagaaatttgattcgggcttggttttaaatgatgtcatgtgcaaaccagggcctgagagtgacttctgcctaaaggtagaggcggctgttcttggggcaaccggaccagccgactcccagcacgagagtcagcatgggggcctggaccaagacggggaggcccggcctgcccttgacggtagcgccgccctgcaacccctgctgcacacggtgaaagccggcagcccctcggacatgccgcgggactcaggcatctatgactcgtctgtgccctcatccgagctgtctctgccactgatggaaggactctcgacggaccagacagaaacgtcttccctgacggagagcgtgtcctcctcttcaggcctgggtgaggaggaacctcctgcccttccttccaagctcctctcttctgggtcatgcaaagcagatcttggttgccgcagctacactgatgaactccacgcggtcgcccctttgtaacaaaacgaaagagtctaagcattgccactttagctgctgcctccctctgattccccagctcatctccctggttgcatggcccacttggagctgaggtctcatacaaggatatttggagtgaaatgctggccagtacttgttctcccttgccccaaccctttaccggatatcttgacaaactctccaattttctaaaatgatatggagctctgaaaggcatgtccataaggtctgacaacagcttgccaaatttggttagtccttggatcagagcctgttgtgggaggtagggaggaaatatgtaaagaaaaacaggaagatacctgcactaatcattcagacttcattgagctctgcaaactttgcctgtttgctattggctaccttgatttgaaatgctttgtgaaaaaaggcacttttaacatcatagccacagaaatcaagtgccagtctatctggaatccatgttgtattgcagataatgttctcatttatttttgatgtagaatttacattgccatgggtgttaaataagctttgagtcaaaagtcaagaaagtgactgaatatacagtcaccttttatgaaatgagtctctgtgttactgggtggcatgactgattgaggtgaagctcacggggccaggctgaccgtcttgaccgttccacttgagataggttggtcatcgtgcagaaggccccaggacctcagcacacacagcctcctcttggtctgagtaggcatcatgtgggggccagatctgcctgctgtttccatgggttacatttactgtgctgtatctcagatgttggtgtctggaagtttattcttaagagactgctacccagctggtctgtattattggaagttgcagttcgtgctttggttggccttctggtctaaagctgtgtcctgaatattagggatcacaattcactgaaatacagcagtgtgtggaggtgatggccagttaatctgctgaactggttttgactaatgacaaacctctttttaagatggtagaatggaggtgatagtcacaaaagtaaatgttccatttttatgaatgactttctacagagtttctatttctaaagaaaaaacaattgttcacatcccatctgatgattagcatgtgtgtaatgaatgctgtcttggtctcccctgtggaaacccttctccctgtgccttagagcaggtgtgtacatctctcactacctttctcatgggtgctgttagattttggcacccgttttctcagcattcagcccagggaatgtggttttcacttcttcgtcagataagaccaacatgaaggggtatgttgagaaacatcctgaggcaaggtgggaggtgggatggggcaggactttcccttccaagcacatgcatggcaggtggggaaaggggggcttgcacccctgctggaaagaaaaggtttgtgtatatttctgatgcaaatgtcatactcactgctctgtaaaggcagctggcagctttttgggaaaagaacgtgctcgtctgttctctggcatcaagtttcttgcagctgctctgagggagagacagtgagctgcaagactgcctccccataacaacaggcaactcagagaagagtcattttatgttgttcctatggaatctggaatgagtgcagagctcctacccacacatgactgccccgccatttcatcctaggcattctgtgaaggagattggttagtccaaacttgctaacatacgaaaattcacttggaacatgatgagagatttcttattgaggccaagagatgtttcctgtcccagaggaaccattaggagtcgcttttagggtattcagctttgttcatgaaataaggcatctctgagaaagtggccccagggagagaatggaggactgggaggagaagcattaactgagctccaagggtgtgtgggcagagagcttgctatgtgaactcactccttaagaaaatggaagagaaaaagagagtgctagttaaaaaatcgggatgttttagtttggatttagggttttgatacttatgttgaaatactaatgtttctgatcaataaaatcaaactcttaatataccgagtaatgaaaccatagtgtgattgcctcagaataaattgagaagtccaacttcctagttttgtttaattagtttcactttttctactctccccagtatgctagaaatgggaatcgttgccctgcagattacggcaaaacatctgttttaagcaaagctgcattttttgactcagaaattgtcccagacggtggatataagatgaaattcagaaaaacgttctgccaagtcacaggcttttagatattatggaaacaagaaatggaaaacaggatgatctccatgagaggccttgatcctgagagtaaaaggcttgtgtagataggttagacaacgtcctctagaaaagagaccagggataagtccaggtttccaggaaaaccaagaagcctgcgggtagctgaaggtagagtgctagttgttcatcttaacttaccaatgagctacagaaaggacttagcatctgatgtcatcagctttgccaggagagtgatcaaggaggttaaagctcaggtaaaggtgtgccttctcagagattggctacaagcaacagagaccacctcaacagagaccacctcaacagactcagcccagccatacaaggtgccaaagctcctccagagggctgtcttgggcctttgaggcaattgatctccagaaagagtcagaagtcattccagtccaggcccaggtattcagatggtgacccagccagataatagtatcttgagcaaataatagtatcttgagtgcaaataagcaggaagactgtccttcaaaaaatgtggggttacatgattttcagagcctttttttcagagttgagcatcttttcttttaaaagaaataaggggcaagaggaccaattttattccttgaggaaaaatgacacacccttctcccaaaagaaagaaaactctctggccccccaacttcaacactaatttggctccctgaagaagagagaaaatattatttctgtctttattgaagagaaatgggcaatgccaatgtgaaggttactagtcttttttattttctattggtgaagactactactgctcttatttagcagatcttataccttcagtggtcaccagtatagcaggtgaggtataaggaaaacagcagtgtgatgataaatggtaattaatatactttgtctgtgtcagcaatagggaatggtggggactgtggcaaactgaagcgcccctgttccacccacagtgggtaattttccagtcgactgtggccatgaagtacttcctgatcttcccatttttcaagaaaagctgacaatctggatttttatatgaaaaattctgattttaaaaaatattggcaactaagttaaaattcaagtgaatttagacccagcagaagacatggatggacctgatttggtccactgactaccagtttgttaacctgtgctttataagatttgaaggaaaggcattcatggtaattacagacggtgccaccagaaaatgctcttgctaaatgcagccagtagttagattgcttctttctccagtctcccccgcaaagaaatttgacgtgattctgaatgcactggacatgtcttgattgcgtctttacatttcacagtgtcttaaaagaaaggcaagccagttgttaatttcagaatcagatttatgctctctcaatttaaaaaatgctgggaacaatttcatttttttttttttgagatggagtcttgctctgttgcccaggctggagtgcagtggcgtgatctcggctcactgcaagctccacctcccgggttcacgccattctcctgcctcagcctcctgagtagctgggactacaggcgcccaccaccacgcctggctaatttttttgtatttttagtagagacggggtttcactgtgttagccaggatgatctcgatctcctgacctggtgatccgcttgcctcggcctcccaaagtgctgggattacaggcgtgagccactgcgcccggcctaacaatttcatttaaactccacaacctaaagggctttgtttatagttttagctcttggcataatttttttcaggtggtgtgcaattctgagcataggccaagacatgattaggaaagcaggcagttgtagagagtaaggcaaggaacctcctagcgtccattagagccaggtatttgcattatcttccgttttaagtggtctgtgaattgactgtgttttggaggtgtgaaacagtatacagagaaaagcttttcctgatactgagatatcagttaggagtccaaatggggtgttgggtcatccttgccatatcacctcctttccaggctcagagtgaaaatagacaaaaggaaatctgactgcaagccagtggctttgattccagtttcagagtttagggactaggagagagtttagattatctagcatattctccccctggtgtcagacagggctgtgcctgaattattccagacatatggctgtagatggtattctttattttataagaaggagattctgtaacctaccctgctgatcagatagttctttgtatgtcttagagaaattcaagccagcttccttttgttcggcttgtagtggagaaagaacagctggtcaccttccatgtattcaaaaaccacagtgaagtcatccccctggtgtttttatttcagtgataaataattccacccacttaaaccattcttcatggctcttgttttccaggggcctaataattttcactgctgtaatgtttctcagcttcacacttagtttagttgcccaaacaatgttggtgccttactcacattggtgccttgtgaagacgaggctcaggatggggattatggggaaattcttgcacacccagctcctcttaccacttaaaaatataatggcactttcacaaaatgatatgtcacctatattcattgagaattatttgactgccacatttttcccctgatgatagtcatctatcataacttgtgtttgttttcctcctgagatcaaacacttggtgcttattcctgatgtatactctgagaccagctcttaccttctgagtggcagctacccctccctcccaattttagatcctatttttacacatctctatagatatcacctttatttcatgactcacaatattaaatggtacagacttcagtttaaccactggtgtggtaacagcagtagttgctaagtaccaccttcccattgctgtttgagggctaatttgcaaagacatttgaatctcccagtgaagatgtctggggaattttggccagttgtcttccctcttgcccttttgttctttaaaattcagcttggaccatagacacctccaggatcttgtttatgttctgctctcaattgaccaagcactgcgttttgcacaatcagaagtctcacaaaagcaaacagttatgactgcatatctgatgtttatatcctataaaatttcaggaagattcagagtcaatcttctatttgtacatgatgtagacaaaattagctgctccaattgttagacaaaaaattgccattggattacactaatgtgctcatctgttgttttaaaagtttggtatcaggcggggcacggtggctcacgcctgtaatcccagcattttgggaggccaaggtgggcggatcacctgaggtccagagttcaagaccagcctgaccaacatggtgaaaccctgtctctactaaaaatacaaaattaatcaggcgtggttgtgtgtgcctgtaatcccagctactcgagaggctgaggcaggagaatcgcttgaatccgggaggcagaggttgcagtgagctgagatcacgccattgcactctagcctgggcaacaagagcgaaactccgtctcaacaacaacaacaaaaagtttggtatgtttctctcaagaaaaaagcatggtgagtccagacagcagcaaaagcttttgtgaaaaccaattgtgttcatctagatagtaagtaactcctatttttactgttaattttttaaaagagaatttttccctgtggaaactccctgttagtacgtcctaggggagaaagcctgtggaatatggtggttattgatggcgttgcctttgtttcatctttgagtttgccctttgtgggatctagtgggataatgagcactgacagaactcttaacagcgtgctgtatttttgacattgaaaatgttaatgacttgatttgtacataactctgtaactaggtgaaagtagatcacagctgacatttacaaaatgtttttgtaccttagaatttctgcattaaataaaatgttttgttttaa

SEQ ID NO: 143881 - DNA, 4474 bp, Homo sapiens
  Payload ID: 8430
  Gene Symbol: IL17RD
  Gene Name: interleukin 17 receptor D
  Uniprot ID: Q8NFM7
  ENST ID: ENST00000320057
  CDS Start-End: 544-2331
atccgctcttcttttcctccgggaaaagaaacgggaagtggccgtgggccggtgaattccgtgtagtggccaagctttgttccaaagagggggaggtggtgacagtctcttgcccactgaagcgtgccagacagagtgctaggcatgggggcagaggtgaatcagatgacagccacctctcaccacgaggagtggctgaaagtgtgactggactacaggcaatcctggccttggcagggagtggggccagccagcagaaacagtgggctgtacaacatcaccttcaaatatgacaattgtaccacctacttgaatccagtggggaagcatgtgattgctgacgcccagaatatcaccatcagccagtatgcttgccatgaccaagtggcagtcaccattctttggtccccaggggccctcggcatcgaattcctgaaaggatttcgggtaatactggaggagctgaagtcggagggaagacagtgccaacaactgattctaaaggatccgaagcagctcaacagtagcttcaaaagaactggaatggaatctcaacctttcctgaatatgaaatttgaaacggattatttcgtaaaggttgtcccttttccttccattaaaaacgaaagcaattaccaccctttcttctttagaacccgagcctgtgacctgttgttacagccggacaatctagcttgtaaacccttctggaagcctcggaacctgaacatcagccagcatggctcggacatgcaggtgtccttcgaccatgcaccgcacaacttcggcttccgtttcttctatcttcactacaagctcaagcacgaaggacctttcaagcgaaagacctgtaagcaggagcaaactacagagacgaccagctgcctccttcaaaatgtttctccaggggattatataattgagctggtggatgacactaacacaacaagaaaagtgatgcattatgccttaaagccagtgcactccccgtgggccgggcccatcagagccgtggccatcacagtgccactggtagtcatatcggcattcgcgacgctcttcactgtgatgtgccgcaagaagcaacaagaaaatatatattcacatttagatgaagagagctctgagtcttccacatacactgcagcactcccaagagagaggctccggccgcggccgaaggtctttctctgctattccagtaaagatggccagaatcacatgaatgtcgtccagtgtttcgcctacttcctccaggacttctgtggctgtgaggtggctctggacctgtgggaagacttcagcctctgtagagaagggcagagagaatgggtcatccagaagatccacgagtcccagttcatcattgtggtttgttccaaaggtatgaagtactttgtggacaagaagaactacaaacacaaaggaggtggccgaggctcggggaaaggagagctcttcctggtggcggtgtcagccattgccgaaaagctccgccaggccaagcagagttcgtccgcggcgctcagcaagtttatcgccgtctactttgattattcctgcgagggagacgtccccggtatcctagacctgagtaccaagtacagactcatggacaatcttcctcagctctgttcccacttgcactcccgagaccacggcctccaggagccggggcagcacacgcgacagggcagcagaaggaactacttccggagcaagtcaggccggtccctatacgtcgccatttgcaacatgcaccagtttattgacgaggagcccgactggttcgaaaagcagttcgttcccttccatcctcctccactgcgctaccgggagccagtcttggagaaatttgattcgggcttggttttaaatgatgtcatgtgcaaaccagggcctgagagtgacttctgcctaaaggtagaggcggctgttcttggggcaaccggaccagccgactcccagcacgagagtcagcatgggggcctggaccaagacggggaggcccggcctgcccttgacggtagcgccgccctgcaacccctgctgcacacggtgaaagccggcagcccctcggacatgccgcgggactcaggcatctatgactcgtctgtgccctcatccgagctgtctctgccactgatggaaggactctcgacggaccagacagaaacgtcttccctgacggagagcgtgtcctcctcttcaggcctgggtgaggaggaacctcctgcccttccttccaagctcctctcttctgggtcatgcaaagcagatcttggttgccgcagctacactgatgaactccacgcggtcgcccctttgtaacaaaacgaaagagtctaagcattgccactttagctgctgcctccctctgattccccagctcatctccctggttgcatggcccacttggagctgaggtctcatacaaggatatttggagtgaaatgctggccagtacttgttctcccttgccccaaccctttaccggatatcttgacaaactctccaattttctaaaatgatatggagctctgaaaggcatgtccataaggtctgacaacagcttgccaaatttggttagtccttggatcagagcctgttgtgggaggtagggaggaaatatgtaaagaaaaacaggaagatacctgcactaatcattcagacttcattgagctctgcaaactttgcctgtttgctattggctaccttgatttgaaatgctttgtgaaaaaaggcacttttaacatcatagccacagaaatcaagtgccagtctatctggaatccatgttgtattgcagataatgttctcatttatttttgatgtagaatttacattgccatgggtgttaaataagctttgagtcaaaagtcaagaaagtgactgaatatacagtcaccttttatgaaatgagtctctgtgttactgggtggcatgactgattgaggtgaagctcacggggccaggctgaccgtcttgaccgttccacttgagataggttggtcatcgtgcagaaggccccaggacctcagcacacacagcctcctcttggtctgagtaggcatcatgtgggggccagatctgcctgctgtttccatgggttacatttactgtgctgtatctcagatgttggtgtctggaagtttattcttaagagactgctacccagctggtctgtattattggaagttgcagttcgtgctttggttggccttctggtctaaagctgtgtcctgaatattagggatcacaattcactgaaatacagcagtgtgtggaggtgatggccagttaatctgctgaactggttttgactaatgacaaacctctttttaagatggtagaatggaggtgatagtcacaaaagtaaatgttccatttttatgaatgactttctacagagtttctatttctaaagaaaaaacaattgttcacatcccatctgatgattagcatgtgtgtaatgaatgctgtcttggtctcccctgtggaaacccttctccctgtgccttagagcaggtgtgtacatctctcactacctttctcatgggtgctgttagattttggcacccgttttctcagcattcagcccagggaatgtggttttcacttcttcgtcagataagaccaacatgaaggggtatgttgagaaacatcctgaggcaaggtgggaggtgggatggggcaggactttcccttccaagcacatgcatggcaggtggggaaaggggggcttgcacccctgctggaaagaaaaggtttgtgtatatttctgatgcaaatgtcatactcactgctctgtaaaggcagctggcagctttttgggaaaagaacgtgctcgtctgttctctggcatcaagtttcttgcagctgctctgagggagagacagtgagctgcaagactgcctccccataacaacaggcaactcagagaagagtcattttatgttgttcctatggaatctggaatgagtgcagagctcctacccacacatgactgccccgccatttcatcctaggcattctgtgaaggagattggttagtccaaacttgctaacatacgaaaattcacttggaacatgatgagagatttcttattgaggccaagagatgtttcctgtcccagaggaaccattaggagtcgcttttagggtattcagctttgttcatgaaataaggcatctctgagaaagtggccccagggagagaatggaggactgggaggagaagcattaactgagctccaagggtgtgtgggcagagagcttgctatgtgaactcactccttaagaaaatggaagagaaaaagagagtgctagttaaaaaatcgggatgttttagtttggatttagggttttgatacttatgttgaaatactaatgtttctgatcaataaaatcaaactcttaatataccgagtaatgaaaccatagtgtgattgcctcagaataaattgagaagtcc

SEQ ID NO: 143882 - DNA, 2348 bp, Homo sapiens
  Payload ID: 8430
  Gene Symbol: IL17RD
  Gene Name: interleukin 17 receptor D
  Uniprot ID: Q8NFM7
  ENST ID: ENST00000463523
  CDS Start-End: 346-2133
gcctcaggtgttcctgcgttgtttgtcagtggagagcagggagtggggccagccagcagaaacagtgggctgtacaacatcaccttcaaatatgacaattgtaccacctacttgaatccagtggggaagcatgtgattgctgacgcccagaatatcaccatcagccagtatgcttgccatgaccaagtggcagtcaccattctttggtccccaggggccctcggcatcgaattcctgaaaggatttcgggtaatactggaggagctgaagtcggagggaagacagtgccaacaactgattctaaaggatccgaagcagctcaacagtagcttcaaaagaactggaatggaatctcaacctttcctgaatatgaaatttgaaacggattatttcgtaaaggttgtcccttttccttccattaaaaacgaaagcaattaccaccctttcttctttagaacccgagcctgtgacctgttgttacagccggacaatctagcttgtaaacccttctggaagcctcggaacctgaacatcagccagcatggctcggacatgcaggtgtccttcgaccatgcaccgcacaacttcggcttccgtttcttctatcttcactacaagctcaagcacgaaggacctttcaagcgaaagacctgtaagcaggagcaaactacagagacgaccagctgcctccttcaaaatgtttctccaggggattatataattgagctggtggatgacactaacacaacaagaaaagtgatgcattatgccttaaagccagtgcactccccgtgggccgggcccatcagagccgtggccatcacagtgccactggtagtcatatcggcattcgcgacgctcttcactgtgatgtgccgcaagaagcaacaagaaaatatatattcacatttagatgaagagagctctgagtcttccacatacactgcagcactcccaagagagaggctccggccgcggccgaaggtctttctctgctattccagtaaagatggccagaatcacatgaatgtcgtccagtgtttcgcctacttcctccaggacttctgtggctgtgaggtggctctggacctgtgggaagacttcagcctctgtagagaagggcagagagaatgggtcatccagaagatccacgagtcccagttcatcattgtggtttgttccaaaggtatgaagtactttgtggacaagaagaactacaaacacaaaggaggtggccgaggctcggggaaaggagagctcttcctggtggcggtgtcagccattgccgaaaagctccgccaggccaagcagagttcgtccgcggcgctcagcaagtttatcgccgtctactttgattattcctgcgagggagacgtccccggtatcctagacctgagtaccaagtacagactcatggacaatcttcctcagctctgttcccacttgcactcccgagaccacggcctccaggagccggggcagcacacgcgacagggcagcagaaggaactacttccggagcaagtcaggccggtccctatacgtcgccatttgcaacatgcaccagtttattgacgaggagcccgactggttcgaaaagcagttcgttcccttccatcctcctccactgcgctaccgggagccagtcttggagaaatttgattcgggcttggttttaaatgatgtcatgtgcaaaccagggcctgagagtgacttctgcctaaaggtagaggcggctgttcttggggcaaccggaccagccgactcccagcacgagagtcagcatgggggcctggaccaagacggggaggcccggcctgcccttgacggtagcgccgccctgcaacccctgctgcacacggtgaaagccggcagcccctcggacatgccgcgggactcaggcatctatgactcgtctgtgccctcatccgagctgtctctgccactgatggaaggactctcgacggaccagacagaaacgtcttccctgacggagagcgtgtcctcctcttcaggcctgggtgaggaggaacctcctgcccttccttccaagctcctctcttctgggtcatgcaaagcagatcttggttgccgcagctacactgatgaactccacgcggtcgcccctttgtaacaaaacgaaagagtctaagcattgccactttagctgctgcctccctctgattccccagctcatctccctggttgcatggcccacttggagctgaggtctcatacaaggatatttggagtgaaatgctggccagtacttgttctcccttgccccaaccctttaccggatatcttgacaaactctccaattttctaaaatgatatggagctctgaaa

SEQ ID NO: 143883 - DNA, 589 bp, Homo sapiens
  Payload ID: 8430
  Gene Symbol: IL17RD
  Gene Name: interleukin 17 receptor D
  ENST ID: ENST00000467210
  CDS Start-End: 370-589
ttttcctccgggaaaagaaacgggaagtggccgtgggccggtgaattccgtgtagtggccaagggagtggggccagccagcagaaacagtgggctgtacaacatcaccttcaaatatgacaattgtaccacctacttgaatccagtggggaagcatgtgattgctgacgcccagaatatcaccatcagccagtatgcttgccatgaccaagtggcagtcaccattctttggtccccaggggccctcggcatcgaattcctgaaaggatttcgggtaatactggaggagctgaagtcggagggaagacagtgccaacaactgattctaaaggatccgaagcagctcaacagtagcttcaaaagaactggaatggaatctcaacctttcctgaatatgaaatttgaaacggattatttcgtaaaggttgtcccttttccttccattaaaaacgaaagcaattaccaccctttcttctttagaacccgagcctgtgacctgttgttacagccggacaatctagcttgtaaacccttctggaagcctcggaacctgaacatcagccagcatggctcggacatgcaggtgtcct

SEQ ID NO: 143884 - DNA, 2704 bp, Homo sapiens
  Payload ID: 8431
  Gene Symbol: IL17RE
  Gene Name: interleukin 17 receptor E
  Uniprot ID: Q8NFR9
  ENST ID: ENST00000383814
  CDS Start-End: 106-2109
cgagggctcctgctggtactgtgttcgctgctgcacagcaaggccctgccacccaccttcaggccatgcagccatgttccgggagccctaattgcacagaagcccatggggagctccagactggcagccctgctcctgcctctcctcctcatagtcatcgacctctctgactctgctgggattggctttcgccacctgccccactggaacacccgctgtcctctggcctcccacacggatgacagtttcactggaagttctgcctatatcccttgccgcacctggtgggccctcttctccacaaagccttggtgtgtgcgagtctggcactgttcccgctgtttgtgccagcatctgctgtcaggtggctcaggtcttcaacggggcctcttccacctcctggtgcagaaatccaaaaagtcttccacattcaagttctataggagacacaagatgccagcacctgctcagaggaagctgctgcctcgtcgtcacctgtctgagaagagccatcacatttccatcccctccccagacatctcccacaagggacttcgctctaaaaggacccaaccttcggatccagagacatgggaaagtcttcccagattggactcacaaaggcatggaggacccgagttctcctttgatttgctgcctgaggcccgggctattcgggtgaccatatcttcaggccctgaggtcagcgtgcgtctttgtcaccagtgggcactggagtgtgaagagctgagcagtccctatgatgtccagaaaattgtgtctgggggccacactgtagagctgccttatgaattccttctgccctgtctgtgcatagaggcatcctacctgcaagaggacactgtgaggcgcaaaaaatgtcccttccagagctggccagaagcctatggctcggacttctggaagtcagtgcacttcactgactacagccagcacactcagatggtcatggccctgacactccgctgcccactgaagctggaagctgccctctgccagaggcacgactggcataccctttgcaaagacctcccgaatgccacagctcgagagtcagatgggtggtatgttttggagaaggtggacctgcacccccagctctgcttcaagttctcttttggaaacagcagccatgttgaatgcccccaccagactgggtctctcacatcctggaatgtaagcatggatacccaagcccagcagctgattcttcacttctcctcaagaatgcatgccaccttcagtgctgcctggagcctcccaggcttggggcaggacactttggtgccccccgtgtacactgtcagccaggcccggggctcaagcccagtgtcactagacctcatcattcccttcctgaggccagggtgctgtgtcctggtgtggcggtcagatgtccagtttgcctggaagcacctcttgtgtccggatgtctcttacagacacctggggctcttgatcctggcactgctggccctcctcaccctactgggtgttgttctggccctcacctgccggcgcccacagtcaggcccgggcccagcgcggccagtgctcctcctgcacgcggcggactcggaggcgcagcggcgcctggtgggagcgctggctgaactgctacgggcagcgctgggcggcgggcgcgacgtgatcgtggacctgtgggaggggaggcacgtggcgcgcgtgggcccgctgccgtggctctgggcggcgcggacgcgcgtagcgcgggagcagggcactgtgctgctgctgtggagcggcgccgaccttcgcccggtcagcggccccgacccccgcgccgcgcccctgctcgccctgctccacgctgccccgcgcccgctgctgctgctcgcttacttcagtcgcctctgcgccaagggcgacatccccccgccgctgcgcgccctgccgcgctaccgcctgctgcgcgacctgccgcgtctgctgcgggcgctggacgcgcggcctttcgcagaggccaccagctggggccgccttggggcgcggcagcgcaggcagagccgcctagagctgtgcagccggctcgaacgagaggccgcccgacttgcagacctaggttgagcagagctccaccgcagtcccgggtgtctgcggccgcaacgcaacggacactggctggaaccccggaatgagccttcgaccctgaaatccttggggtgcctcgaggacgactggccgaaaagccgcattccctgcctcacaggccggaagtcccagcccagtccccgcgcgcgtccctcttcctcctcatactttcccttgactgagagctcctctaacccctgttctgatgggggagggcggtcttcccacttcctctccagaactccagaaagagcagtgtgcttatgcttcagtccaggctggagaggttggggccggggtagggaggcaggagccatgtcagttctgaaggagggtgaggcggtgggggattgcagggggcggctgagagaaaacctccttgggggccagggattccctttcccactctgaggctctggccagagggagagaggactctggacctaggaaaagaggcttttggctccaggtggtcaggacagtgggggttgggggtggggtgggtgggtgctggcggtggggaccaagatccggaaagatgaataaagacaaacatgacaaactaagaaaa

SEQ ID NO: 143885 - DNA, 2808 bp, Homo sapiens
  Payload ID: 8431
  Gene Symbol: IL17RE
  Gene Name: interleukin 17 receptor E
  ENST ID: ENST00000383815
  CDS Start-End: 84-644
gttcgctgctgcacagcaaggccctgccacccaccttcaggccatgcagccatgttccgggagccctaattgcacagaagcccatggggagctccagactggcagccctgctcctgcctctcctcctcatagtcatcgacctctctgactctgctgggattggctttcgccacctgccccactggaacacccgctgtcctctggcctcccacacggaagttctgcctatatcccttgccgcacctggtgggccctcttctccacaaagccttggtgtgtgcgagtctggcactgttcccgctgtttgtgccagcatctgctgtcaggtggctcaggtcttcaacggggcctcttccacctcctggtgcagaaatccaaaaagtcttccacattcaagttctataggagacacaagatgccagcacctgctcagaggaagctgctgcctcgtcgtcacctgtctgagaagagccatcacatttccatcccctccccagacatctcccacaagggacttcgctctaaaaggacccaaccttcggatccagagacatgggaaagtcttcccagattggactcacaaaggcatggaggacccgagttctcctttgatttgctgcctgaggcccgggctattcgggtgaccatatcttcaggccctgaggtcagcgtgcgtctttgtcaccagtgggcactggagtgtgaagagctgagcagtccctatgatgtccagaaaattgtgtctgggggccacactgtagagctgccttatgaattccttctgccctgtctgtgcatagaggcatcctacctgcaagaggacactgtgaggcgcaaaaaatgtcccttccagagctggccagaagcctatggctcggacttctggaagtcagtgcacttcactgactacagccagcacactcagatggtcatggccctgacactccgctgcccactgaagctggaagctgccctctgccagaggcacgactggcataccctttgcaaagacctcccgaatgccacagctcgagagtcagatgggtggtatgttttggagaaggtggacctgcacccccagctctgcttcaagttctcttttggaaacagcagccatgttgaatgcccccaccagactgggtctctcacatcctggaatgtaagcatggatacccaagcccagcagctgattcttcacttctcctcaagaatgcatgccaccttcagtgctgcctggagcctcccaggcttggggcaggacactttggtgccccccgtgtacactgtcagccaggcccggggctcaagcccagtgtcactagacctcatcattcccttcctgaggccagggtgctgtgtcctggctagcagctggagcagacacaaacccacctgggaagaattccctagccagtggggactcccctctcccccagctccatgcttcactcagctccccgggaggagaagatgcctggctcataggggtggggggctctgtgccctcaggtgtggcggtcagatgtccagtttgcctggaagcacctcttgtgtccggatgtctcttacagacacctggggctcttgatcctggcactgctggccctcctcaccctactgggtgttgttctggccctcacctgccggcgcccacagtcaggcccgggcccagcgcggccagtgctcctcctgcacgcggcggactcggaggcgcagcggcgcctggtgggagcgctggctgaactgctacgggcagcgctgggcggcgggcgcgacgtgatcgtggacctgtgggaggggaggcacgtggcgcgcgtgggcccgctgccgtggctctgggcggcgcggacgcgcgtagcgcgggagcagggcactgtgctgctgctgtggagcggcgccgaccttcgcccggtcagcggccccgacccccgcgccgcgcccctgctcgccctgctccacgctgccccgcgcccgctgctgctgctcgcttacttcagtcgcctctgcgccaagggcgacatccccccgccgctgcgcgccctgccgcgctaccgcctgctgcgcgacctgccgcgtctgctgcgggcgctggacgcgcggcctttcgcagaggccaccagctggggccgccttggggcgcggcagcgcaggcagagccgcctagagctgtgcagccggctcgaacgagaggccgcccgacttgcagacctaggttgagcagagctccaccgcagtcccgggtgtctgcggccgcaacgcaacggacactggctggaaccccggaatgagccttcgaccctgaaatccttggggtgcctcgaggacgactggccgaaaagccgcattccctgcctcacaggccggaagtcccagcccagtccccgcgcgcgtccctcttcctcctcatactttcccttgactgagagctcctctaacccctgttctgatgggggagggcggtcttcccacttcctctccagaactccagaaagagcagtgtgcttatgcttcagtccaggctggagaggttggggccggggtagggaggcaggagccatgtcagttctgaaggagggtgaggcggtgggggattgcagggggcggctgagagaaaacctccttgggggccagggattccctttcccactctgaggctctggccagagggagagaggactctggacctaggaaaagaggcttttggctccaggtggtcaggacagtgggggttgggggtggggtgggtgggtgctggcggtggggaccaagatccggaaagatgaataaagacaaacatgacaaactaag

SEQ ID NO: 143886 - DNA, 2757 bp, Homo sapiens
  Payload ID: 8431
  Gene Symbol: IL17RE
  Gene Name: interleukin 17 receptor E
  Uniprot ID: Q8NFR9
  ENST ID: ENST00000454190
  CDS Start-End: 86-1687
gtgttcgctgctgcacagcaaggccctgccacccaccttcaggccatgcagccatgttccgggagccctaattgcacagaagcccatggggagctccagactggcagccctgctcctgcctctcctcctcatagtcatcgacctctctgactctgctgggattggctttcgccacctgccccactggaacacccgctgtcctctggcctcccacacggatgacagtttcactggaagttctgcctatatcccttgccgcacctggtgggccctcttctccacaaagccttggtgtgtgcgagtctggcactgttcccgctgtttgtgccagcatctgctgtcaggtggctcaggtcttcaacggggcctcttccacctcctggtgcagaaatccaaaaagtcttccacattcaagttctataggagacacaagatgccagcacctgctcagaggaagctgctgcctcgtcgtcacctgtctgagaagagccatcacatttccatcccctccccagacatctcccacaagggacttcgctctaaaaggacccaaccttcggatccagagacatgggaaagtcttcccagattggactcacaaaggcatggaggacccgagttctcctttgatttgctgcctgaggcccgggctattcgggtgaccatatcttcaggccctgaggtcagcgtgcgtctttgtcaccagtgggcactggagtgtgaagagctgagcagtccctatgatgtccagaaaattgtgtctgggggccacactgtagagctgccttatgaattccttctgccctgtctgtgcatagaggcatcctacctgcaagaggacactgtgaggcgcaaaaaatgtcccttccagagctggccagaagcctatggctcggacttctggaagtcagtgcacttcactgactacagccagcacactcagatggtcatggccctgacactccgctgcccactgaagctggaagctgccctctgccagaggcacgactggcataccctttgcaaagacctcccgaatgccacagctcgagagtcagatgggtggtatgttttggagaaggtggacctgcacccccagctctgcttcaagttctcttttggaaacagcagccatgttgaatgcccccaccagactgggtctctcacatcctggaatgtaagcatggatacccaagcccagcagctgattcttcacttctcctcaagaatgcatgccaccttcagtgctgcctggagcctcccaggcttggggcaggacactttggtgccccccgtgtacactgtcagccaggcccggggctcaagcccagtgtcactagacctcatcattcccttcctgaggccagggtgctgtgtcctgctccatgcttcactcagctccccgggaggagaagatgcctggctcataggggtggggggctctgtgccctcaggtgtggcggtcagatgtccagtttgcctggaagcacctcttgtgtccggatgtctcttacagacacctggggctcttgatcctggcactgctggccctcctcaccctactgggtgttgttctggccctcacctgccggcgcccacagtcaggcccgggcccagcgcggccagtgctcctcctgcacgcggcggactcggaggcgcagcggcgcctggtgggagcgctggctgaactgctacgggcagcgctgggcggcgggcgcgacgtgatcgtggacctgtgggaggggaggcacgtggcgcgcgtgggcccgctgccgtggctctgggcggcgcggacgcgcgtagcgcgggagcagggcactgtgctgctgctgtggagcggcgccgaccttcgcccggtcagcggccccgacccccgcgccgcgcccctgctcgccctgctccacgctgccccgcgcccgctgctgctgctcgcttacttcagtcgcctctgcgccaagggcgacatccccccgccgctgcgcgccctgccgcgctaccgcctgctgcgcgacctgccgcgtctgctgcgggcgctggacgcgcggcctttcgcagaggccaccagctggggccgccttggggcgcggcagcgcaggcagagccgcctagagctgtgcagccggctcgaacgagaggccgcccgacttgcagacctaggttgagcagagctccaccgcagtcccgggtgtctgcggccgcaacgcaacggacactggctggaaccccggaatgagccttcgaccctgaaatccttggggtgcctcgaggacgactggccgaaaagccgcattccctgcctcacaggccggaagtcccagcccagtccccgcgcgcgtccctcttcctcctcatactttcccttgactgagagctcctctaacccctgttctgatgggggagggcggtcttcccacttcctctccagaactccagaaagagcagtgtgcttatgcttcagtccaggctggagaggttggggccggggtagggaggcaggagccatgtcagttctgaaggagggtgaggcggtgggggattgcagggggcggctgagagaaaacctccttgggggccagggattccctttcccactctgaggctctggccagagggagagaggactctggacctaggaaaagaggcttttggctccaggtggtcaggacagtgggggttgggggtggggtgggtgggtgctggcggtggggaccaagatccggaaagatgaataaagacaaacatgacaaactaagaaaa

SEQ ID NO: 143887 - DNA, 571 bp, Homo sapiens
  Payload ID: 8431
  Gene Symbol: IL17RE
  Gene Name: interleukin 17 receptor E
  ENST ID: ENST00000454992
  CDS Start-End: 52-571
accttcaggccatgcagccatgttccgggagccctaattgcacagaagcccatggggagctccagactggcagccctgctcctgcctctcctcctcatagtcatcgacctctctgactctgctgggattggctttcgccacctgccccactggaacacccgctgtcctctggcctcccacacggatgacagtttcactggtcttcaacggggcctcttccacctcctggtgcagaaatccaaaaagtcttccacattcaagttctataggagacacaagatgccagcacctgctcagaggaagctgctgcctcgtcgtcacctgtctgagaagagccatcacatttccatcccctccccagacatctcccacaagggacttcgctctaaaaggacccaaccttcggatccagagacatgggaaagtcttcccagattggactcacaaaggcatggaggacccgagttctcctttgatttgctgcctgaggcccgggctattcgggtgaccatatcttcaggccctgaggtcagcgtgcgtctttgtcaccagtgggcactggagtgtgaag

SEQ ID NO: 143888 - DNA, 2158 bp, Homo sapiens
  Payload ID: 8431
  Gene Symbol: IL17RE
  Gene Name: interleukin 17 receptor E
  ENST ID: ENST00000421412
  CDS Start-End: 19-2121
ggtgcgtcccccaacctgatgctagcccctttcctgttacttctcacccacagcaggagccccttgtctttcaggccatgcagccatgttccgggagccctaattgcacagaagcccatggggagctccagactggcagccctgctcctgcctctcctcctcatagtcatcgacctctctgactctgctgggattggctttcgccacctgccccactggaacacccgctgtcctctggcctcccacacggatgacagtttcactggaagttctgcctatatcccttgccgcacctggtgggccctcttctccacaaagccttggtgtgtgcgagtctggcactgttcccgctgtttgtgccagcatctgctgtcaggtggctcaggtcttcaacggggcctcttccacctcctggtgcagaaatccaaaaagtcttccacattcaagttctataggagacacaagatgccagcacctgctcagaggaagctgctgcctcgtcgtcacctgtctgagaagagccatcacatttccatcccctccccagacatctcccacaagggacttcgctctaaaaggacccaaccttcggatccagagacatgggaaagtcttcccagattggactcacaaaggcatggaggacccgagttctcctttgatttgctgcctgaggcccgggctattcgggtgaccatatcttcaggccctgaggtcagcgtgcgtctttgtcaccagtgggcactggagtgtgaagagctgagcagtccctatgatgtccagaaaattgtgtctgggggccacactgtagagctgccttatgaattccttctgccctgtctgtgcatagaggcatcctacctgcaagaggacactgtgaggcgcaaaaaatgtcccttccagagctggccagaagcctatggctcggacttctggaagtcagtgcacttcactgactacagccagcacactcagatggtcatggccctgacactccgctgcccactgaagctggaagctgccctctgccagaggcacgactggcataccctttgcaaagacctcccgaatgccacagctcgagagtcagatgggtggtatgttttggagaaggtggacctgcacccccagctctgcttcaagttctcttttggaaacagcagccatgttgaatgcccccaccagactgggtctctcacatcctggaatgtaagcatggatacccaagcccagcagctgattcttcacttctcctcaagaatgcatgccaccttcagtgctgcctggagcctcccaggcttggggcaggacactttggtgccccccgtgtacactgtcagccaggcccggggctcaagcccagtgtcactagacctcatcattcccttcctgaggccagggtgctgtgtcctggtgtggcggtcagatgtccagtttgcctggaagcacctcttgtgtccggatgtctcttacagacacctggggctcttgatcctggcactgctggccctcctcaccctactgggtgttgttctggccctcacctgccggcgcccacagtcaggcccgggcccagcgcggccagtgctcctcctgcacgcggcggactcggaggcgcagcggcgcctggtgggagcgctggctgaactgctacgggcagcgctgggcggcgggcgcgacgtgatcgtggacctgtgggaggggaggcacgtggcgcgcgtgggcccgctgccgtggctctgggcggcgcggacgcgcgtagcgcgggagcagggcactgtgctgctgctgtggagcggcgccgaccttcgcccggtcagcggccccgacccccgcgccgcgcccctgctcgccctgctccacgctgccccgcgcccgctgctgctgctcgcttacttcagtcgcctctgcgccaagggcgacatccccccgccgctgcgcgccctgccgcgctaccgcctgctgcgcgacctgccgcgtctgctgcgggcgctggacgcgcggcctttcgcagaggccaccagctggggccgccttggggcgcggcagcgcaggcagagccgcctagagctgtgcagccggctcgaacgagaggccgcccgacttgcagacctaggttgagcagagctccaccgcagtcccgggtgtctgcggccgc

SEQ ID NO: 143889 - DNA, 952 bp, Homo sapiens
  Payload ID: 8431
  Gene Symbol: IL17RE
  Gene Name: interleukin 17 receptor E
  ENST ID: ENST00000444427
  CDS Start-End: 86-658
gtgttcgctgctgcacagcaaggccctgccacccaccttcaggccatgcagccatgttccgggagccctaattgcacagaagcccatggggagctccagactggcagccctgctcctgcctctcctcctcatagtcatcgacctctctgactctgctgggattggctttcgccacctgccccactggaacacccgctgtcctctggcctcccacacgaggaagctgctgcctcgtcgtcacctgtctgagaagagccatcacatttccatcccctccccagacatctcccacaagggacttcgctctaaaaggacccaaccttcggatccagagacatgggaaagtcttcccagattggactcacaaaggcatggaggacccgagttctcctttgatttgctgcctgaggcccgggctattcgggtgaccatatcttcaggccctgaggtcagcgtgcgtctttgtcaccagtgggcactggagtgtgaagagctgagcagtccctatgatgtccagaaaattgtgtctgggggccacactgtagagctgccttatgaattccttctgccctgtctgtgcatagagatggctcggacttctggaagtcagtgcacttcactgactacagccagcacactcagatggtcatggccctgacactccgctgcccactgaagctggaagctgccctctgccagaggcacgactggcataccctttgcaaagacctcccgaatgccacagctcgagagtcagatgggtggtatgttttggagaaggtggacctgcacccccagctctgcttcaagttctcttttggaaacagcagccatgttgaatgcccccaccagactgggtctctcacatcctggaatgtaagcatggatacccaagcccagcagctgattcttcacttctcctcaagaatgcatgccaccttcagtgctgcct

SEQ ID NO: 143890 - DNA, 2541 bp, Homo sapiens
  Payload ID: 8431
  Gene Symbol: IL17RE
  Gene Name: interleukin 17 receptor E
  ENST ID: ENST00000434065
  CDS Start-End: 86-526
gtgttcgctgctgcacagcaaggccctgccacccaccttcaggccatgcagccatgttccgggagccctaattgcacagaagcccatggggagctccagactggcagccctgctcctgcctctcctcctcatagtcatcgacctctctgactctgctgggattggctttcgccacctgccccactggaacacccgctgtcctctggcctcccacacggtcttcaacggggcctcttccacctcctggtgcagaaatccaaaaagtcttccacattcaagttctataggagacacaagatgccagcacctgctcagaggaagctgctgcctcgtcgtcacctgtctgagaagagccatcacatttccatcccctccccagacatctcccacaagggacttcgctctaaaaggacccaaccttcggatccagagacatgggaaagtcttcccagattggactcacaaaggcatggaggacccgagttctcctttgatttgctgcctgaggcccgggctattcgggtgaccatatcttcaggccctgaggtcagcgtgcgtctttgtcaccagtgggcactggagtgtgaagagctgagcagtccctatgatgtccagaaaattgtgtctgggggccacactgtagagctgccttatgaattccttctgccctgtctgtgcatagaggcatcctacctgcaagaggacactgtgaggcgcaaaaaatgtcccttccagagctggccagaagcctatggctcggacttctggaagtcagtgcacttcactgactacagccagcacactcagatggtcatggccctgacactccgctgcccactgaagctggaagctgccctctgccagaggcacgactggcataccctttgcaaagacctcccgaatgccacagctcgagagtcagatgggtggtatgttttggagaaggtggacctgcacccccagctctgcttcaagttctcttttggaaacagcagccatgttgaatgcccccaccagactgggtctctcacatcctggaatgtaagcatggatacccaagcccagcagctgattcttcacttctcctcaagaatgcatgccaccttcagtgctgcctggagcctcccaggcttggggcaggacactttggtgccccccgtgtacactgtcagccaggcccggggctcaagcccagtgtcactagacctcatcattcccttcctgaggccagggtgctgtgtcctggtgtggcggtcagatgtccagtttgcctggaagcacctcttgtgtccggatgtctcttacagacacctggggctcttgatcctggcactgctggccctcctcaccctactgggtgttgttctggccctcacctgccggcgcccacagtcaggcccgggcccagcgcggccagtgctcctcctgcacgcggcggactcggaggcgcagcggcgcctggtgggagcgctggctgaactgctacgggcagcgctgggcggcgggcgcgacgtgatcgtggacctgtgggaggggaggcacgtggcgcgcgtgggcccgctgccgtggctctgggcggcgcggacgcgcgtagcgcgggagcagggcactgtgctgctgctgtggagcggcgccgaccttcgcccggtcagcggccccgacccccgcgccgcgcccctgctcgccctgctccacgctgccccgcgcccgctgctgctgctcgcttacttcagtcgcctctgcgccaagggcgacatccccccgccgctgcgcgccctgccgcgctaccgcctgctgcgcgacctgccgcgtctgctgcgggcgctggacgcgcggcctttcgcagaggccaccagctggggccgccttggggcgcggcagcgcaggcagagccgcctagagctgtgcagccggctcgaacgagaggccgcccgacttgcagacctaggttgagcagagctccaccgcagtcccgggtgtctgcggccgcaacgcaacggacactggctggaaccccggaatgagccttcgaccctgaaatccttggggtgcctcgaggacgactggccgaaaagccgcattccctgcctcacaggccggaagtcccagcccagtccccgcgcgcgtccctcttcctcctcatactttcccttgactgagagctcctctaacccctgttctgatgggggagggcggtcttcccacttcctctccagaactccagaaagagcagtgtgcttatgcttcagtccaggctggagaggttggggccggggtagggaggcaggagccatgtcagttctgaaggagggtgaggcggtgggggattgcagggggcggctgagagaaaacctccttgggggccagggattccctttcccactctgaggctctggccagagggagagaggactctggacctaggaaaagaggcttttggctccaggtggtcaggacagtgggggttgggggtggggtgggtgggtgctggcggtggggaccaagatccggaaagatgaataaagacaaacatgacaaact

SEQ ID NO: 143891 - DNA, 3500 bp, Homo sapiens
  Payload ID: 8432
  Gene Symbol: IL17REL
  Gene Name: interleukin 17 receptor E-like
  Uniprot ID: Q6ZVW7
  ENST ID: ENST00000341280
  CDS Start-End: 98-1108
ctcacccctctcactgttctgtccccagggctttgcctgcaggagccacaggaaccggaacatttttaacagcttctgccggccacgccccgtgtccatgtccaggtcagtcctggaggccctgacgtcctccactgccatgcagtgtgtcccctctgacggctgcgcgatgctcctgcgtgtacgcgcctccatcaccctgcatgagcgcctgcggggcctggaggcctgtgccatgagcctggacacccaggagacgcagtgtcagagcgtgtgggtggccagggcctcccaccggcagcagggggggcagcagctccaagtgcactttggctgctttgcggtgagcgtggcccagcacctctatgtcaccctgaggaccatccctcatttctgcggggtccagctggaccagaggcacctcgtggaagcggggaagctcagctactgggtggaccggaggcgcaaggcgattctggtgcaagtgcccagggcctccgggagccccgactactacctgcggctctgcctcaagcggttcacctgcgaggacgccggcgcccctgtgcgagtgaccgccaacagcgtctcccaggccgtcttcctgccctacagccaggagctgccgtgcctgtgcctggagggctggtctgcgacccctgacgcggtgcggatccagatctgcccctttgaaaacgacactgaggcactggaggtgctgtgggacacggtctactaccacccggagagccagacactgagctgggagcccgcctgccctgtgagtggccatgtgagcctgtgctggcgcccggggccgggggccggctgccgtaagctgcagcaatccagccagctggtgcatcgcagagtgcagtacccgctggtggacacccagccccagctctgcctgaagttctctaccagttgggggtcctgggtgcggtgccctttcgaacagcgtcgcttcccaaccccgcccacttccaggtgcacctgtgtcacaggaggaagtcacagctccctgcctgccaacgcacactccaggccagcccgctcccttcagcctcaggtgacctggcagccgcccctgcttttgccttcctagaccttcccagggaggaggcctgtgccccaggcatctgcatccagggctggaggaccgatgtacacttctccgtcccccagcagctctgcaacctccgctccagtgggtgcccatctctcaggggccgcaggaggccgaggactagacctaggcctcccacggcaggctgggcgtggcgtgcactgaacaggagactgggtgggggaaacggggagaccatccggccctgagtcaggtcaggcttctgcgccaaacccaggtctgtgcccagcactgccctccagccttgcatttccctccaccacacaccgctgggcctcccgcacgcccaccctggtctcactgtcactggccttgcctcctcctccctgggggtccaccttccctgatcagagctctggttccaaccgccagtgacttgggatgtccctttgcccaccagccactgaggcccaggctcccaggacccagggtacatcaggacaggactctgcccagtggacagaactaagcacatgtggcctgggtgtggtcaggagcgtggctctgccttggagtccaggaagggtcagagctggcactcctacctgcacccctccctgtgagcaaaagagcttgcctagcttcgggtggggtgaaccgcaacagccacagaggtgggaggggtgggagggggtggataggacagcctggcacccagggcctctggagaccctttccagggagcaccagtgggccaggcaggggtctctggaatgtctcctcagctcagctgagccacagccatttcagggcagcctgctgcccacaggacatgcccagggccgtggcagtacccgcagaccttcagctcccccttctcccagcaagactttttggccaagcctaggtccccctccctagcaaaggtcacctccagcagatcacagactaaaggggcaatggccacctgctggtcaggtgtccctggggctggcacctgccactgtggagtgcccatgctatgctgggcaagtccacggccccagggacaggcctggaggcagcaggaggaccgggcctggctcaggtggggggatctgggggtcatacacactcctcttggggccagggtgggctcctccttcacttgtctgctgagcctccctgcagatggaaggctgctgtccacagccactggcaccccaggactgggcagccccctccccttccctcacatgtctcagcctcgcacagtgggggcagggctgggaggtggtgtcccagccagtaccacccctacgtctctctccagctgcacccacccacatgggacggcagcctgaggccaggaatctcctcacgaacaagtaggtgccagggacacattgctggggggcaggaggccaaggcacagcctcggacagctgagccaggcccccctccgagagtgtggggtgttctcacctgactgtggggcctaggcacctgctggctgtcctggggctacagctccatggggccctcaggggctctgggtcacataaaagaccttcagccctgtcctgagtcccctgggaacagcaggagctgggtgggctaccccttccccggatggcccaggtgctggaccccagcctccctctcagacaattcatggtcatggccactgtccctggccctgaagacaaggccctggcagctgcctggagcttccccagtgctctggggtgcagggtgcaaccccacccttcctgtagctgatcaggcccgaggtggtcaaggatcaccccagtttctgcccagggcaccccacactggctggagtccacctctcctgtctgtgcatccttgggtgctgagcttcactggggcacccgccccactcggacccctccagagggtctcagcttccccagatcccagccccactcacccagcaacggtcagtcacttcctgtggtctcagaggccacctgcctgggggccacctgctgggatgtgcggttctcagacattccaagtggcacatccaggtcccagccaggggtgcccagcagtggcctgtgcagtgggccatggggtcggcccttgaagacttctcgtgtgggtcacgtaggctctccggcttccccgctgagccaccctctggagcctggacatcgtctcacctgagtgctgtgcaggaccacatgcccagcctgtcccagcggtggtcgcaccccatctgcagatgcactcccaccgcagtctgggcccaggctgccctcttccagctggccgtgggccgctgggccttcttttccctcctgcaacagaggctgctatgtcccatagactggagagggggctgcagagcgagtaagtccccgccactcagtaaacattggtccaggggtagctgttaaaatgg

SEQ ID NO: 143892 - DNA, 3668 bp, Homo sapiens
  Payload ID: 8432
  Gene Symbol: IL17REL
  Gene Name: interleukin 17 receptor E-like
  Uniprot ID: Q6ZVW7
  ENST ID: ENST00000389983
  CDS Start-End: 266-1276
actgcacagccagatgctggctgggcaagcactcgcgttcttgggcctgacctggggcactttccagagcctggccatcccccggattacagaatgtggcctctcctgttctcagttacacagaatataagttgctgatttcccaggtttcggatcgttctgtctcccccttctcggaatgtgagctcctggagagggctttgcctgcaggagccacaggaaccggaacatttttaacagcttctgccggccacgccccgtgtccatgtccaggtcagtcctggaggccctgacgtcctccactgccatgcagtgtgtcccctctgacggctgcgcgatgctcctgcgtgtacgcgcctccatcaccctgcatgagcgcctgcggggcctggaggcctgtgccatgagcctggacacccaggagacgcagtgtcagagcgtgtgggtggccagggcctcccaccggcagcagggggggcagcagctccaagtgcactttggctgctttgcggtgagcgtggcccagcacctctatgtcaccctgaggaccatccctcatttctgcggggtccagctggaccagaggcacctcgtggaagcggggaagctcagctactgggtggaccggaggcgcaaggcgattctggtgcaagtgcccagggcctccgggagccccgactactacctgcggctctgcctcaagcggttcacctgcgaggacgccggcgcccctgtgcgagtgaccgccaacagcgtctcccaggccgtcttcctgccctacagccaggagctgccgtgcctgtgcctggagggctggtctgcgacccctgacgcggtgcggatccagatctgcccctttgaaaacgacactgaggcactggaggtgctgtgggacacggtctactaccacccggagagccagacactgagctgggagcccgcctgccctgtgagtggccatgtgagcctgtgctggcgcccggggccgggggccggctgccgtaagctgcagcaatccagccagctggtgcatcgcagagtgcagtacccgctggtggacacccagccccagctctgcctgaagttctctaccagttgggggtcctgggtgcggtgccctttcgaacagcgtcgcttcccaaccccgcccacttccaggtgcacctgtgtcacaggaggaagtcacagctccctgcctgccaacgcacactccaggccagcccgctcccttcagcctcaggtgacctggcagccgcccctgcttttgccttcctagaccttcccagggaggaggcctgtgccccaggcatctgcatccagggctggaggaccgatgtacacttctccgtcccccagcagctctgcaacctccgctccagtgggtgcccatctctcaggggccgcaggaggccgaggactagacctaggcctcccacggcaggctgggcgtggcgtgcactgaacaggagactgggtgggggaaacggggagaccatccggccctgagtcaggtcaggcttctgcgccaaacccaggtctgtgcccagcactgccctccagccttgcatttccctccaccacacaccgctgggcctcccgcacgcccaccctggtctcactgtcactggccttgcctcctcctccctgggggtccaccttccctgatcagagctctggttccaaccgccagtgacttgggatgtccctttgcccaccagccactgaggcccaggctcccaggacccagggtacatcaggacaggactctgcccagtggacagaactaagcacatgtggcctgggtgtggtcaggagcgtggctctgccttggagtccaggaagggtcagagctggcactcctacctgcacccctccctgtgagcaaaagagcttgcctagcttcgggtggggtgaaccgcaacagccacagaggtgggaggggtgggagggggtggataggacagcctggcacccagggcctctggagaccctttccagggagcaccagtgggccaggcaggggtctctggaatgtctcctcagctcagctgagccacagccatttcagggcagcctgctgcccacaggacatgcccagggccgtggcagtacccgcagaccttcagctcccccttctcccagcaagactttttggccaagcctaggtccccctccctagcaaaggtcacctccagcagatcacagactaaaggggcaatggccacctgctggtcaggtgtccctggggctggcacctgccactgtggagtgcccatgctatgctgggcaagtccacggccccagggacaggcctggaggcagcaggaggaccgggcctggctcaggtggggggatctgggggtcatacacactcctcttggggccagggtgggctcctccttcacttgtctgctgagcctccctgcagatggaaggctgctgtccacagccactggcaccccaggactgggcagccccctccccttccctcacatgtctcagcctcgcacagtgggggcagggctgggaggtggtgtcccagccagtaccacccctacgtctctctccagctgcacccacccacatgggacggcagcctgaggccaggaatctcctcacgaacaagtaggtgccagggacacattgctggggggcaggaggccaaggcacagcctcggacagctgagccaggcccccctccgagagtgtggggtgttctcacctgactgtggggcctaggcacctgctggctgtcctggggctacagctccatggggccctcaggggctctgggtcacataaaagaccttcagccctgtcctgagtcccctgggaacagcaggagctgggtgggctaccccttccccggatggcccaggtgctggaccccagcctccctctcagacaattcatggtcatggccactgtccctggccctgaagacaaggccctggcagctgcctggagcttccccagtgctctggggtgcagggtgcaaccccacccttcctgtagctgatcaggcccgaggtggtcaaggatcaccccagtttctgcccagggcaccccacactggctggagtccacctctcctgtctgtgcatccttgggtgctgagcttcactggggcacccgccccactcggacccctccagagggtctcagcttccccagatcccagccccactcacccagcaacggtcagtcacttcctgtggtctcagaggccacctgcctgggggccacctgctgggatgtgcggttctcagacattccaagtggcacatccaggtcccagccaggggtgcccagcagtggcctgtgcagtgggccatggggtcggcccttgaagacttctcgtgtgggtcacgtaggctctccggcttccccgctgagccaccctctggagcctggacatcgtctcacctgagtgctgtgcaggaccacatgcccagcctgtcccagcggtggtcgcaccccatctgcagatgcactcccaccgcagtctgggcccaggctgccctcttccagctggccgtgggccgctgggccttcttttccctcctgcaacagaggctgctatgtcccatagactggagagggggctgcagagcgagtaagtccccgccactcagtaaacattggtccaggggtagctgttaaaatgg

SEQ ID NO: 143893 - DNA, 1859 bp, Homo sapiens
  Payload ID: 8433
  Gene Symbol: IL17A
  Gene Name: interleukin 17A
  Uniprot ID: Q16552
  ENST ID: ENST00000340057
  CDS Start-End: 46-513
gcaggcacaaactcatccatccccagttgattggaagaaacaacgatgactcctgggaagacctcattggtgtcactgctactgctgctgagcctggaggccatagtgaaggcaggaatcacaatcccacgaaatccaggatgcccaaattctgaggacaagaacttcccccggactgtgatggtcaacctgaacatccataaccggaataccaataccaatcccaaaaggtcctcagattactacaaccgatccacctcaccttggaatctccaccgcaatgaggaccctgagagatatccctctgtgatctgggaggcaaagtgccgccacttgggctgcatcaacgctgatgggaacgtggactaccacatgaactctgtccccatccagcaagagatcctggtcctgcgcagggagcctccacactgccccaactccttccggctggagaagatactggtgtccgtgggctgcacctgtgtcaccccgattgtccaccatgtggcctaagagctctggggagcccacactccccaaagcagttagactatggagagccgacccagcccctcaggaaccctcatccttcaaagacagcctcatttcggactaaactcattagagttcttaaggcagtttgtccaattaaagcttcagaggtaacacttggccaagatatgagatctgaattacctttccctctttccaagaaggaaggtttgactgagtaccaatttgcttcttgtttacttttttaagggctttaagttatttatgtatttaatatgccctgagataactttggggtataagattccattttaatgaattacctactttattttgtttgtctttttaaagaagataagattctgggcttgggaattttattatttaaaaggtaaaacctgtatttatttgagctatttaaggatctatttatgtttaagtatttagaaaaaggtgaaaaagcactattatcagttctgcctaggtaaatgtaagatagaattaaatggcagtgcaaaatttctgagtctttacaacatacggatatagtatttcctcctctttgtttttaaaagttataacatggctgaaaagaaagattaaacctactttcatatgtattaatttaaattttgcaatttgttgaggttttacaagagatacagcaagtctaactctctgttccattaaacccttataataaaatccttctgtaataataaagtttcaaaagaaaatgtttatttgttctcattaaatgtattttagcaaactcagctcttccctattgggaagagttatgcaaattctcctataagcaaaacaaagcatgtctttgagtaacaatgacctggaaatacccaaaattccaagttctcgatttcacatgccttcaagactgaacaccgactaaggttttcatactattagccaatgctgtagacagaagcattttgataggaatagagcaaataagataatggccctgaggaatggcatgtcattattaaagatcatatggggaaaatgaaaccctccccaaaatacaagaagttctgggaggagacattgtcttcagactacaatgtccagtttctcccctagactcaggcttcctttggagattaaggcccctcagagatcaacagaccaacatttttctcttcctcaagcaacactcctagggcctggcttctgtctgatcaaggcaccacacaacccagaaaggagctgatggggcagaacgaactttaagtatgagaaaagttcagcccaagtaaaataaaaactcaatcacattcaattccagagtagtttcaagtttcacatcgtaaccattttcgccc

SEQ ID NO: 143894 - DNA, 696 bp, Homo sapiens
  Payload ID: 8434
  Gene Symbol: IL17B
  Gene Name: interleukin 17B
  Uniprot ID: Q9UHF5
  ENST ID: ENST00000261796
  CDS Start-End: 52-594
ctggggttccaggcgggcagcagctgcaggctgaccttgcagcttggcggaatggactggcctcacaacctgctgtttcttcttaccatttccatcttcctggggctgggccagcccaggagccccaaaagcaagaggaaggggcaagggcggcctgggcccctggcccctggccctcaccaggtgccactggacctggtgtcacggatgaaaccgtatgcccgcatggaggagtatgagaggaacatcgaggagatggtggcccagctgaggaacagctcagagctggcccagagaaagtgtgaggtcaacttgcagctgtggatgtccaacaagaggagcctgtctccctggggctacagcatcaaccacgaccccagccgtatccccgtggacctgccggaggcacggtgcctgtgtctgggctgtgtgaaccccttcaccatgcaggaggaccgcagcatggtgagcgtgccggtgttcagccaggttcctgtgcgccgccgcctctgcccgccaccgccccgcacagggccttgccgccagcgcgcagtcatggagaccatcgctgtgggctgcacctgcatcttctgaatcacctggcccagaagccaggccagcagcccgagaccatcctccttgcacctttgtgccaagaaaggcctatgaaaagtaaacactgacttttgaaagcaa

SEQ ID NO: 143895 - DNA, 1044 bp, Homo sapiens
  Payload ID: 8435
  Gene Symbol: IL17C
  Gene Name: interleukin 17C
  Uniprot ID: Q9P0M4
  ENST ID: ENST00000244241
  CDS Start-End: 50-643
gccaggtgtgcaggccgctccaagcccagcctgccccgctgccgccaccatgacgctcctccccggcctcctgtttctgacctggctgcacacatgcctggcccaccatgacccctccctcagggggcacccccacagtcacggtaccccacactgctactcggctgaggaactgcccctcggccaggcccccccacacctgctggctcgaggtgccaagtgggggcaggctttgcctgtagccctggtgtccagcctggaggcagcaagccacagggggaggcacgagaggccctcagctacgacccagtgcccggtgctgcggccggaggaggtgttggaggcagacacccaccagcgctccatctcaccctggagataccgtgtggacacggatgaggaccgctatccacagaagctggccttcgccgagtgcctgtgcagaggctgtatcgatgcacggacgggccgcgagacagctgcgctcaactccgtgcggctgctccagagcctgctggtgctgcgccgccggccctgctcccgcgacggctcggggctccccacacctggggcctttgccttccacaccgagttcatccacgtccccgtcggctgcacctgcgtgctgccccgttcagtgtgaccgccgaggccgtggggcccctagactggacacgtgtgctccccagagggcaccccctatttatgtgtatttattgttatttatatgcctcccccaacactacccttggggtctgggcattccccgtgtctggaggacagccccccactgttctcctcatctccagcctcagtagttgggggtagaaggagctcagcacctcttccagcccttaaagctgcagaaaaggtgtcacacggctgcctgtaccttggctccctgtcctgctcccggcttcccttaccctatcactggcctcaggcccccgcaggctgcctcttcccaacctccttggaagtacccctgtttcttaaacaattatttaagtgtacgtgtattattaaactgatgaacacatcccc

SEQ ID NO: 143896 - DNA, 1861 bp, Homo sapiens
  Payload ID: 8436
  Gene Symbol: IL17D
  Gene Name: interleukin 17D
  Uniprot ID: Q8TAD2
  ENST ID: ENST00000304920
  CDS Start-End: 109-717
aaaatgttttcagctcctggaggcgaaaggtgcagagtcgctctgtgtccgtgaggccgggcggcgacctcgctcagtcggcttctcggtccgagtccccgggtctggatgctggtagccggcttcctgctggcgctgccgccgagctgggccgcgggcgccccgagggcgggcaggcgccccgcgcggccgcggggctgcgcggaccggccggaggagctactggagcagctgtacgggcgcctggcggccggcgtgctcagtgccttccaccacacgctgcagctggggccgcgtgagcaggcgcgcaacgcgagctgcccggcagggggcaggcccgccgaccgccgcttccggccgcccaccaacctgcgcagcgtgtcgccctgggcctacagaatctcctacgacccggcgaggtaccccaggtacctgcctgaagcctactgcctgtgccggggctgcctgaccgggctgttcggcgaggaggacgtgcgcttccgcagcgcccctgtctacatgcccaccgtcgtcctgcgccgcacccccgcctgcgccggcggccgttccgtctacaccgaggcctacgtcaccatccccgtgggctgcacctgcgtccccgagccggagaaggacgcagacagcatcaactccagcatcgacaaacagggcgccaagctcctgctgggccccaacgacgcgcccgctggcccctgaggccggtcctgccccgggaggtctccccggcccgcatcccgaggcgcccaagctggagccgcctggagggctcggtcggcgacctctgaagagagtgcaccgagcaaaccaagtgccggagcaccagcgccgcctttccatggagactcgtaagcagcttcatctgacacgggcatccctggcttgcttttagctacaagcaagcagcgtggctggaagctgatgggaaacgacccggcacgggcatcctgtgtgcggcccgcatggagggtttggaaaagttcacggaggctccctgaggagcctctcagatcggctgctgcgggtgcagggcgtgactcaccgctgggtgcttgccaaagagatagggacgcatatgctttttaaagcaatctaaaaataataataagtatagcgactatatacctacttttaaaatcaactgttttgaatagaggcagagctattttatattatcaaatgagagctactctgttacatttcttaacatataaacatcgttttttacttcttctggtagaattttttaaagcataattggaatccttggataaattttgtagctggtacactctggcctgggtctctgaattcagcctgtcaccgatggctgactgatgaaatggacacgtctcatctgacccactcttccttccactgaaggtcttcacgggcctccaggtggaccaaagggatgcacaggcggctcgcatgccccagggccagctaagagttccaaagatctcagatttggttttagtcatgaatacataaacagtctcaaactcgcacaattttttcccccttttgaaagccactggggccaatttgtggttaagaggtggtgagataagaagtggaacgtgacatctttgccagttgtcagaagaatccaagcaggtattggcttagttgtaagggctttaggatcaggctgaatatgaggacaaagtgggccacgttagcatctgcagagatcaatctggaggcttctgtttctgcattctgccacgagagctaggtccttgatcttttctttagattgaaagtctgtctctgaacacaattatttgtaaaagttagtagttcttttttaaatcattaaaagaggcttgctgaagga

SEQ ID NO: 143897 - DNA, 1285 bp, Homo sapiens
  Payload ID: 8436
  Gene Symbol: IL17D
  Gene Name: interleukin 17D
  ENST ID: ENST00000498088
  CDS Start-End: 1180-1285
tttgagtactgaaacctttattcccattttactggaaacaaagaacatgaacaatttactagtcagaaaaaaagtgttttataacccaaaacaaatatttgccaagagctgtaaattgcttaaatcgcttaaactggagatttcagtgagatttttagcagtagattactaagctccttagttatagaacattcaatgcataggaaagtgtttttcctacaaagcataactgaaatgtagtttaactaatggtttacaattcagtcaaataccaaagctgcaaaccatttagggagtcatcaattacatattttgtacactttcaaaaagcttacagctgggatgggttgtttattttcaaagcatgactgctttaaaatgatcatattctttagcctgccacctaggaagcattaagcatttacttgcagaatgaacaaacgagcacgttgtcttgtgttatgaagtatataatatagttcgttttagtttcttcattcgcagactatcaggctcatttcacgtgactgcttgcacttagaactgagttatcacggagtaggaactctccaacatcgtcgtcatagaccaagagatgcccatgaacagccatgaaagtgccagtcagggaagtattcagtgctttgttgtagagttgttggatagaggcacaggatcatttcatgttgttgaggagaaaggagcaacagcctcctcccaccttattaaaaatagagatttaaaaaaacctctaatttcctcgaagtacagaatctcaagaggtagctctaaggagaatccctctgggtttgagcgcattcctcttccagggggcctattcttggactgctttccttaatagagaaatctctctgagccaaaatcggcctcccccaattccatcctgtcggccccacttttctgcttcggagacttccaagccagtccccactcctccttcagccagtcgggcccgcacccgcgcccggcagggccagccctctcctcctcctgcgtggcgcagcacaggccctgagcgcgcgaccccaggccctgggcgccccgccgcatgctcgcggctggaagccccagtttgcgtggcccttcgggttattccgctcaagagccgccgcgtcgccccatctcggcgcgaatctgaaagcgctttcgggggagaagatgttgggggcactggtctggatgctggtagccggcttcctgctggcgctgccgccgagctgggccgcgggcgccccgagggcgggcaggcgccccgcgcggccgc

SEQ ID NO: 143898 - DNA, 535 bp, Homo sapiens
  Payload ID: 8436
  Gene Symbol: IL17D
  Gene Name: interleukin 17D
  ENST ID: ENST00000468605
  CDS Start-End: 1-271
gcggccgcggggctgcgcggaccggccggaggagctactggagcagctgtacgggcgcctggcggccggcgtgctcagtgccttccaccacacgctgcagctggggccgcgtgagcaggcgcgcaacgcgagctgcccggcagggggcaggcccgccgaccgccgcttccggccgcccaccaacctgcgcagcgtgtcgccctgggcctacagctcagtttccatcacctctaatcatccctggaggactcgtcctttgttcctggattaagccgggccacctgtcactcgctcaagccaagcttcccacgtggccagggacacttctgcgatcccatcagaggggaaaacttgatgtgtttcaagaatgccctggtgccaagcttctgcagagcagcacgcagaaaatgtgaagacaaaagaatgactgcccacaggaggcgcggcacagggcagaactctgctcggttgcttgtccgtgtttgaatctcctacgacccggcgaggtaccccaggtacctgcctgaagcctact

SEQ ID NO: 143899 - DNA, 850 bp, Homo sapiens
  Payload ID: 8437
  Gene Symbol: IL17F
  Gene Name: interleukin 17F
  Uniprot ID: Q96PD4
  ENST ID: ENST00000336123
  CDS Start-End: 109-600
atgattgctataaaactaacaggtactctcattgatagaacacaggcatacacaggaagatacattcacagaaagagcttcctgcacaaagtaagccaccagcgcaacatgacagtgaagaccctgcatggcccagccatggtcaagtacttgctgctgtcgatattggggcttgcctttctgagtgaggcggcagctcggaaaatccccaaagtaggacatacttttttccaaaagcctgagagttgcccgcctgtgccaggaggtagtatgaagcttgacattggcatcatcaatgaaaaccagcgcgtttccatgtcacgtaacatcgagagccgctccacctccccctggaattacactgtcacttgggaccccaaccggtacccctcggaagttgtacaggcccagtgtaggaacttgggctgcatcaatgctcaaggaaaggaagacatctccatgaattccgttcccatccagcaagagaccctggtcgtccggaggaagcaccaaggctgctctgtttctttccagttggagaaggtgctggtgactgttggctgcacctgcgtcacccctgtcatccaccatgtgcagtaagaggtgcatatccactcagctgaagaagctgtagaaatgccactccttacccagtgctctgcaacaagtcctgtctgacccccaattccctccacttcacaggactcttaataagacctgcacggatggaaacagaaaatattcacaatgtatgtgtgtatgtactacactttatatttgatatctaaaatgttaggagaaaaattaatatattcagtgctaatataataaagtattaataatttaaaaa

SEQ ID NO: 143900 - DNA, 1147 bp, Homo sapiens
  Payload ID: 8438
  Gene Symbol: IL18
  Gene Name: interleukin 18
  Uniprot ID: Q14116
  ENST ID: ENST00000280357
  CDS Start-End: 221-802
attctctccccagcttgctgagccctttgctcccctggcgactgcctggacagtcagcaaggaattgtctcccagtgcattttgccctcctggctgccaactctggctgctaaagcggctgccacctgctgcagtctacacagcttcgggaagaggaaaggaacctcagaccttccagatcgcttcctctcgcaacaaactatttgtcgcaggaataaagatggctgctgaaccagtagaagacaattgcatcaactttgtggcaatgaaatttattgacaatacgctttactttatagctgaagatgatgaaaacctggaatcagattactttggcaagcttgaatctaaattatcagtcataagaaatttgaatgaccaagttctcttcattgaccaaggaaatcggcctctatttgaagatatgactgattctgactgtagagataatgcaccccggaccatatttattataagtatgtataaagatagccagcctagaggtatggctgtaactatctctgtgaagtgtgagaaaatttcaactctctcctgtgagaacaaaattatttcctttaaggaaatgaatcctcctgataacatcaaggatacaaaaagtgacatcatattctttcagagaagtgtcccaggacatgataataagatgcaatttgaatcttcatcatacgaaggatactttctagcttgtgaaaaagagagagacctttttaaactcattttgaaaaaagaggatgaattgggggatagatctataatgttcactgttcaaaacgaagactagctattaaaatttcatgccgggcgcagtggctcacgcctgtaatcccagccctttgggaggctgaggcgggcagatcaccagaggtcaggtgttcaagaccagcctgaccaacatggtgaaacctcatctctactaaaaatacaaaaaattagctgagtgtagtgacgcatgccctcaatcccagctactcaagaggctgaggcaggagaatcacttgcactccggaggtagaggttgtggtgagccgagattgcaccattgcgctctagcctgggcaacaacagcaaaactccatctcaaaaaataaaataaataaataaacaaataaaaaattcataatgtgaa

SEQ ID NO: 143901 - DNA, 795 bp, Homo sapiens
  Payload ID: 8438
  Gene Symbol: IL18
  Gene Name: interleukin 18
  Uniprot ID: Q14116
  ENST ID: ENST00000528832
  CDS Start-End: 214-795
gctcccctggcgactgcctggacagtcagcaaggaattgtctcccagtgcattttgccctcctggctgccaactctggctgctaaagcggctgccacctgctgcagtctacacagcttcgggaagaggaaaggaacctcagaccttccagatcgcttcctctcgcaacaaactatttgtcgcagatggctctttgctttcattaggaataaagatggctgctgaaccagtagaagacaattgcatcaactttgtggcaatgaaatttattgacaatacgctttactttatagctgaagatgatgaaaacctggaatcagattactttggcaagcttgaatctaaattatcagtcataagaaatttgaatgaccaagttctcttcattgaccaaggaaatcggcctctatttgaagatatgactgattctgactgtagagataatgcaccccggaccatatttattataagtatgtataaagatagccagcctagaggtatggctgtaactatctctgtgaagtgtgagaaaatttcaactctctcctgtgagaacaaaattatttcctttaaggaaatgaatcctcctgataacatcaaggatacaaaaagtgacatcatattctttcagagaagtgtcccaggacatgataataagatgcaatttgaatcttcatcatacgaaggatactttctagcttgtgaaaaagagagagacctttttaaactcattttgaaaaaagaggatgaattgggggatagatctataatgttcactgttcaaaacgaagactag

SEQ ID NO: 143902 - DNA, 1090 bp, Homo sapiens
  Payload ID: 8438
  Gene Symbol: IL18
  Gene Name: interleukin 18
  Uniprot ID: Q14116
  ENST ID: ENST00000524595
  CDS Start-End: 178-747
gcctggacagtcagcaaggaattgtctcccagtgcattttgccctcctggctgccaactctggctgctaaagcggctgccacctgctgcagtctacacagcttcgggaagaggaaaggaacctcagaccttccagatcgcttcctctcgcaacaaactatttgtcgcaggaataaagatggctgctgaaccagtagaagacaattgcatcaactttgtggcaatgaaatttattgacaatacgctttactttatagaaaacctggaatcagattactttggcaagcttgaatctaaattatcagtcataagaaatttgaatgaccaagttctcttcattgaccaaggaaatcggcctctatttgaagatatgactgattctgactgtagagataatgcaccccggaccatatttattataagtatgtataaagatagccagcctagaggtatggctgtaactatctctgtgaagtgtgagaaaatttcaactctctcctgtgagaacaaaattatttcctttaaggaaatgaatcctcctgataacatcaaggatacaaaaagtgacatcatattctttcagagaagtgtcccaggacatgataataagatgcaatttgaatcttcatcatacgaaggatactttctagcttgtgaaaaagagagagacctttttaaactcattttgaaaaaagaggatgaattgggggatagatctataatgttcactgttcaaaacgaagactagctattaaaatttcatgccgggcgcagtggctcacgcctgtaatcccagccctttgggaggctgaggcgggcagatcaccagaggtcaggtgttcaagaccagcctgaccaacatggtgaaacctcatctctactaaaaatacaaaaaattagctgagtgtagtgacgcatgccctcaatcccagctactcaagaggctgaggcaggagaatcacttgcactccggaggtagaggttgtggtgagccgagattgcaccattgcgctctagcctgggcaacaacagcaaaactccatctcaaaaaataaaataaataaataaacaaataaaaaattcataatgtg

SEQ ID NO: 143903 - DNA, 1354 bp, Homo sapiens
  Payload ID: 8439
  Gene Symbol: IL18BP
  Gene Name: interleukin 18 binding protein
  Uniprot ID: O95998
  ENST ID: ENST00000260049
  CDS Start-End: 105-689
aagcagctctggtgctgaagagagcactgcctccctgtgtgactggagaagaggacgttgtcacagataaagagccaggctcaccagctcctgacgcatgcatcatgaccatgagacacaactggacaccagacctcagccctttgtgggtcctgctcctgtgtgcccacgtcgtcactctcctggtcagagccacacctgtctcgcagaccaccacagctgccactgcctcagttagaagcacaaaggacccctgcccctcccagcccccagtgttcccagcagctaagcagtgtccagcattggaagtgacctggccagaggtggaagtgccactgaatggaacgctgagcttatcctgtgtggcctgcagccgcttccccaacttcagcatcctctactggctgggcaatggttccttcattgagcacctcccaggccgactgtgggaggggagcaccagccgggaacgtgggagcacaggtacgcagctgtgcaaggccttggtgctggagcagctgacccctgccctgcacagcaccaacttctcctgtgtgctcgtggaccctgaacaggttgtccagcgtcacgtcgtcctggcccagctctgggctgggctgagggcaaccttgccccccacccaagaagccctgccctccagccacagcagtccacagcagcagggttaagactcagcacagggccagcagcagcacaaccttgaccagagcttgggtcctacctgtctacctggagtgaacagtccctgactgcctgtaggctgcgtggatgcgcaacacaccccctccttctctgctttgggtcccttctctcaccaaattcaaactccattcccacctacctagaaaatcacagcctccttataatgcctcctcctcctgccattctctctccacctatccattagccttcctaacgtcctactcctcacactgctctactgctcagaaaccaccaagactgttgatgccttagccttgcactccagggccctacctgcatttcccacatgactttctggaagcctcccaactattcttgcttttcccagacagctcccactcccatgtctctgctcatttagtcccgtcttcctcaccgccccagcaggggaacgctcaagcctggttgaaatgctgcctcttcagtgaagtcatcctctttcagctctggccgcattctgcagacttcctatcttcgtgctgtatgttttttttttcccccttcactctaatggactgttccagggaagggatgggggcagcagctgcttcggatccacactgtatctgtgtcatccccacatgggtcctcataaaggattattcaatgg

SEQ ID NO: 143904 - DNA, 1606 bp, Homo sapiens
  Payload ID: 8439
  Gene Symbol: IL18BP
  Gene Name: interleukin 18 binding protein
  Uniprot ID: O95998
  ENST ID: ENST00000337131
  CDS Start-End: 356-940
tttcctgtggtgggttcacacgcagctagacacagctaacttgagtcttggagctcctagagggaagcttctggaaaggaaggctcttcaggacctcttaggagccagtgcctaggaaagttgtccccttgaatgtcagtgtgaaggtgaaggaggaagcagatgcctgttcatatggaaacaaagacctggctgtgaagaggggaggcggacaccaaagtcctgacacttgggcgggacagaattgatctaagcagctctggtgctgaagagagcactgcctccctgtgtgactggagaagaggacgttgtcacagataaagagccaggctcaccagctcctgacgcatgcatcatgaccatgagacacaactggacaccagacctcagccctttgtgggtcctgctcctgtgtgcccacgtcgtcactctcctggtcagagccacacctgtctcgcagaccaccacagctgccactgcctcagttagaagcacaaaggacccctgcccctcccagcccccagtgttcccagcagctaagcagtgtccagcattggaagtgacctggccagaggtggaagtgccactgaatggaacgctgagcttatcctgtgtggcctgcagccgcttccccaacttcagcatcctctactggctgggcaatggttccttcattgagcacctcccaggccgactgtgggaggggagcaccagccgggaacgtgggagcacaggtacgcagctgtgcaaggccttggtgctggagcagctgacccctgccctgcacagcaccaacttctcctgtgtgctcgtggaccctgaacaggttgtccagcgtcacgtcgtcctggcccagctctgggctgggctgagggcaaccttgccccccacccaagaagccctgccctccagccacagcagtccacagcagcagggttaagactcagcacagggccagcagcagcacaaccttgaccagagcttgggtcctacctgtctacctggagtgaacagtccctgactgcctgtaggctgcgtggatgcgcaacacaccccctccttctctgctttgggtcccttctctcaccaaattcaaactccattcccacctacctagaaaatcacagcctccttataatgcctcctcctcctgccattctctctccacctatccattagccttcctaacgtcctactcctcacactgctctactgctcagaaaccaccaagactgttgatgccttagccttgcactccagggccctacctgcatttcccacatgactttctggaagcctcccaactattcttgcttttcccagacagctcccactcccatgtctctgctcatttagtcccgtcttcctcaccgccccagcaggggaacgctcaagcctggttgaaatgctgcctcttcagtgaagtcatcctctttcagctctggccgcattctgcagacttcctatcttcgtgctgtatgttttttttttcccccttcactctaatggactgttccagggaagggatgggggcagcagctgcttcggatccacactgtatctgtgtcatccccacatgggtcctcataaaggattattcaatgga

SEQ ID NO: 143905 - DNA, 1720 bp, Homo sapiens
  Payload ID: 8439
  Gene Symbol: IL18BP
  Gene Name: interleukin 18 binding protein
  Uniprot ID: O95998
  ENST ID: ENST00000343898
  CDS Start-End: 150-641
acacgcagctagacacagctaacttgagtcttggagctcctagagggaagcttctggaaaggaaggctcttcaggacctcttaggagccagagaagaggacgttgtcacagataaagagccaggctcaccagctcctgacgcatgcatcatgaccatgagacacaactggacaccagacctcagccctttgtgggtcctgctcctgtgtgcccacgtcgtcactctcctggtcagagccacacctgtctcgcagaccaccacagctgccactgcctcagttagaagcacaaaggacccctgcccctcccagcccccagtgttcccagcagctaagcagtgtccagcattggaagtgacctggccagaggtggaagtgccactgaatggaacgctgagcttatcctgtgtggcctgcagccgcttccccaacttcagcatcctctactggctgggcaatggttccttcattgagcacctcccaggccgactgtgggaggggagcaccagccgggaacgtgggagcacaggctgggctgagggcaaccttgccccccacccaagaagccctgccctccagccacagcagtccacagcagcagggttaagactcagcacagggccagcagcagcacaaccttgaccagagcttgggtcctacctgtctacctggagtgaacagtccctgactgcctgtaggctgcgtggatgcgcaacacaccccctccttctctgctttgggtcccttctctcaccaaattcaaactccattcccacctacctagaaaatcacagcctccttataatgcctcctcctcctgccattctctctccacctatccattagccttcctaacgtcctactcctcacactgctctactgctcagaaaccaccaagactgttgatgccttagccttgcactccagggccctacctgcatttcccacatgactttctggaagcctcccaactattcttgcttttcccagacagctcccactcccatgtctctgctcatttagtcccgtcttcctcaccgccccagcaggggaacgctcaagcctggttgaaatgctgcctcttcagtgaagtcatcctctttcagctctggccgcattctgcagacttcctatcttcgtgctgtatgttttttttttcccccttcactctaatggactgttccagggaagggatgggggcagcagctgcttcggatccacactgtatctgtgtcatccccacatgggtcctcataaaggattattcaatggaggcatcctgacatctgttcatttaggcttcagttccactcccaggaactttgcctgtcccacgagggagtatgggagagagggactgccacacagaagctgaagacaacacctgcttcaggggaacacaggcgcttgaaaaagaaaagagagaacagcccataatgctccccgggagcagaggccactaatggagagtgggaagagcctggaaagatgtggcctcaggaaaagggatgagagaaaggaggtggtatggaagactcagcaggaacaaggggcttgctcaccaccttctccctggagagggcagaagaggtcacacgcagagactgctactacatcttactcacctgccaaggcttggtggccaacacccagaggaacaaattaaggaccgggaattaattcccaggggctccctggtgcccaaaggacaagagcttcca

SEQ ID NO: 143906 - DNA, 1788 bp, Homo sapiens
  Payload ID: 8439
  Gene Symbol: IL18BP
  Gene Name: interleukin 18 binding protein
  Uniprot ID: O95998
  ENST ID: ENST00000393703
  CDS Start-End: 538-1122
acctcagacatgcagctcctgtccacacttaatatatgcatgcattggatcacccagccctggtctttctgcctccatggataactgcatgaccctgagagaaaacctccttagatttagcatcctaggttcctcacacgcctcaccctgaatcctggccctcccgcagccccagcgccatttgtcccatcagtgacaagattcatattctgatgtagactctgttgccagagccagtgttgagccagtccgcctcttccccgggaagtgcctgcccttccctcctgttagggttggctctcgagcttgtgtgccagttcctgggttggccgtgagagttctacagacaaggaggaagtgctctcggtgtatttcctgtggtgggttcacacgcagctagacacagctaacttgagtcttggagctcctagagggaagcttctggaaaggaaggctcttcaggacctcttaggagccagagaagaggacgttgtcacagataaagagccaggctcaccagctcctgacgcatgcatcatgaccatgagacacaactggacaccagacctcagccctttgtgggtcctgctcctgtgtgcccacgtcgtcactctcctggtcagagccacacctgtctcgcagaccaccacagctgccactgcctcagttagaagcacaaaggacccctgcccctcccagcccccagtgttcccagcagctaagcagtgtccagcattggaagtgacctggccagaggtggaagtgccactgaatggaacgctgagcttatcctgtgtggcctgcagccgcttccccaacttcagcatcctctactggctgggcaatggttccttcattgagcacctcccaggccgactgtgggaggggagcaccagccgggaacgtgggagcacaggtacgcagctgtgcaaggccttggtgctggagcagctgacccctgccctgcacagcaccaacttctcctgtgtgctcgtggaccctgaacaggttgtccagcgtcacgtcgtcctggcccagctctgggctgggctgagggcaaccttgccccccacccaagaagccctgccctccagccacagcagtccacagcagcagggttaagactcagcacagggccagcagcagcacaaccttgaccagagcttgggtcctacctgtctacctggagtgaacagtccctgactgcctgtaggctgcgtggatgcgcaacacaccccctccttctctgctttgggtcccttctctcaccaaattcaaactccattcccacctacctagaaaatcacagcctccttataatgcctcctcctcctgccattctctctccacctatccattagccttcctaacgtcctactcctcacactgctctactgctcagaaaccaccaagactgttgatgccttagccttgcactccagggccctacctgcatttcccacatgactttctggaagcctcccaactattcttgcttttcccagacagctcccactcccatgtctctgctcatttagtcccgtcttcctcaccgccccagcaggggaacgctcaagcctggttgaaatgctgcctcttcagtgaagtcatcctctttcagctctggccgcattctgcagacttcctatcttcgtgctgtatgttttttttttcccccttcactctaatggactgttccagggaagggatgggggcagcagctgcttcggatccacactgtatctgtgtcatccccacatgggtcctcataaaggattattcaatgga

SEQ ID NO: 143907 - DNA, 1549 bp, Homo sapiens
  Payload ID: 8439
  Gene Symbol: IL18BP
  Gene Name: interleukin 18 binding protein
  Uniprot ID: O95998
  ENST ID: ENST00000393705
  CDS Start-End: 299-883
gaggaagtgctctcggtgtatttcctgtggtgggttcacacgcagctagacacagctaacttgagtcttggagctcctagagggaagcttctggaaaggaaggctcttcaggacctcttaggagccagtgtgaaggtgaaggaggaagcagatgcctgttcatatggaaacaaagacctggctgtgaagaggggaggcggacaccaaagtcctgacacttgggcgggacagaattgatctagaagaggacgttgtcacagataaagagccaggctcaccagctcctgacgcatgcatcatgaccatgagacacaactggacaccagacctcagccctttgtgggtcctgctcctgtgtgcccacgtcgtcactctcctggtcagagccacacctgtctcgcagaccaccacagctgccactgcctcagttagaagcacaaaggacccctgcccctcccagcccccagtgttcccagcagctaagcagtgtccagcattggaagtgacctggccagaggtggaagtgccactgaatggaacgctgagcttatcctgtgtggcctgcagccgcttccccaacttcagcatcctctactggctgggcaatggttccttcattgagcacctcccaggccgactgtgggaggggagcaccagccgggaacgtgggagcacaggtacgcagctgtgcaaggccttggtgctggagcagctgacccctgccctgcacagcaccaacttctcctgtgtgctcgtggaccctgaacaggttgtccagcgtcacgtcgtcctggcccagctctgggctgggctgagggcaaccttgccccccacccaagaagccctgccctccagccacagcagtccacagcagcagggttaagactcagcacagggccagcagcagcacaaccttgaccagagcttgggtcctacctgtctacctggagtgaacagtccctgactgcctgtaggctgcgtggatgcgcaacacaccccctccttctctgctttgggtcccttctctcaccaaattcaaactccattcccacctacctagaaaatcacagcctccttataatgcctcctcctcctgccattctctctccacctatccattagccttcctaacgtcctactcctcacactgctctactgctcagaaaccaccaagactgttgatgccttagccttgcactccagggccctacctgcatttcccacatgactttctggaagcctcccaactattcttgcttttcccagacagctcccactcccatgtctctgctcatttagtcccgtcttcctcaccgccccagcaggggaacgctcaagcctggttgaaatgctgcctcttcagtgaagtcatcctctttcagctctggccgcattctgcagacttcctatcttcgtgctgtatgttttttttttcccccttcactctaatggactgttccagggaagggatgggggcagcagctgcttcggatccacactgtatctgtgtcatccccacatgggtcctcataaaggattattcaatgga

SEQ ID NO: 143908 - DNA, 1037 bp, Homo sapiens
  Payload ID: 8439
  Gene Symbol: IL18BP
  Gene Name: interleukin 18 binding protein
  Uniprot ID: O95998
  ENST ID: ENST00000393707
  CDS Start-End: 59-406
agaagaggacgttgtcacagataaagagccaggctcaccagctcctgacgcatgcatcatgaccatgagacacaactggacaccagacctcagccctttgtgggtcctgctcctgtgtgcccacgtcgtcactctcctggtcagagccacacctgtctcgcagaccaccacagctgccactgcctcagttagaagcacaaaggacccctgcccctcccagcccccagtgttcccagcagctaagcagtgtccagcattggaagtgacctggccagaggtggaagtgccactgagctgggctgagggcaaccttgccccccacccaagaagccctgccctccagccacagcagtccacagcagcagggttaagactcagcacagggccagcagcagcacaaccttgaccagagcttgggtcctacctgtctacctggagtgaacagtccctgactgcctgtaggctgcgtggatgcgcaacacaccccctccttctctgctttgggtcccttctctcaccaaattcaaactccattcccacctacctagaaaatcacagcctccttataatgcctcctcctcctgccattctctctccacctatccattagccttcctaacgtcctactcctcacactgctctactgctcagaaaccaccaagactgttgatgccttagccttgcactccagggccctacctgcatttcccacatgactttctggaagcctcccaactattcttgcttttcccagacagctcccactcccatgtctctgctcatttagtcccgtcttcctcaccgccccagcaggggaacgctcaagcctggttgaaatgctgcctcttcagtgaagtcatcctctttcagctctggccgcattctgcagacttcctatcttcgtgctgtatgttttttttttcccccttcactctaatggactgttccagggaagggatgggggcagcagctgcttcggatccacactgtatctgtgtcatccccacatgggtcctcataaaggattattcaatgga

SEQ ID NO: 143909 - DNA, 2172 bp, Homo sapiens
  Payload ID: 8439
  Gene Symbol: IL18BP
  Gene Name: interleukin 18 binding protein
  Uniprot ID: O95998
  ENST ID: ENST00000404792
  CDS Start-End: 923-1507
gccagaggggctaggatgagagacagagggtgtgatggtgggtgctgggagatgtagccgaccttggggctggtggctgggggagtgggtagcctgggaaaggccaggatgtggacggactggtatggcattgagcctgaagtggtccaacttggggttccccagtgcctaggaaagttgtccccttgaatgtcagtgtgaaggtgaaggaggaagcagatgcctgttcatatggaaacaaagacctggctgtgaagaggggaggcggacaccaaagtcctgacacttgggcgggacagaattgatctgtgagagactcatctagttcataccctaggtgaccctgggggtggcatgggggtagattagagatcccagtctggtatcctctggagagtaggagtcccaggagctgaaggtttctggccactgaactttggctaaagcagaggtgtcacagctgctcaagattccctggttaaaaagtgaaagtgaaatagagggtcggggcagtgctttcccagaaggattgctcggcatcctgcccttcccagaagcagctctggtgctgaagagagcactgcctccctgtgtgactgggtgagtccatattctctctttgggtctcaattttgccttccctaatgaaggggtaagattggactaggtaagcatcttacaaccatttgtggtcatgagagctggggtggggaaggattgtcacttgacccccccagctctgtttctaagtgctgaaagagctccaggctatgctacgggaggagaagccagctactgaggaaaagccagctactgagaaaaagcgggagtggtttaccattctcctcccccacctttcaccagagaagaggacgttgtcacagataaagagccaggctcaccagctcctgacgcatgcatcatgaccatgagacacaactggacaccagacctcagccctttgtgggtcctgctcctgtgtgcccacgtcgtcactctcctggtcagagccacacctgtctcgcagaccaccacagctgccactgcctcagttagaagcacaaaggacccctgcccctcccagcccccagtgttcccagcagctaagcagtgtccagcattggaagtgacctggccagaggtggaagtgccactgaatggaacgctgagcttatcctgtgtggcctgcagccgcttccccaacttcagcatcctctactggctgggcaatggttccttcattgagcacctcccaggccgactgtgggaggggagcaccagccgggaacgtgggagcacaggtacgcagctgtgcaaggccttggtgctggagcagctgacccctgccctgcacagcaccaacttctcctgtgtgctcgtggaccctgaacaggttgtccagcgtcacgtcgtcctggcccagctctgggctgggctgagggcaaccttgccccccacccaagaagccctgccctccagccacagcagtccacagcagcagggttaagactcagcacagggccagcagcagcacaaccttgaccagagcttgggtcctacctgtctacctggagtgaacagtccctgactgcctgtaggctgcgtggatgcgcaacacaccccctccttctctgctttgggtcccttctctcaccaaattcaaactccattcccacctacctagaaaatcacagcctccttataatgcctcctcctcctgccattctctctccacctatccattagccttcctaacgtcctactcctcacactgctctactgctcagaaaccaccaagactgttgatgccttagccttgcactccagggccctacctgcatttcccacatgactttctggaagcctcccaactattcttgcttttcccagacagctcccactcccatgtctctgctcatttagtcccgtcttcctcaccgccccagcaggggaacgctcaagcctggttgaaatgctgcctcttcagtgaagtcatcctctttcagctctggccgcattctgcagacttcctatcttcgtgctgtatgttttttttttcccccttcactctaatggactgttccagggaagggatgggggcagcagctgcttcggatccacactgtatctgtgtcatccccacatgggtcctcataaaggattattcaatgg

SEQ ID NO: 143910 - DNA, 1201 bp, Homo sapiens
  Payload ID: 8439
  Gene Symbol: IL18BP
  Gene Name: interleukin 18 binding protein
  Uniprot ID: O95998
  ENST ID: ENST00000534583
  CDS Start-End: 385-969
atcctgcccttcccagaagcagctctggtgctgaagagagcactgcctccctgtgtgactgggtgagtccatattctctctttgggtctcaattttgccttccctaatgaaggggtaagattggactaggtaagcatcttacaaccatttgtggtcatgagagctggggtggggaaggattgtcacttgacccccccagctctgtttctaagtgctgaaagagctccaggctatgctacgggaggagaagccagctactgaggaaaagccagctactgagaaaaagcgggagtggtttaccattctcctcccccacctttcaccagagaagaggacgttgtcacagataaagagccaggctcaccagctcctgacgcatgcatcatgaccatgagacacaactggacaccagacctcagccctttgtgggtcctgctcctgtgtgcccacgtcgtcactctcctggtcagagccacacctgtctcgcagaccaccacagctgccactgcctcagttagaagcacaaaggacccctgcccctcccagcccccagtgttcccagcagctaagcagtgtccagcattggaagtgacctggccagaggtggaagtgccactgaatggaacgctgagcttatcctgtgtggcctgcagccgcttccccaacttcagcatcctctactggctgggcaatggttccttcattgagcacctcccaggccgactgtgggaggggagcaccagccgggaacgtgggagcacaggtacgcagctgtgcaaggccttggtgctggagcagctgacccctgccctgcacagcaccaacttctcctgtgtgctcgtggaccctgaacaggttgtccagcgtcacgtcgtcctggcccagctctgggctgggctgagggcaaccttgccccccacccaagaagccctgccctccagccacagcagtccacagcagcagggttaagactcagcacagggccagcagcagcacaaccttgaccagagcttgggtcctacctgtctacctggagtgaacagtccctgactgcctgcttcagttccactcccaggaactttgcctgtcccacgagggagtatgggagagagggactgccacacagaagctgaagacaacacctgcttcaggggaacacaggcgcttgaaaaagaaaagagagaacagcccataatgctcc

SEQ ID NO: 143911 - DNA, 4080 bp, Homo sapiens
  Payload ID: 8439
  Gene Symbol: IL18BP
  Gene Name: interleukin 18 binding protein
  ENST ID: ENST00000497194
  CDS Start-End: 1373-1972
ctccatggataactgcatgaccctgagagaaaacctccttagatttagcatcctaggttcctcacacgcctcaccctgaatcctggccctcccgcagccccagcgccatttgtcccatcagtgacaagattcatattctgatgtagactctgttgccagagccagtgttgagccagtccgcctcttccccgggaagtgcctgcccttccctcctgttagggttggctctcgagcttgtgtgccagttcctgggttggccgtgagagttctacagacaaggaggaagtgctctcggtgtatttcctgtggtgggttcacacgcagctagacacagctaacttgagtcttggagctcctagagggaagcttctggaaaggaaggctcttcaggacctcttaggagccaggtaggagtctgggactactagtgaacctagacctgtggctctggccagaggggctaggatgagagacagagggtgtgatggtgggtgctgggagatgtagccgaccttggggctggtggctgggggagtgggtagcctgggaaaggccaggatgtggacggactggtatggcattgagcctgaagtggtccaacttggggttccccagtgcctaggaaagttgtccccttgaatgtcagtgtgaaggtgaaggaggaagcagatgcctgttcatatggaaacaaagacctggctgtgaagaggggaggcggacaccaaagtcctgacacttgggcgggacagaattgatctgtgagagactcatctagttcataccctaggtgaccctgggggtggcatgggggtagattagagatcccagtctggtatcctctggagagtaggagtcccaggagctgaaggtttctggccactgaactttggctaaagcagaggtgtcacagctgctcaagattccctggttaaaaagtgaaagtgaaatagagggtcggggcagtgctttcccagaaggattgctcggcatcctgcccttcccagaagcagctctggtgctgaagagagcactgcctccctgtgtgactgggtgagtccatattctctctttgggtctcaattttgccttccctaatgaaggggtaagattggactaggtaagcatcttacaaccatttgtggtcatgagagctggggtggggaaggattgtcacttgacccccccagctctgtttctaagtgctgaaagagctccaggctatgctacgggaggagaagccagctactgaggaaaagccagctactgagaaaaagcgggagtggtttaccattctcctcccccacctttcaccagagaagaggacgttgtcacagataaagagccaggctcaccagctcctgacgcatgcatcatgaccatgagacacaactggacaccagacctcagccctttgtgggtcctgctcctgtgtgcccacgtcgtcactctcctggtcagagccacacctgtctcgcagaccaccacagctgccactgcctcagttagaagcacaaaggacccctgcccctcccagcccccagtgttcccagcagctaagcagtgtccagcattggaagtgacctggccagaggtggaagtgccactgaatggaacgctgagcttatcctgtgtggcctgcagccgcttccccaacttcagcatcctctactggctgggcaatggttccttcattgagcacctcccaggccgactgtgggaggggagcaccagccgggaacgtgggagcacaggtacgcagctgtgcaaggccttggtgctggagcagctgacccctgccctgcacagcaccaacttctcctgtgtgctcgtggaccctgaacaggttgtccagcgtcacgtcgtcctggcccagctctgggtgaggagcccaaggagaggcctccaggaacaggaggagctctgcttccatatgtggggaggaaagggtgggctctgccagagcagcctgtgaactaatgcccagcattcctcaaggtcagccagacaaaaaggaacttaggtcttgggcagaggaggtgtagcctggggcaaagtgatgagatgtccctcctttccttggcctgatccttgtctgccttcacttccctaggctgggctgagggcaaccttgccccccacccaagaagccctgccctccagccacagcagtccacagcagcagggttaagactcagcacagggccagcagcagcacaaccttgaccagagcttgggtcctacctgtctacctggagtgaacagtccctgactgcctgtaggctgcgtggatgcgcaacacaccccctccttctctgctttgggtcccttctctcaccaaattcaaactccattcccacctacctagaaaatcacagcctccttataatgcctcctcctcctgccattctctctccacctatccattagccttcctaacgtcctactcctcacactgctctactgctcagaaaccaccaagactgttgatgccttagccttgcactccagggccctacctgcatttcccacatgactttctggaagcctcccaactattcttgcttttcccagacagctcccactcccatgtctctgctcatttagtcccgtcttcctcaccgccccagcaggggaacgctcaagcctggttgaaatgctgcctcttcagtgaagtcatcctctttcagctctggccgcattctgcagacttcctatcttcgtgctgtatgttttttttttcccccttcactctaatggactgttccagggaagggatgggggcagcagctgcttcggatccacactgtatctgtgtcatccccacatgggtcctcataaaggattattcaatggaggcatcctgacatctgttcatttaggcttcagttccactcccaggaactttgcctgtcccacgagggagtatgggagagagggactgccacacagaagctgaagacaacacctgcttcaggggaacacaggcgcttgaaaaagaaaagagagaacagcccataatgctccccgggagcagaggccactaatggagagtgggaagagcctggaaagatgtggcctcaggaaaagggatgagagaaaggaggtggtatggaagactcagcaggaacaaggtaggcttcaaagagcctatattcctctttttcccacaccgatcaagtcaactcagtactcacgggagaaaaatagactttatttacaagtaataacatttagaaaagatccatccccggcccttaaaaaccttcccatcactccaaatcccaccccagtgcaagtctggggaaggtagggtgtgagctgctgctgaaggctgtcccccaaccccactcctgagacatagggcccatccgtcctgggaaagagcatcctctggcaggtgctcccaccaggtcagacccagtcctggacttcaagagtgagggcccctgctgggcccagccaccaggacagcaggaaccagggcctactcctcttatggtcccttctagatccagaggctaagaggaagactggccaggcccaaggacccagccatcaaaaccagcctcaaatctggttgtgatggagaagtgactttgctttaagaaaaaaggaggcaaggtagggagagcgcccacactgtccatgctccaggccccctgggccagctccgagaaggcgccagtgaaggaccagggaccaggccagggtgcgggcaggcatcactgtctctaggggtttggctactgttggcctgggagctgagagaaggcactgagagggacagtaggcggaggaccaggtgaggtcagcatcggggacacaggtggggccactcactggtactggccctttagtgctttgcctgaaagagacacagtcacatggccagatgagaacttgcgatactagcctgcacccactggctgggaagatctcttcctgctcccacgcccctgtctggatcccctcccttgtgagccccagggttatcagttgctggctgtgcctgagcagctctgggtgctctccatgagaatggggccatctgtcttctctccttggagaggagctaccagg

SEQ ID NO: 143912 - DNA, 853 bp, Homo sapiens
  Payload ID: 8439
  Gene Symbol: IL18BP
  Gene Name: interleukin 18 binding protein
  ENST ID: ENST00000531053
  CDS Start-End: 154-753
gttcacacgcagctagacacagctaacttgagtcttggagctcctagagggaagcttctggaaaggaaggctcttcaggacctcttaggagccagagaagaggacgttgtcacagataaagagccaggctcaccagctcctgacgcatgcatcatgaccatgagacacaactggacaccagacctcagccctttgtgggtcctgctcctgtgtgcccacgtcgtcactctcctggtcagagccacacctgtctcgcagaccaccacagctgccactgcctcagttagaagcacaaaggacccctgcccctcccagcccccagtgttcccagcagctaagcagtgtccagcattggaagtgacctggccagaggtggaagtgccactgaatggaacgctgagcttatcctgtgtggcctgcagccgcttccccaacttcagcatcctctactggctgggcaatggttccttcattgagcacctcccaggccgactgtgggaggggagcaccagccgggaacgtgggagcacaggtacgcagctgtgcaaggccttggtgctggagcagctgacccctgccctgcacagcaccaacttctcctgtgtgctcgtggaccctgaacaggttgtccagcgtcacgtcgtcctggcccagctctgggtgaggagcccaaggagaggcctccaggaacaggaggagctctgcttccatatgtggggaggaaagggtgggctctgccagagcagcctgtgaactaatgcccagcattcctcaaggtcagccagacaaaaaggaacttaggtcttgggcagaggaggtgtagcctggggcaaagtgatgagatgtccctcct

SEQ ID NO: 143913 - DNA, 1566 bp, Homo sapiens
  Payload ID: 8439
  Gene Symbol: IL18BP
  Gene Name: interleukin 18 binding protein
  Uniprot ID: O95998
  ENST ID: ENST00000620017
  CDS Start-End: 167-658
tttcctgtggtgggttcacacgcagctagacacagctaacttgagtcttggagctcctagagggaagcttctggaaaggaaggctcttcaggacctcttaggagccagagaagaggacgttgtcacagataaagagccaggctcaccagctcctgacgcatgcatcatgaccatgagacacaactggacaccagacctcagccctttgtgggtcctgctcctgtgtgcccacgtcgtcactctcctggtcagagccacacctgtctcgcagaccaccacagctgccactgcctcagttagaagcacaaaggacccctgcccctcccagcccccagtgttcccagcagctaagcagtgtccagcattggaagtgacctggccagaggtggaagtgccactgaatggaacgctgagcttatcctgtgtggcctgcagccgcttccccaacttcagcatcctctactggctgggcaatggttccttcattgagcacctcccaggccgactgtgggaggggagcaccagccgggaacgtgggagcacaggctgggctgagggcaaccttgccccccacccaagaagccctgccctccagccacagcagtccacagcagcagggttaagactcagcacagggccagcagcagcacaaccttgaccagagcttgggtcctacctgtctacctggagtgaacagtccctgactgcctgtaggctgcgtggatgcgcaacacaccccctccttctctgctttgggtcccttctctcaccaaattcaaactccattcccacctacctagaaaatcacagcctccttataatgcctcctcctcctgccattctctctccacctatccattagccttcctaacgtcctactcctcacactgctctactgctcagaaaccaccaagactgttgatgccttagccttgcactccagggccctacctgcatttcccacatgactttctggaagcctcccaactattcttgcttttcccagacagctcccactcccatgtctctgctcatttagtcccgtcttcctcaccgccccagcaggggaacgctcaagcctggttgaaatgctgcctcttcagtgaagtcatcctctttcagctctggccgcattctgcagacttcctatcttcgtgctgtatgttttttttttcccccttcactctaatggactgttccagggaagggatgggggcagcagctgcttcggatccacactgtatctgtgtcatccccacatgggtcctcataaaggattattcaatggaggcatcctgacatctgttcatttaggcttcagttccactcccaggaactttgcctgtcccacgagggagtatgggagagagggactgccacacagaagctgaagacaacacctgcttcaggggaacacaggcgcttgaaaaagaaaagagagaacagcccataatgctccccgggagcagaggccactaatggagagtgggaagagcctggaaagatgtggcctcaggaaaagggatgagagaaaggaggtggtatggaagactcagcaggaacaag

SEQ ID NO: 143914 - DNA, 3661 bp, Homo sapiens
  Payload ID: 8440
  Gene Symbol: IL18R1
  Gene Name: interleukin 18 receptor 1
  Uniprot ID: Q13478
  ENST ID: ENST00000233957
  CDS Start-End: 147-1772
tcaggaggcggagatcgctgcttctcacctactttctgaacttggcctccgcagtcgcgacctggcgtgaaggaggagctgccgcccccgccccagcctcggggacgcctctctgaagagaagccatttgaagcagaatccaaaccatgaattgtagagaattacccttgaccctttgggtgcttatatctgtaagcactgcagaatcttgtacttcacgtccccacattactgtggttgaaggggaacctttctatctgaaacattgctcgtgttcacttgcacatgagattgaaacaaccaccaaaagctggtacaaaagcagtggatcacaggaacatgtggagctgaacccaaggagttcctcgagaattgctttgcatgattgtgttttggagttttggccagttgagttgaatgacacaggatcttactttttccaaatgaaaaattatactcagaaatggaaattaaatgtcatcagaagaaataaacacagctgtttcactgaaagacaagtaactagtaaaattgtggaagttaaaaaattttttcagataacctgtgaaaacagttactatcaaacactggtcaacagcacatcattgtataagaactgtaaaaagctactactggagaacaataaaaacccaacgataaagaagaacgccgagtttgaagatcaggggtattactcctgcgtgcatttccttcatcataatggaaaactatttaatatcaccaaaaccttcaatataacaatagtggaagatcgcagtaatatagttccggttcttcttggaccaaagcttaaccatgttgcagtggaattaggaaaaaacgtaaggctcaactgctctgctttgctgaatgaagaggatgtaatttattggatgttcggggaagaaaatggatcggatcctaatatacatgaagagaaagaaatgagaattatgactccagaaggcaaatggcatgcttcaaaagtattgagaattgaaaatattggtgaaagcaatctaaatgttttatataattgcactgtggccagcacgggaggcacagacaccaaaagcttcatcttggtgagaaaagcagacatggctgatatcccaggccacgtcttcacaagaggaatgatcatagctgttttgatcttggtggcagtagtgtgcctagtgactgtgtgtgtcatttatagagttgacttggttctattttatagacatttaacgagaagagatgaaacattaacagatggaaaaacatatgatgcttttgtgtcttacctaaaagaatgccgacctgaaaatggagaggagcacacctttgctgtggagattttgcccagggtgttggagaaacattttgggtataagttatgcatatttgaaagggatgtagtgcctggaggagctgttgttgatgaaatccactcactgatagagaaaagccgaagactaatcattgtcctaagtaaaagttatatgtctaatgaggtcaggtatgaacttgaaagtggactccatgaagcattggtggaaagaaaaattaaaataatcttaattgaatttacacctgttactgacttcacattcttgccccaatcactaaagcttttgaaatctcacagagttctgaagtggaaggccgataaatctctttcttataactcaaggttctggaagaaccttctttacttaatgcctgcaaaaacagtcaagccaggtagagacgaaccggaagtcttgcctgttctttccgagtcttaatcttcagaaacagtgaacgccaaaaagaactcaagatattctggggactgagcatatgaacctgttcataacaaaggctgtgactcgaaataattaactttgtcaaaatcctgctcacaatttgaagatgaaacttgtcattaggttggcgggaatgagactaaagattgcgctgtgggctgtggtcacgtgctcccagaagacctggaattcaaaagaaatggagctattctttttctccctctttcataactggatgcagctgctcatactcaatcccatattcagcaagtgtgaagctggacgtgatgcaaaataaccgatgccctacaaaaagggcgcatctttaagagttttaatgccagtgcttaattcgaatgaggggattttaagtgtctgaagaggcattttctagggaccagtgggtgactgagtaactgaaatgctgctttcactccctaacaccatggatctggttgtgcataggatgtgggaggaggggctggcagggccgccttcagaggctgcagggcctcagcctcaggatgcatttaatgtatcctggccacagttgcagccaacggttcttgaaagctcggtaaggccctgcaacgcagagcctgcttatgtggatctatttatgggaacttcttaaaaggaccccagaatagctctttatctttcacaagagacacaaattctaattgagttaattatctgggcctttcactttggatgctctgaaacatttgttgattttgtgtgaatgtttatatcaaaatgtttgccaggttgtattagccattgaatagcaaaaaactgatagttacttgcttgttttttaaaaattacatattaaaaatgcccttggcataaggcagcatggtgtggcagttaagagatgggctgtgcagcccatcctgagctccagtcctgagtttgctacttacttctgtggcctctggaaccttatccaacctcttggtgcttcagtttcctcatctgtgaaattagaatttataataattgcacctacctcccaggggtaactaaatgaataaatataataaagtacttacagtggttcctgacacagactcagcactccgtcagtgttgccatgactatttttattatcattattaatgattacttagatcaattatttagcagtggactaatggaagctacagagcagggaagggaagcagatctagggaggaaggcagttttgatttgaggaggtttgcacatgtagagaagcatactggagaagcatatccagagggcgaaagatatctctccattgtgcatctgcctcttttgacgttggaagacacatgtcttaccccccaaagggagcccagcactgggagccttcttgatgatctcaaaaataatagctattcaagaaaatcaccaagtgactgtgaaaccgtcagttcggaaggctggttagaacatgtgggagcaacatgaatgttctacaaaagtttaaagcagagattgtttcaaatgggtgtagtagatattactgaaaaccaaaaaagagtgagattgtcagtgtaagaatgtgatttaatgtttgtagtgcttacaattttgtgtaccaactggatgactaaaaagagtaaaataatttaattaatagctcatattttatgtgtgaaaacatgttagtgaacatatataatcaaaatagatttcattgctattgcatagtctctaatacatagaatgattttgcttttctcttttattatacttgctttaaaatacttgaaatatattttgcattaaatgcatttcaagttaaatgtcttaaatgtatacattagatgtgtgttttaaaatgcataaaacacgttgaaatacattaatgaaccatt

SEQ ID NO: 143915 - DNA, 537 bp, Homo sapiens
  Payload ID: 8440
  Gene Symbol: IL18R1
  Gene Name: interleukin 18 receptor 1
  ENST ID: ENST00000334376
  CDS Start-End: 25-537
gccatttgaagcagaatccaaaccatgaattgtagagaattacccttgaccctttgggtgcttatatctgtaagcactgcagaatcttgtacttcacgtccccacattactgtggttgaaggggaacctttctatctgaaacattgctcgtgttcacttgcacatgagattgaaacaaccaccaaaagctggtacaaaagcagtggatcacaggaacatgtggagctgaacccaaggagttcctcgagaattgctttgcatgattgtgttttggagttttggccagttgagttgaatgacacaggatcttactttttccaaatgaaaaattatactcagaaatggaaattaaatgtcatcagaagaaataaacacagctgtttcactgaaagacaagtaactagtaaaattgtggaagttaaaaaattttttcagataacctgtgaaaacagttactatcaaacactggtcaacagcacatcattgtataagataggaccacctatttgcaggaaaacaagctcagggctccactga

SEQ ID NO: 143916 - DNA, 1749 bp, Homo sapiens
  Payload ID: 8440
  Gene Symbol: IL18R1
  Gene Name: interleukin 18 receptor 1
  Uniprot ID: Q13478
  ENST ID: ENST00000410040
  CDS Start-End: 124-1749
aaagctataaagctgtaagagaaattggctttctgagttgtgaaactgtgggcagaaagttgaggaagaaagaactcaagtacaacccaatgaggagaagccatttgaagcagaatccaaaccatgaattgtagagaattacccttgaccctttgggtgcttatatctgtaagcactgcagaatcttgtacttcacgtccccacattactgtggttgaaggggaacctttctatctgaaacattgctcgtgttcacttgcacatgagattgaaacaaccaccaaaagctggtacaaaagcagtggatcacaggaacatgtggagctgaacccaaggagttcctcgagaattgctttgcatgattgtgttttggagttttggccagttgagttgaatgacacaggatcttactttttccaaatgaaaaattatactcagaaatggaaattaaatgtcatcagaagaaataaacacagctgtttcactgaaagacaagtaactagtaaaattgtggaagttaaaaaattttttcagataacctgtgaaaacagttactatcaaacactggtcaacagcacatcattgtataagaactgtaaaaagctactactggagaacaataaaaacccaacgataaagaagaacgccgagtttgaagatcaggggtattactcctgcgtgcatttccttcatcataatggaaaactatttaatatcaccaaaaccttcaatataacaatagtggaagatcgcagtaatatagttccggttcttcttggaccaaagcttaaccatgttgcagtggaattaggaaaaaacgtaaggctcaactgctctgctttgctgaatgaagaggatgtaatttattggatgttcggggaagaaaatggatcggatcctaatatacatgaagagaaagaaatgagaattatgactccagaaggcaaatggcatgcttcaaaagtattgagaattgaaaatattggtgaaagcaatctaaatgttttatataattgcactgtggccagcacgggaggcacagacaccaaaagcttcatcttggtgagaaaagcagacatggctgatatcccaggccacgtcttcacaagaggaatgatcatagctgttttgatcttggtggcagtagtgtgcctagtgactgtgtgtgtcatttatagagttgacttggttctattttatagacatttaacgagaagagatgaaacattaacagatggaaaaacatatgatgcttttgtgtcttacctaaaagaatgccgacctgaaaatggagaggagcacacctttgctgtggagattttgcccagggtgttggagaaacattttgggtataagttatgcatatttgaaagggatgtagtgcctggaggagctgttgttgatgaaatccactcactgatagagaaaagccgaagactaatcattgtcctaagtaaaagttatatgtctaatgaggtcaggtatgaacttgaaagtggactccatgaagcattggtggaaagaaaaattaaaataatcttaattgaatttacacctgttactgacttcacattcttgccccaatcactaaagcttttgaaatctcacagagttctgaagtggaaggccgataaatctctttcttataactcaaggttctggaagaaccttctttacttaatgcctgcaaaaacagtcaagccaggtagagacgaaccggaagtcttgcctgttctttccgagtcttaa

SEQ ID NO: 143917 - DNA, 3854 bp, Homo sapiens
  Payload ID: 8440
  Gene Symbol: IL18R1
  Gene Name: interleukin 18 receptor 1
  Uniprot ID: Q13478
  ENST ID: ENST00000409599
  CDS Start-End: 357-1982
acgcggggcgtctgggtggaggagccggtcctggagcacggctgcgaggagcacccggaccggagggtccccagaccgggacctccgagtcagggaggattctacgccagggagcgccccagactgagagcgccccagaccgctacactcccggacccggagcttcgcccgaccgcgggcagtgcccacctgcagcctccaccggccgggtcaggaggcggagatcgctgcttctcacctactttctgaacttggcctccgcagtcgcgacctggcgtgaaggaggagctgccgcccccgccccagcctcggggacgcctctctgaagagaagccatttgaagcagaatccaaaccatgaattgtagagaattacccttgaccctttgggtgcttatatctgtaagcactgcagaatcttgtacttcacgtccccacattactgtggttgaaggggaacctttctatctgaaacattgctcgtgttcacttgcacatgagattgaaacaaccaccaaaagctggtacaaaagcagtggatcacaggaacatgtggagctgaacccaaggagttcctcgagaattgctttgcatgattgtgttttggagttttggccagttgagttgaatgacacaggatcttactttttccaaatgaaaaattatactcagaaatggaaattaaatgtcatcagaagaaataaacacagctgtttcactgaaagacaagtaactagtaaaattgtggaagttaaaaaattttttcagataacctgtgaaaacagttactatcaaacactggtcaacagcacatcattgtataagaactgtaaaaagctactactggagaacaataaaaacccaacgataaagaagaacgccgagtttgaagatcaggggtattactcctgcgtgcatttccttcatcataatggaaaactatttaatatcaccaaaaccttcaatataacaatagtggaagatcgcagtaatatagttccggttcttcttggaccaaagcttaaccatgttgcagtggaattaggaaaaaacgtaaggctcaactgctctgctttgctgaatgaagaggatgtaatttattggatgttcggggaagaaaatggatcggatcctaatatacatgaagagaaagaaatgagaattatgactccagaaggcaaatggcatgcttcaaaagtattgagaattgaaaatattggtgaaagcaatctaaatgttttatataattgcactgtggccagcacgggaggcacagacaccaaaagcttcatcttggtgagaaaagcagacatggctgatatcccaggccacgtcttcacaagaggaatgatcatagctgttttgatcttggtggcagtagtgtgcctagtgactgtgtgtgtcatttatagagttgacttggttctattttatagacatttaacgagaagagatgaaacattaacagatggaaaaacatatgatgcttttgtgtcttacctaaaagaatgccgacctgaaaatggagaggagcacacctttgctgtggagattttgcccagggtgttggagaaacattttgggtataagttatgcatatttgaaagggatgtagtgcctggaggagctgttgttgatgaaatccactcactgatagagaaaagccgaagactaatcattgtcctaagtaaaagttatatgtctaatgaggtcaggtatgaacttgaaagtggactccatgaagcattggtggaaagaaaaattaaaataatcttaattgaatttacacctgttactgacttcacattcttgccccaatcactaaagcttttgaaatctcacagagttctgaagtggaaggccgataaatctctttcttataactcaaggttctggaagaaccttctttacttaatgcctgcaaaaacagtcaagccaggtagagacgaaccggaagtcttgcctgttctttccgagtcttaatcttcagaaacagtgaacgccaaaaagaactcaagatattctggggactgagcatatgaacctgttcataacaaaggctgtgactcgaaataattaactttgtcaaaatcctgctcacaatttgaagatgaaacttgtcattaggttggcgggaatgagactaaagattgcgctgtgggctgtggtcacgtgctcccagaagacctggaattcaaaagaaatggagctattctttttctccctctttcataactggatgcagctgctcatactcaatcccatattcagcaagtgtgaagctggacgtgatgcaaaataaccgatgccctacaaaaagggcgcatctttaagagttttaatgccagtgcttaattcgaatgaggggattttaagtgtctgaagaggcattttctagggaccagtgggtgactgagtaactgaaatgctgctttcactccctaacaccatggatctggttgtgcataggatgtgggaggaggggctggcagggccgccttcagaggctgcagggcctcagcctcaggatgcatttaatgtatcctggccacagttgcagccaacggttcttgaaagctcggtaaggccctgcaacgcagagcctgcttatgtggatctatttatgggaacttcttaaaaggaccccagaatagctctttatctttcacaagagacacaaattctaattgagttaattatctgggcctttcactttggatgctctgaaacatttgttgattttgtgtgaatgtttatatcaaaatgtttgccaggttgtattagccattgaatagcaaaaaactgatagttacttgcttgttttttaaaaattacatattaaaaatgcccttggcataaggcagcatggtgtggcagttaagagatgggctgtgcagcccatcctgagctccagtcctgagtttgctacttacttctgtggcctctggaaccttatccaacctcttggtgcttcagtttcctcatctgtgaaattagaatttataataattgcacctacctcccaggggtaactaaatgaataaatataataaagtacttacagtggttcctgacacagactcagcactccgtcagtgttgccatgactatttttattatcattattaatgattacttagatcaattatttagcagtggactaatggaagctacagagcagggaagggaagcagatctagggaggaaggcagttttgatttgaggaggtttgcacatgtagagaagcatactggagaagcatatccagagggcgaaagatatctctccattgtgcatctgcctcttttgacgttggaagacacatgtcttaccccccaaagggagcccagcactgggagccttcttgatgatctcaaaaataatagctattcaagaaaatcaccaagtgactgtgaaaccgtcagttcggaaggctggttagaacatgtgggagcaacatgaatgttctacaaaagtttaaagcagagattgtttcaaatgggtgtagtagatattactgaaaaccaaaaaagagtgagattgtcagtgtaagaatgtgatttaatgtttgtagtgcttacaattttgtgtaccaactggatgactaaaaagagtaaaataatttaattaatagctcatattttatgtgtgaaaacatgttagtgaacatatataatcaaaatagatttcattgctattgcatagtctctaatacatagaatgattttgcttttctcttttattatacttgctttaaaatacttgaaatatattttgcattaaatgcatttcaagttaaatgtcttaaatgtatacattagatgtgtgttttaaaatgcataaaacacgttgaaa

SEQ ID NO: 143918 - DNA, 2773 bp, Homo sapiens
  Payload ID: 8441
  Gene Symbol: IL18RAP
  Gene Name: interleukin 18 receptor accessory protein
  Uniprot ID: O95256
  ENST ID: ENST00000264260
  CDS Start-End: 590-2389
acaatgtccatggtcatttacaaaataaggttttcctttttcctccagttataatcctttatttttgagctggtgtaacgtggctattgtgtcttctccaggtatctctctggataggaagaaatatagtagaaccctttgaaaatggatattttcacatattttcgttcagatacaaaagctggcagttactgaaataaggacttgaagttccttcctcttttttttatgtcttaagagcaggaaataaagagacagctgaaggtgtagccttgaccaactgaaagggaaatcttcatcctctgaaaaaacatatgtgattctcaaaaaacgcatctggaaaattgataaagaagcgattctgtagattctcccagcgctgttgggctctcaattccttctgtgaaggacaacatatggtgatggggaaatcagaagctttgagaccctctacacctggatatgaatcccccttctaatacttaccagaaatgaaggggatactcagggcagagttctgaatctcaaaacactctactctggcaaaggaatgaagttattggagtgatgacaggaacacgggagaacaatgctctgtttgggctggatatttctttggcttgttgcaggagagcgaattaaaggatttaatatttcaggttgttccacaaaaaaactcctttggacatattctacaaggagtgaagaggaatttgtcttattttgtgatttaccagagccacagaaatcacatttctgccacagaaatcgactctcaccaaaacaagtccctgagcacctgcccttcatgggtagtaacgacctatctgatgtccaatggtaccaacaaccttcgaatggagatccattagaggacattaggaaaagctatcctcacatcattcaggacaaatgtacccttcactttttgaccccaggggtgaataattctgggtcatatatttgtagacccaagatgattaagagcccctatgatgtagcctgttgtgtcaagatgattttagaagttaagccccagacaaatgcatcctgtgagtattccgcatcacataagcaagacctacttcttgggagcactggctctatttcttgccccagtctcagctgccaaagtgatgcacaaagtccagcggtaacctggtacaagaatggaaaactcctctctgtggaaaggagcaaccgaatcgtagtggatgaagtttatgactatcaccagggcacatatgtatgtgattacactcagtcggatactgtgagttcgtggacagtcagagctgttgttcaagtgagaaccattgtgggagacactaaactcaaaccagatattctggatcctgtcgaggacacactggaagtagaacttggaaagcctttaactattagctgcaaagcacgatttggctttgaaagggtctttaaccctgtcataaaatggtacatcaaagattctgacctagagtgggaagtctcagtacctgaggcgaaaagtattaaatccactttaaaggatgaaatcattgagcgtaatatcatcttggaaaaagtcactcagcgtgatcttcgcaggaagtttgtttgctttgtccagaactccattggaaacacaacccagtccgtccaactgaaagaaaagagaggagtggtgctcctgtacatcctgcttggcaccatcgggaccctggtggccgtgctggcggcgagtgccctcctctacaggcactggattgaaatagtgctgctgtaccggacctaccagagcaaggatcagacgcttggggataaaaaggattttgatgctttcgtatcctatgcaaaatggagctcttttccaagtgaggccacttcatctctgagtgaagaacacttggccctgagcctatttcctgatgttttagaaaacaaatatggatatagcctgtgtttgcttgaaagagatgtggctccaggaggagtgtatgcagaagacattgtgagcattattaagagaagcagaagaggaatatttatcttgagccccaactatgtcaatggacccagtatctttgaactacaagcagcagtgaatcttgccttggatgatcaaacactgaaactcattttaattaagttctgttacttccaagagccagagtctctacctcatctcgtgaaaaaagctctcagggttttgcccacagttacttggagaggcttaaaatcagttcctcccaattctaggttctgggccaaaatgcgctaccacatgcctgtgaaaaactctcagggattcacgtggaaccagctcagaattacctctaggatttttcagtggaaaggactcagtagaacagaaaccactgggaggagctcccagcctaaggaatggtgaaatgagccctggagccccctccagtccagtccctgggatagagatgttgctggacagaactcacagctctgtgtgtgtgtgttcaggctgataggaaattcaaagagtctcctgccagcaccaagcaagcttgatggacaatggagtgggattgagactgtggtttagagcctttgatttcctggactggactgacggcgagtgaattctctagaccttgggtactttcagtacacaacacccctaagatttcccagtggtccgagcagaatcagaaaatacagctacttctgccttatggctagggaactgtcatgtctaccatgtattgtacatatgactttatgtatacttgcaatcaaataaatattattttattagaaa

SEQ ID NO: 143919 - DNA, 1890 bp, Homo sapiens
  Payload ID: 8441
  Gene Symbol: IL18RAP
  Gene Name: interleukin 18 receptor accessory protein
  Uniprot ID: O95256
  ENST ID: ENST00000409369
  CDS Start-End: 314-1687
cgctgttgggctctcaattccttctgtgaaggacaacatatggtgatggggaaatcagaagctttgagaccctctacacctggatatgaatcccccttctaatacttaccagaaatgaaggggatactcagggcagagttctgaatctcaaaacactctactctggcaaaggaatgaagttattggagtgatgacaggaacacgggagaacaatgctctgtttgggctggatatttctttggcttgttgcaggagagcgaattaaaggatttaatatttcaggagcccctatgatgtagcctgttgtgtcaagatgattttagaagttaagccccagacaaatgcatcctgtgagtattccgcatcacataagcaagacctacttcttgggagcactggctctatttcttgccccagtctcagctgccaaagtgatgcacaaagtccagcggtaacctggtacaagaatggaaaactcctctctgtggaaaggagcaaccgaatcgtagtggatgaagtttatgactatcaccagggcacatatgtatgtgattacactcagtcggatactgtgagttcgtggacagtcagagctgttgttcaagtgagaaccattgtgggagacactaaactcaaaccagatattctggatcctgtcgaggacacactggaagtagaacttggaaagcctttaactattagctgcaaagcacgatttggctttgaaagggtctttaaccctgtcataaaatggtacatcaaagattctgacctagagtgggaagtctcagtacctgaggcgaaaagtattaaatccactttaaaggatgaaatcattgagcgtaatatcatcttggaaaaagtcactcagcgtgatcttcgcaggaagtttgtttgctttgtccagaactccattggaaacacaacccagtccgtccaactgaaagaaaagagaggagtggtgctcctgtacatcctgcttggcaccatcgggaccctggtggccgtgctggcggcgagtgccctcctctacaggcactggattgaaatagtgctgctgtaccggacctaccagagcaaggatcagacgcttggggataaaaaggattttgatgctttcgtatcctatgcaaaatggagctcttttccaagtgaggccacttcatctctgagtgaagaacacttggccctgagcctatttcctgatgttttagaaaacaaatatggatatagcctgtgtttgcttgaaagagatgtggctccaggaggagtgtatgcagaagacattgtgagcattattaagagaagcagaagaggaatatttatcttgagccccaactatgtcaatggacccagtatctttgaactacaagcagcagtgaatcttgccttggatgatcaaacactgaaactcattttaattaagttctgttacttccaagagccagagtctctacctcatctcgtgaaaaaagctctcagggttttgcccacagttacttggagaggcttaaaatcagttcctcccaattctaggttctgggccaaaatgcgctaccacatgcctgtgaaaaactctcagggattcacgtggaaccagctcagaattacctctaggatttttcagtggaaaggactcagtagaacagaaaccactgggaggagctcccagcctaaggaatggtgaaatgagccctggagccccctccagtccagtccctgggatagagatgttgctggacagaactcacagctctgtgtgtgtgtgttcaggctgataggaaattcaaagagtctcctgccagcaccaagcaagcttgatggacaatggagtgggattgagactgtggtttagagcctttgatttcctggactggactgacggcgagt

SEQ ID NO: 143920 - DNA, 587 bp, Homo sapiens
  Payload ID: 8441
  Gene Symbol: IL18RAP
  Gene Name: interleukin 18 receptor accessory protein
  ENST ID: ENST00000450855
  CDS Start-End: 454-587
tctctccctgggtctcagatccctgttgacactgctttctccagcactttcctctctctcccccgtttctcaccaaaaagttttgtgggtaaagtttagttcattatttctgccagagacagctgaaggtgtagccttgaccaactgaaagggaaatcttcatcctctgaaaaaacatatgtgattctcaaaaaacgcatctggaaaattgataaagaagcgattctgtagattctcccagcgctgttgggctctcaattccttctgtgaaggacaacatatggtgatggggaaatcagaagctttgagaccctctacacctggatatgaatcccccttctaatacttaccagaaatgaaggggatactcagggcagagttctgaatctcaaaacactctactctggcaaaggaatgaagttattggagtgatgacaggaacacgggagaacaatgctctgtttgggctggatatttctttggcttgttgcaggagagcgaattaaaggatttaatatttcaggttgttccacaaaaaaactcctttggacatattctacaaggagtgaagaggaatttgtcttatt

SEQ ID NO: 143921 - DNA, 1473 bp, Homo sapiens
  Payload ID: 8442
  Gene Symbol: IL19
  Gene Name: interleukin 19
  Uniprot ID: Q9UHD0
  ENST ID: ENST00000270218
  CDS Start-End: 940-1473
gctggagtgcaatggtgaaattatagcagactgcagtcttcaactcctgacctcaagcaattgtcctgcctcctcaacttcctgactacaggtgtgcatgaggactacaggcaggcatgtgccaacacatgcagctttttttttttttttttttcagagatgtggtctcgctttgttgcctacactggtctcaaactcttggcctcaagggatcctcccacctcggcttcccaaagtgcagagattacagtctcattttctctctctctgcattaatcaagaatgagagaaccctccaggggacaagatgaaggggaaatagatgatgtgcaaagaaatccttgctttatgaggggaaaaagtgttcctcatgaagttcaacaaaatgatgcaggtaaagcagttagctagcacctggcacatggcagacactcatagctgcctaaggcattggagaactggatcgtgctgcagccagaggcacctgcagagcctcatgggctggctgctgcagggtgtggctgattgagagtgcttttgtgagttggcctgcagggtacacttggtaacgtgccacagctctcaggaaagtgacctaagttggatttttctgcatggacatagaattgcaaaaaattctcatttgcatggagatggggagtttatttttcctagaagctgcatgtcaagacccagaagaaagaggcatttcataataatgattaatcagctatatcttaaagaagaaagaaaacaattaaggaaatacaatactaagaaaacaaggggaaaaaacaatctccccaaggtggatccacccagcaaaccttgacagcatttcctcttatccacctgaataaaaatgaccagccctttccaaatggcagagagcactgagaggagacacaaggagcagcccgcaagcaccaagtgagaggcatgaagttacagtgtgtttccctttggctcctgggtacaatactgatattgtgctcagtagacaaccacggtctcaggagatgtctgatttccacagacatgcaccatatagaagagagtttccaagaaatcaaaagagccatccaagctaaggacaccttcccaaatgtcactatcctgtccacattggagactctgcagatcattaagcccttagatgtgtgctgcgtgaccaagaacctcctggcgttctacgtggacagggtgttcaaggatcatcaggagccaaaccccaaaatcttgagaaaaatcagcagcattgccaactctttcctctacatgcagaaaactctgcggcaatgtcaggaacagaggcagtgtcactgcaggcaggaagccaccaatgccaccagagtcatccatgacaactatgatcagctggaggtccacgctgctgccattaaatccctgggagagctcgacgtctttctagcctggattaataagaatcatgaagtaatgttctcagcttga

SEQ ID NO: 143922 - DNA, 1032 bp, Homo sapiens
  Payload ID: 8442
  Gene Symbol: IL19
  Gene Name: interleukin 19
  Uniprot ID: Q9UHD0
  ENST ID: ENST00000340758
  CDS Start-End: 26-673
tgcacacactgacaggagtccaagaatgtgcactgagggagcgtttccgcacagatctgcgtgttccttaccactcacacatgtgcacacacatatccatgtgtgtgtgccagtgctttggggctctgttccacggggcatgaagttacagtgtgtttccctttggctcctgggtacaatactgatattgtgctcagtagacaaccacggtctcaggagatgtctgatttccacagacatgcaccatatagaagagagtttccaagaaatcaaaagagccatccaagctaaggacaccttcccaaatgtcactatcctgtccacattggagactctgcagatcattaagcccttagatgtgtgctgcgtgaccaagaacctcctggcgttctacgtggacagggtgttcaaggatcatcaggagccaaaccccaaaatcttgagaaaaatcagcagcattgccaactctttcctctacatgcagaaaactctgcggcaatgtcaggaacagaggcagtgtcactgcaggcaggaagccaccaatgccaccagagtcatccatgacaactatgatcagctggaggtccacgctgctgccattaaatccctgggagagctcgacgtctttctagcctggattaataagaatcatgaagtaatgttctcagcttgatgacaaggaacctgtatagtgatccagggatgaacaccccctgtgcggtttactgtgggagacagcccaccttgaaggggaaggagatggggaaggccccttgcagctgaaagtcccactggctggcctcaggctgtcttattccgcttgaaaatagccaaaaagtctactgtggtatttgtaataaactctatctgctgaaagggcctgcaggccatcctgggagtaaagggctgccttcccatctaatttattgtaaagtcatatagtccatgtctgtgatgtgagccaagtgatatcctgtagtacacattgtactgagtggtttttctgaataaattccatattttacctatgaa

SEQ ID NO: 143923 - DNA, 1586 bp, Homo sapiens
  Payload ID: 8442
  Gene Symbol: IL19
  Gene Name: interleukin 19
  Uniprot ID: Q9UHD0
  ENST ID: ENST00000620365
  CDS Start-End: 696-1229
ttccagtctcattttctctctctctgcattaatcaagaatgagagaaccctccaggggacaagatgaaggggaaatagatgatgtgcaaagaaatccttgctttatgaggggaaaaagtgttcctcatgaagttcaacaaaatgatgcaggtaaagcagttagctagcacctggcacatggcagacactcatagctgcctaaggcattggagaactggatcgtgctgcagccagaggcacctgcagagcctcatgggctggctgctgcagggtgtggctgattgagagtgcttttgtgagttggcctgcagggtacacttggtaacgtgccacagctctcaggaaagtgacctaagttggatttttctgcatggacatagaattgcaaaaaattctcatttgcatggagatggggagtttatttttcctagaagctgcatgtcaagacccagaagaaagaggcatttcataataatgattaatcagctatatcttaaagaagaaagaaaacaattaaggaaatacaatactaagaaaacaaggggaaaaaacaatctccccaaggtggatccacccagcaaaccttgacagcatttcctcttatccacctgaataaaaatgaccagccctttccaaatggcagagagcactgagaggagacacaaggagcagcccgcaagcaccaagtgagaggcatgaagttacagtgtgtttccctttggctcctgggtacaatactgatattgtgctcagtagacaaccacggtctcaggagatgtctgatttccacagacatgcaccatatagaagagagtttccaagaaatcaaaagagccatccaagctaaggacaccttcccaaatgtcactatcctgtccacattggagactctgcagatcattaagcccttagatgtgtgctgcgtgaccaagaacctcctggcgttctacgtggacagggtgttcaaggatcatcaggagccaaaccccaaaatcttgagaaaaatcagcagcattgccaactctttcctctacatgcagaaaactctgcggcaatgtcaggaacagaggcagtgtcactgcaggcaggaagccaccaatgccaccagagtcatccatgacaactatgatcagctggaggtccacgctgctgccattaaatccctgggagagctcgacgtctttctagcctggattaataagaatcatgaagtaatgttctcagcttgatgacaaggaacctgtatagtgatccagggatgaacaccccctgtgcggtttactgtgggagacagcccaccttgaaggggaaggagatggggaaggccccttgcagctgaaagtcccactggctggcctcaggctgtcttattccgcttgaaaatagccaaaaagtctactgtggtatttgtaataaactctatctgctgaaagggcctgcaggccatcctgggagtaaagggctgccttcccatctaatttattgtaaagtcatatagtccatgtctgtgatgtgagccaagtgatatcctgtagtacacattgtactgagtggtttttctgaataaattccatattttacctatg

SEQ ID NO: 143924 - DNA, 1029 bp, Homo sapiens
  Payload ID: 8443
  Gene Symbol: IL2
  Gene Name: interleukin 2
  Uniprot ID: P60568
  ENST ID: ENST00000226730
  CDS Start-End: 286-747
ctatcacctaagtgtgggctaatgtaacaaagagggatttcacctacatccattcagtcagtctttgggggtttaaagaaattccaaagagtcatcagaagaggaaaaatgaaggtaatgttttttcagacaggtaaagtctttgaaaatatgtgtaatatgtaaaacattttgacacccccataatatttttccagaattaacagtataaattgcatctcttgttcaagagttccctatcactctctttaatcactactcacagtaacctcaactcctgccacaatgtacaggatgcaactcctgtcttgcattgcactaagtcttgcacttgtcacaaacagtgcacctacttcaagttctacaaagaaaacacagctacaactggagcatttactgctggatttacagatgattttgaatggaattaataattacaagaatcccaaactcaccaggatgctcacatttaagttttacatgcccaagaaggccacagaactgaaacatcttcagtgtctagaagaagaactcaaacctctggaggaagtgctaaatttagctcaaagcaaaaactttcacttaagacccagggacttaatcagcaatatcaacgtaatagttctggaactaaagggatctgaaacaacattcatgtgtgaatatgctgatgagacagcaaccattgtagaatttctgaacagatggattaccttttgtcaaagcatcatctcaacactgacttgataattaagtgcttcccacttaaaacatatcaggccttctatttatttaaatatttaaattttatatttattgttgaatgtatggtttgctacctattgtaactattattcttaatcttaaaactataaatatggatcttttatgattctttttgtaagccctaggggctctaaaatggtttcacttatttatcccaaaatatttattattatgttgaatgttaaatatagtatctatgtagattggttagtaaaactatttaataaatttgataaatataaa

SEQ ID NO: 143925 - DNA, 1006 bp, Homo sapiens
  Payload ID: 8444
  Gene Symbol: IL2RA
  Gene Name: interleukin 2 receptor, alpha
  ENST ID: ENST00000256876
  CDS Start-End: 140-931
aagggtgacagcccaggcggaccgatcttcccatcccacatcctccggcgcgatgccaaaaagaggctgacggcaactgggccttctgcagagaaagacctccgcttcactgccccggctggtcccaagggtcaggaagatggattcatacctgctgatgtggggactgctcacgttcatcatggtgcctggctgccaggcagagctctgtgacgatgacccgccagagatcccacacgccacattcaaagccatggcctacaaggaaggaaccatgttgaactgtgaatgcaagagaggtttccgcagaataaaaagcgggtcactctatatgctctgtacaggaaactctagccactcgtcctgggacaaccaatgtcaatgcacaagctctgccactcggaacacaacgaaacaagtgacacctcaacctgaagaacagaaagaaaggaaaaccacagaaatgcaaagtccaatgcagccagtggaccaagcgagccttccaggtcactgcagggaacctccaccatgggaaaatgaagccacagagagaatttatcatttcgtggtggggcagatggtttattatcagtgcgtccagggatacagggctctacacagaggtcctgctgagagcgtctgcaaaatgacccacgggaagacaaggtggacccagccccagctcatatgcacaggtgaagagaagcctcaggcaagccccgaaggccgtcctgagagtgagacttcctgcctcgtcacaacaacagattttcaaatacagacagaaatggctgcaaccatggagacgtccatatttacaacagagtaccaggtagcagtggccggctgtgttttcctgctgatcagcgtcctcctcctgagtgggctcacctggcagcggagacagaggaagagtagaagaacaatctagaaaaccaaaagaacaagaatttcttggtaagaagccgggaacagacaacagaagtcatgaagcccaagtgaaatc

SEQ ID NO: 143926 - DNA, 1562 bp, Homo sapiens
  Payload ID: 8444
  Gene Symbol: IL2RA
  Gene Name: interleukin 2 receptor, alpha
  ENST ID: ENST00000379954
  CDS Start-End: 159-761
agagactggatggacccacaagggtgacagcccaggcggaccgatcttcccatcccacatcctccggcgcgatgccaaaaagaggctgacggcaactgggccttctgcagagaaagacctccgcttcactgccccggctggtcccaagggtcaggaagatggattcatacctgctgatgtggggactgctcacgttcatcatggtgcctggctgccaggcagagctctgtgacgatgacccgccagagatcccacacgccacattcaaagccatggcctacaaggaaggaaccatgttgaactgtgaatgcaagagaggtttccgcagaataaaaagcgggtcactctatatgctctgtacaggaaactctagccactcgtcctgggacaaccaatgtcaatgcacaagctctgccactcggaacacaacgaaacaagtgacacctcaacctgaagaacagaaagaaaggaaaaccacagaaatgcaaagtccaatgcagccagtggaccaagcgagccttccaggtgaagagaagcctcaggcaagccccgaaggccgtcctgagagtgagacttcctgcctcgtcacaacaacagattttcaaatacagacagaaatggctgcaaccatggagacgtccatatttacaacagagtaccaggtagcagtggccggctgtgttttcctgctgatcagcgtcctcctcctgagtgggctcacctggcagcggagacagaggaagagtagaagaacaatctagaaaaccaaaagaacaagaatttcttggtaagaagccgggaacagacaacagaagtcatgaagcccaagtgaaatcaaaggtgctaaatggtcgcccaggagacatccgttgtgcttgcctgcgttttggaagctctgaagtcacatcacaggacacggggcagtggcaaccttgtctctatgccagctcagtcccatcagagagcgagcgctacccacttctaaatagcaatttcgccgttgaagaggaagggcaaaaccactagaactctccatcttattttcatgtatatgtgttcattaaagcatgaatggtatggaactctctccaccctatatgtagtataaagaaaagtaggtttacattcatctcattccaacttcccagttcaggagtcccaaggaaagccccagcactaacgtaaatacacaacacacacactctaccctatacaactggacattgtctgcgtggttcctttctcagccgcttctgactgctgattctcccgttcacgttgcctaataaacatccttcaagaactctgggctgctacccagaaatcattttacccttggctcaatcctctaagctaacccccttctactgagccttcagtcttgaatttctaaaaaacagaggccatggcagaataatctttgggtaacttcaaaacggggcagccaaacccatgaggcaatgtcaggaacagaaggatgaatgaggtcccaggcagagaatcatacttagcaaagttttacctgtgcgttactaattggcctctttaagagttagtttctt

SEQ ID NO: 143927 - DNA, 3176 bp, Homo sapiens
  Payload ID: 8444
  Gene Symbol: IL2RA
  Gene Name: interleukin 2 receptor, alpha
  Uniprot ID: P01589
  ENST ID: ENST00000379959
  CDS Start-End: 175-993
aactcctgactccgatagagactggatggacccacaagggtgacagcccaggcggaccgatcttcccatcccacatcctccggcgcgatgccaaaaagaggctgacggcaactgggccttctgcagagaaagacctccgcttcactgccccggctggtcccaagggtcaggaagatggattcatacctgctgatgtggggactgctcacgttcatcatggtgcctggctgccaggcagagctctgtgacgatgacccgccagagatcccacacgccacattcaaagccatggcctacaaggaaggaaccatgttgaactgtgaatgcaagagaggtttccgcagaataaaaagcgggtcactctatatgctctgtacaggaaactctagccactcgtcctgggacaaccaatgtcaatgcacaagctctgccactcggaacacaacgaaacaagtgacacctcaacctgaagaacagaaagaaaggaaaaccacagaaatgcaaagtccaatgcagccagtggaccaagcgagccttccaggtcactgcagggaacctccaccatgggaaaatgaagccacagagagaatttatcatttcgtggtggggcagatggtttattatcagtgcgtccagggatacagggctctacacagaggtcctgctgagagcgtctgcaaaatgacccacgggaagacaaggtggacccagccccagctcatatgcacaggtgaaatggagaccagtcagtttccaggtgaagagaagcctcaggcaagccccgaaggccgtcctgagagtgagacttcctgcctcgtcacaacaacagattttcaaatacagacagaaatggctgcaaccatggagacgtccatatttacaacagagtaccaggtagcagtggccggctgtgttttcctgctgatcagcgtcctcctcctgagtgggctcacctggcagcggagacagaggaagagtagaagaacaatctagaaaaccaaaagaacaagaatttcttggtaagaagccgggaacagacaacagaagtcatgaagcccaagtgaaatcaaaggtgctaaatggtcgcccaggagacatccgttgtgcttgcctgcgttttggaagctctgaagtcacatcacaggacacggggcagtggcaaccttgtctctatgccagctcagtcccatcagagagcgagcgctacccacttctaaatagcaatttcgccgttgaagaggaagggcaaaaccactagaactctccatcttattttcatgtatatgtgttcattaaagcatgaatggtatggaactctctccaccctatatgtagtataaagaaaagtaggtttacattcatctcattccaacttcccagttcaggagtcccaaggaaagccccagcactaacgtaaatacacaacacacacactctaccctatacaactggacattgtctgcgtggttcctttctcagccgcttctgactgctgattctcccgttcacgttgcctaataaacatccttcaagaactctgggctgctacccagaaatcattttacccttggctcaatcctctaagctaacccccttctactgagccttcagtcttgaatttctaaaaaacagaggccatggcagaataatctttgggtaacttcaaaacggggcagccaaacccatgaggcaatgtcaggaacagaaggatgaatgaggtcccaggcagagaatcatacttagcaaagttttacctgtgcgttactaattggcctctttaagagttagtttctttgggattgctatgaatgataccctgaatttggcctgcactaatttgatgtttacaggtggacacacaaggtgcaaatcaatgcgtacgtttcctgagaagtgtctaaaaacaccaaaaagggatccgtacattcaatgtttatgcaaggaaggaaagaaagaaggaagtgaagagggagaagggatggaggtcacactggtagaacgtaaccacggaaaagagcgcatcaggcctggcacggtggctcaggcctataaccccagctccctaggagaccaaggcgggagcatctcttgaggccaggagtttgagaccagcctgggcagcatagcaagacacatccctacaaaaaattagaaattggctggatgtggtggcatacgcctgtagtcctagccactcaggaggctgaggcaggaggattgcttgagcccaggagttcgaggctgcagtcagtcatgatggcaccactgcactccagcctgggcaacagagcaagatcctgtctttaaggaaaaaaagacaagatgagcataccagcagtccttgaacattatcaaaaagttcagcatattagaatcaccgggaggccttgttaaaagagttcgctgggcccatcttcagagtctctgagttgttggtctggaatagagccaaatgttttgtgtgtctaacaattcccaggtgctgttgctgctgctactattccaggaacacactttgagaaccattgtgttattgctctgcacgcccacccactctcaactcccacgaaaaaaatcaacttccagagctaagatttcggtggaagtcctggttccatatctggtgcaagatctcccctcacgaatcagttgagtcaacattctagctcaacaacatcacacgattaacattaacgaaaattattcatttgggaaactatcagccagttttcacttctgaaggggcaggagagtgttatgagaaatcacggcagttttcagcagggtccagattcagattaaataactattttctgtcatttctgtgaccaaccacatacaaacagactcatctgtgcactctccccctcccccttcaggtatatgttttctgagtaaagttgaaaagaatctcagaccagaaaatatagatatatatttaaatcttacttgagtagaactgattacgacttttgggtgttgaggggtctataagatcaaaacttttccatgataatactaagatgttatcgaccatttatctgtccttctctcaaaagtgtatggtggaattttccagaagctatgtgatacgtgatgatgtcatcactctgctgttaacatataataaatttattgctattgtttataaaagaataaatgatattttttaaaaa

SEQ ID NO: 143928 - DNA, 326 bp, Homo sapiens
  Payload ID: 8444
  Gene Symbol: IL2RA
  Gene Name: interleukin 2 receptor, alpha
  ENST ID: ENST00000447847
  CDS Start-End: 1-326
agatcccacacgccacattcaaagccatggcctacaaggaaggaaccatgttgaactgtgaatgcaagagaggtttccgcagaataaaaagcgggtcactctatatgctctgtacaggaaactctagccactcgtcctgggacaaccaatgtcaatgcacaagctctgccactcggaacacaacgaaacaagtgacacctcaacctgaagaacagaaagaaaggaaaaccacagaaatgcaaagtccaatgcagccagtggaccaagcgagccttccagattttcaaatacagacagaaatggctgcaaccatggagacgtccata

SEQ ID NO: 143929 - DNA, 4113 bp, Homo sapiens
  Payload ID: 8445
  Gene Symbol: IL2RB
  Gene Name: interleukin 2 receptor, beta
  Uniprot ID: P14784
  ENST ID: ENST00000216223
  CDS Start-End: 200-1855
aggccttgcccctctatcctctgcacaggaagtgggctggctctgggcttttagtctttgcggccccagcagccagagctcagcagggccctggagagatggccacggtcccagcaccggggaggactggagagcgcgcgctgccaccgccccatgtctcagccagggcttccttcctcggctccaccctgtggatgtaatggcggcccctgctctgtcctggcgtctgcccctcctcatcctcctcctgcccctggctacctcttgggcatctgcagcggtgaatggcacttcccagttcacatgcttctacaactcgagagccaacatctcctgtgtctggagccaagatggggctctgcaggacacttcctgccaagtccatgcctggccggacagacggcggtggaaccaaacctgtgagctgctccccgtgagtcaagcatcctgggcctgcaacctgatcctcggagccccagattctcagaaactgaccacagttgacatcgtcaccctgagggtgctgtgccgtgagggggtgcgatggagggtgatggccatccaggacttcaagccctttgagaaccttcgcctgatggcccccatctccctccaagttgtccacgtggagacccacagatgcaacataagctgggaaatctcccaagcctcccactactttgaaagacacctggagttcgaggcccggacgctgtccccaggccacacctgggaggaggcccccctgctgactctcaagcagaagcaggaatggatctgcctggagacgctcaccccagacacccagtatgagtttcaggtgcgggtcaagcctctgcaaggcgagttcacgacctggagcccctggagccagcccctggccttcaggacaaagcctgcagcccttgggaaggacaccattccgtggctcggccacctcctcgtgggcctcagcggggcttttggcttcatcatcttagtgtacttgctgatcaactgcaggaacaccgggccatggctgaagaaggtcctgaagtgtaacaccccagacccctcgaagttcttttcccagctgagctcagagcatggaggagacgtccagaagtggctctcttcgcccttcccctcatcgtccttcagccctggcggcctggcacctgagatctcgccactagaagtgctggagagggacaaggtgacgcagctgctcctgcagcaggacaaggtgcctgagcccgcatccttaagcagcaaccactcgctgaccagctgcttcaccaaccagggttacttcttcttccacctcccggatgccttggagatagaggcctgccaggtgtactttacttacgacccctactcagaggaagaccctgatgagggtgtggccggggcacccacagggtcttccccccaacccctgcagcctctgtcaggggaggacgacgcctactgcaccttcccctccagggatgacctgctgctcttctcccccagtctcctcggtggccccagccccccaagcactgcccctgggggcagtggggccggtgaagagaggatgcccccttctttgcaagaaagagtccccagagactgggacccccagcccctggggcctcccaccccaggagtcccagacctggtggattttcagccaccccctgagctggtgctgcgagaggctggggaggaggtccctgacgctggccccagggagggagtcagtttcccctggtccaggcctcctgggcagggggagttcagggcccttaatgctcgcctgcccctgaacactgatgcctacttgtccctccaagaactccagggtcaggacccaactcacttggtgtagacagatggccagggtgggaggcaggcagctgcctgctctgcgccgagcctcagaaggaccctgttgagggtcctcagtccactgctgaggacactcagtgtccagttgcagctggacttctccacccggatggcccccacccagtcctgcacacttggtccatccatttccaaacctccactgctgctcccgggtcctgctgcccgagccaggaactgtgtgtgttgcaggggggcagtaactccccaactccctcgttaatcacaggatcccacgaatttaggctcagaagcatcgctcctctccagccctgcagctattcaccaatatcagtcctcgcggctctccagggctccctgccctgacctcttccctgggttttctgccccagcctcctccttccctcccctccccgtccacagggcagcctgagcgtgctttccaaaacccaaatatggccacgctccccctcggttcaaaaccttgcacaggtcccactgccctcagccccacttctcagcctggtacttgtacctccggtgtcgtgtggggacatccccttctgcaatcctccctaccgtcctcctgagccactcagagctccctcacaccccctctgttgcacatgctattccctggggctgctgtgcgctccccctcatctaggtgacaaacttccctgactcttcaagtgccggttttgcttctcctggagggaagcactgcctcccttaatctgccagaaacttctagcgtcagtgctggagggagaagctgtcagggacccagggcgcctggagaaagaggccctgttactattcctttgggatctctgaggcctcagagtgcttggctgctgtatctttaatgctggggcccaagtaagggcacagatccccccacaaagtggatgcctgctgcatcttcccacagtggcttcacagacccacaagagaagctgatggggagtaaaccctggagtccgaggcccaggcagcagccccgcctagtggtgggccctgatgctgccaggcctgggacctcccactgccccctccactggaggggtctcctctgcagctcagggactggcacactggcctccagaagggcagctccacagggcagggcctcattatttttcactgccccagacacagtgcccaacaccccgtcgtataccctggatgaacgaattaattacctggcaccacctcgtctgggctccctgcgcctgacattcacacagagaggcagagtcccgtgcccattaggtctggcatgccccctcctgcaaggggctcaaccccctaccccgacccctccacgtatctttcctaggcagatcacgttgcaatggctcaaacaacattccaccccagcaggacagtgaccccagtcccagctaactctgacctgggagccctcaggcacctgcacttacaggccttgctcacagctgattgggcacctgaccacacgcccccacaggctctgaccagcagcctatgagggggtttggcaccaagctctgtccaatcaggtaggctgggcctgaactagccaatcagatcaactctgtcttgggcgtttgaactcagggagggaggcccttgggagcaggtgcttgtggacaaggctccacaagcgttgagccttggaaaggtagacaagcgttgagccactaagcagaggaccttgggttcccaatacaaaaatacctactgctgagagggctgctgaccatttggtcaggattcctgttgcctttatatccaaaataaactcccctttcttgaggttgtctgagtcttgggtctatgccttgaaaaaagctgaattattggacagtctcacctcctgccatagggtcctgaatgtttcagaccacaaggggctccacacctttgctgtgtgttctggggcaacctactaatcctctctgcaagtcggtctccttatccccccaaatggaaattgtatttgccttctccactttgggaggctcccacttcttgggagggttacattttttaagtcttaatcatttgtgacatatgtatctatacatccgtatcttttaatgatccgtgtgtaccatctttgtgattatttccttaatattttttctttaagtcagttcattttcgttgaaatacatttatttaaagaaaaatctttgttactctgtaaatgaaaaaacccattttcgctataaataaaaggtaactgtacaaaataagtacaatgcaacaaaa

SEQ ID NO: 143930 - DNA, 499 bp, Homo sapiens
  Payload ID: 8445
  Gene Symbol: IL2RB
  Gene Name: interleukin 2 receptor, beta
  ENST ID: ENST00000440958
  CDS Start-End: 1-318
acatgcttctacaactcgagagccaacatctcctgtgtctggagccaagatggggctctgcaggacacttcctgccaagtccatgcctggccggacagacgatcactccagctgccgtgggaccaggctgggatgagggagcaggacaaggtgcccatgagggaggaatgccatggagccagtgggggaggcagtgcccctcacagtggttggcacaggggccccagcctggccttgctgcctggtgccatcctggcagcagagagatctgagaagagtcccttgggccagctgtgtgggtccttcctgttcttctaaagagggtcttttgccatgaaaggcggtggaaccaaacctgtgagctgctccccgtgagtcaagcatcctgggcctgcaacctgatcctcggagccccagattctcagaaactgaccacagttgacatcgtcaccctgagggtgctgtgccgtgagggggtgcgatggagggtgatggccat

SEQ ID NO: 143931 - DNA, 587 bp, Homo sapiens
  Payload ID: 8445
  Gene Symbol: IL2RB
  Gene Name: interleukin 2 receptor, beta
  ENST ID: ENST00000445595
  CDS Start-End: 322-587
acttcgctctcctgccagcatgtgaaggtgccttgcttccccttcgccttccaccacgattgtaagtttcctgaggcctccccagccatgtggaaccgacccgcaaatcaggcttggagaagcttggagaagcttggagaggcttggagaattgctgcatcctggacacgatgttccgacaccaccctcgccagcctccaggtcttggagttgaggcttctgattggggaagcctaatcacacgcacacacttcaggactgaggtctggagctgaggcttctgattggggcttccttcctcggctccaccctgtggatgtaatggcggcccctgctctgtcctggcgtctgcccctcctcatcctcctcctgcccctggctacctcttgggcatctgcagcggtgaatggcacttcccagttcacatgcttctacaactcgagagccaacatctcctgtgtctggagccaagatggggctctgcaggacacttcctgccaagtccatgcctggccggacagacggcggtggaaccaaacctgtgagctgctccccgtgagtcaagcatcctgggcctgcaacctgat

SEQ ID NO: 143932 - DNA, 569 bp, Homo sapiens
  Payload ID: 8445
  Gene Symbol: IL2RB
  Gene Name: interleukin 2 receptor, beta
  ENST ID: ENST00000429622
  CDS Start-End: 131-569
acttcgctctcctgccagcatgtgaaggtgccttgcttccccttcgccttccaccacgattgtaagtttcctgaggcctccccagccatgtggaaccggcttccttcctcggctccaccctgtggatgtaatggcggcccctgctctgtcctggcgtctgcccctcctcatcctcctcctgcccctggctacctcttgggcatctgcagcggtgaatggcacttcccagttcacatgcttctacaactcgagagccaacatctcctgtgtctggagccaagatggggctctgcaggacacttcctgccaagtccatgcctggccggacagacggcggtggaaccaaacctgtgagctgctccccgtgagtcaagcatcctgggcctgcaacctgatcctcggagccccagattctcagaaactgaccacagttgacatcgtcaccctgagggtgctgtgccgtgagggggtgcgatggagggtgatggccatccaggacttcaagccctttgagaaccttcgcctgatggcccccatctccctccaagttgtccacgtggagacccaca

SEQ ID NO: 143933 - DNA, 660 bp, Homo sapiens
  Payload ID: 8445
  Gene Symbol: IL2RB
  Gene Name: interleukin 2 receptor, beta
  ENST ID: ENST00000453962
  CDS Start-End: 95-660
acttcgctctcctgccagcatgtgaaggtgccttgcttccccttcgccttccaccacgattggcttccttcctcggctccaccctgtggatgtaatggcggcccctgctctgtcctggcgtctgcccctcctcatcctcctcctgcccctggctacctcttgggcatctgcagcggtgaatggcacttcccagttcacatgcttctacaactcgagagccaacatctcctgtgtctggagccaagatggggctctgcaggacacttcctgccaagtccatgcctggccggacagacggcggtggaaccaaacctgtgagctgctccccgtgagtcaagcatcctgggcctgcaacctgatcctcggagccccagattctcagaaactgaccacagttgacatcgtcaccctgagggtgctgtgccgtgagggggtgcgatggagggtgatggccatccaggacttcaagccctttgagaaccttcgcctgatggcccccatctccctccaagttgtccacgtggagacccacagatgcaacataagctgggaaatctcccaagcctcccactactttgaaagacacctggagttcgaggcccggacgctgtccccaggccacacctgggaggaggcccccctgctgactctcaagcagaa

SEQ ID NO: 143934 - DNA, 1432 bp, Homo sapiens
  Payload ID: 8446
  Gene Symbol: IL2RG
  Gene Name: interleukin 2 receptor, gamma
  ENST ID: ENST00000374188
  CDS Start-End: 809-1105
agaggaaacgtgtgggtggggaggggtagtgggtgagggacccaggttcctgacacagacagactacacccagggaatgaagagcaagcgccatgttgaagccatcattaccattcacatccctcttattcctgcagctgcccctgctgggagtggggctgaacacgacaattctgacgcccaatgggaatgaagacaccacagctgatttcttcctgaccactatgcccactgactccctcagtgtttccactctgcccctcccagaggttcagtgttttgtgttcaatgtcgagtacatgaattgcacttggaacagcagctctgagccccagcctaccaacctcactctgcattattggtacaagaactcggataatgataaagtccagaagtgcagccactatctattctctgaagaaatcacttctggctgtcagttgcaaaaaaaggagatccacctctaccaaacatttgttgttcagctccaggacccacgggaacccaggagacaggccacacagatgctaaaactgcagaatctggtgatcccctgggctccagagaacctaacacttcacaaactgagtgaatcccagctagaactgaactggaacaacagattcttgaaccactgtttggagcacttggtgcagtaccggactgactgggaccacagctggactgaacaatcagtggattatagacataagttctccttgcctagtgtggatgggcagaaacgctacacgtttcgtgttcggagccgctttaacccactctgtggaagtgctcagcattggagtgaatggagccacccaatccactgggggagcaatacttcaaaaggacgatgccccgaattcccaccctgaagaacctagaggatcttgttactgaataccacgggaacttttcggcctggagtggtgtgtctaagggactggctgagagtctgcagccagactacagtgaacgactctgcctcgtcagtgagattcccccaaaaggaggggcccttggggaggggcctggggcctccccatgcaaccagcatagcccctactgggcccccccatgttacaccctaaagcctgaaacctgaaccccaatcctctgacagaagaaccccagggtcctgtagccctaagtggtactaactttccttcattcaacccacctgcgtctcatactcacctcaccccactgtggctgatttggaattttgtgcccccatgtaagcaccccttcatttggcattccccacttgagaattacccttttgccccgaacatgtttttcttctccctcagtctggcccttccttttcgcaggattcttcctccctccctctttccctcccttcctctttccatctaccctccgattgttcctgaaccgatgagaaataaagtttctgttgataatcatc

SEQ ID NO: 143935 - DNA, 1534 bp, Homo sapiens
  Payload ID: 8446
  Gene Symbol: IL2RG
  Gene Name: interleukin 2 receptor, gamma
  Uniprot ID: P31785
  ENST ID: ENST00000374202
  CDS Start-End: 93-1202
agaggaaacgtgtgggtggggaggggtagtgggtgagggacccaggttcctgacacagacagactacacccagggaatgaagagcaagcgccatgttgaagccatcattaccattcacatccctcttattcctgcagctgcccctgctgggagtggggctgaacacgacaattctgacgcccaatgggaatgaagacaccacagctgatttcttcctgaccactatgcccactgactccctcagtgtttccactctgcccctcccagaggttcagtgttttgtgttcaatgtcgagtacatgaattgcacttggaacagcagctctgagccccagcctaccaacctcactctgcattattggtacaagaactcggataatgataaagtccagaagtgcagccactatctattctctgaagaaatcacttctggctgtcagttgcaaaaaaaggagatccacctctaccaaacatttgttgttcagctccaggacccacgggaacccaggagacaggccacacagatgctaaaactgcagaatctggtgatcccctgggctccagagaacctaacacttcacaaactgagtgaatcccagctagaactgaactggaacaacagattcttgaaccactgtttggagcacttggtgcagtaccggactgactgggaccacagctggactgaacaatcagtggattatagacataagttctccttgcctagtgtggatgggcagaaacgctacacgtttcgtgttcggagccgctttaacccactctgtggaagtgctcagcattggagtgaatggagccacccaatccactgggggagcaatacttcaaaagagaatcctttcctgtttgcattggaagccgtggttatctctgttggctccatgggattgattatcagccttctctgtgtgtatttctggctggaacggacgatgccccgaattcccaccctgaagaacctagaggatcttgttactgaataccacgggaacttttcggcctggagtggtgtgtctaagggactggctgagagtctgcagccagactacagtgaacgactctgcctcgtcagtgagattcccccaaaaggaggggcccttggggaggggcctggggcctccccatgcaaccagcatagcccctactgggcccccccatgttacaccctaaagcctgaaacctgaaccccaatcctctgacagaagaaccccagggtcctgtagccctaagtggtactaactttccttcattcaacccacctgcgtctcatactcacctcaccccactgtggctgatttggaattttgtgcccccatgtaagcaccccttcatttggcattccccacttgagaattacccttttgccccgaacatgtttttcttctccctcagtctggcccttccttttcgcaggattcttcctccctccctctttccctcccttcctctttccatctaccctccgattgttcctgaaccgatgagaaataaagtttctgttgataatcatcaaaaa

SEQ ID NO: 143936 - DNA, 540 bp, Homo sapiens
  Payload ID: 8446
  Gene Symbol: IL2RG
  Gene Name: interleukin 2 receptor, gamma
  Uniprot ID: P31785
  ENST ID: ENST00000456850
  CDS Start-End: 1-540
atgggaatgaagacaccacagctggaacaatcagtggattatagacataagttctccttgcctagtgtggatgggcagaaacgctacacgtttcgtgttcggagccgctttaacccactctgtggaagtgctcagcattggagtgaatggagccacccaatccactgggggagcaatacttcaaaagagaatcctttcctgtttgcattggaagccgtggttatctctgttggctccatgggattgattatcagccttctctgtgtgtatttctggctggaacggacgatgccccgaattcccaccctgaagaacctagaggatcttgttactgaataccacgggaacttttcggcctggagtggtgtgtctaagggactggctgagagtctgcagccagactacagtgaacgactctgcctcgtcagtgagattcccccaaaaggaggggcccttggggaggggcctggggcctccccatgcaaccagcatagcccctactgggcccccccatgttacaccctaaagcctgaaacctga

SEQ ID NO: 143937 - DNA, 446 bp, Homo sapiens
  Payload ID: 8446
  Gene Symbol: IL2RG
  Gene Name: interleukin 2 receptor, gamma
  ENST ID: ENST00000482750
  CDS Start-End: 1-196
ctggactgaacaatcagtggattatagacataagttctccttgcctagtgtggatgggcagaaacgctacacgtttcgtgttcggagccgctttaacccactctgtggaagtgctcagcattggagtgaatggagccacccaatccactgggggagcaatacttcaaaaggacgatgccccgaattcccaccctgaagaacctagaggatcttgttactgaataccacgggaacttttcggcctggagtggtgtgtctaagggactggctgagagtctgcagccagactacagtgaacgactctgcctcgtcagtgagattcccccaaaaggaggggcccttggggaggggcctggggcctccccatgcaaccagcatagcccctactgggcccccccatgttacaccctaaagcctgaaacctgaaccccaatcctctgacagaa

SEQ ID NO: 143938 - DNA, 404 bp, Homo sapiens
  Payload ID: 8446
  Gene Symbol: IL2RG
  Gene Name: interleukin 2 receptor, gamma
  ENST ID: ENST00000473378
  CDS Start-End: 107-404
tgaagagcaagcgccatgttgaagccatcattaccattcacatccctcttattcctgcagctgcccctgctgggagtggggctgaacacgacaattctgacgcccaatgggaatgaagacaccacagctggtgggaaatctgggactggagggggctgatttcttcctgaccactatgcccactgactccctcagtgtttccactctgcccctcccagaggttcagtgttttgtgttcaatgtcgagtacatgaattgcacttggaacagcagctctgagccccagcctaccaacctcactctgcattattggtacaagaactcggataatgataaagtccagaagtgcagccactatctattctctgaagaaatcacttctggctgtcagttgcaaaaaaagg

SEQ ID NO: 143939 - DNA, 959 bp, Homo sapiens
  Payload ID: 8446
  Gene Symbol: IL2RG
  Gene Name: interleukin 2 receptor, gamma
  ENST ID: ENST00000487883
  CDS Start-End: 432-959
agggaatgaagagcaagcgccatgttgaagccatcattaccattcacatccctcttattcctgcagctgcccctgctgggagtggggctgaacacgacaattctgacgcccaatgggaatgaagacaccacagctggtgggaaatctgggactggagggggctggtgagaagggtggctgtgggaaggggccgtacagagatctggtgcctgccactggccattacaatcatgtgggcagaattgaaaagtggagtgggaagggcaagggggagggttccctgcctcacgctacttcttctttctttcttgtttgtttgtttctttctttcttttgaggcagggtctcactatgttgcctaggctggtctcaaactcctggcctctagtgatcctcctgcctcagcctttcaaagcaccaggattacagacatgagccaccgtgcttggcctcctccttctgaccatcatttctctttccctccctgccttcattttctccccaatctagatttcttcctgaccactatgcccactgactccctcagtgtttccactctgcccctcccagaggttcagtgttttgtgttcaatgtcgagtacatgaattgcacttggaacagcagctctgagccccagcctaccaacctcactctgcattattggtacaagaactcggataatgataaagtccagaagtgcagccactatctattctctgaagaaatcacttctggctgtcagttgcaaaaaaaggagatccacctctaccaaacatttgttgttcagctccaggacccacgggaacccaggagacaggccacacagatgctaaaactgcagaatctggtgatcccctgggctccagagaacctaacacttcacaaactgagtgaatcccagctagaactgaactggaacaacagattcttgaaccactgtttggagcacttggtgcag

SEQ ID NO: 143940 - DNA, 783 bp, Homo sapiens
  Payload ID: 8446
  Gene Symbol: IL2RG
  Gene Name: interleukin 2 receptor, gamma
  ENST ID: ENST00000464642
  CDS Start-End: 125-783
agtctcaacagggacccagctcaggcagcagctaaggctgcccctgctgggagtggggctgaacacgacaattctgacgcccaatgggaatgaagacaccacagctgatttcttcctgaccactatgcccactgactccctcagtgtttccactctgcccctcccagaggttcagtgttttgtgttcaatgtcgagtacatgaattgcacttggaacagcagctctgagccccagcctaccaacctcactctgcattattggtacaagaactcggataatgataaagtccagaagtgcagccactatctattctctgaagaaatcacttctggctgtcagttgcaaaaaaaggagatccacctctaccaaacatttgttgttcagctccaggacccacgggaacccaggagacaggccacacagatgctaaaactgcagaatctggtgatcccctgggctccagagaacctaacacttcacaaactgagtgaatcccagctagaactgaactggaacaacagattcttgaaccactgtttggagcacttggtgcagtaccggactgactgggaccacagctggactgaacaatcagtggattatagacataagttctccttgcctagtgtggatgggcagaaacgctacacgtttcgtgttcggagccgctttaacccactctgtggaagtgctcagcattggagtgaatggagccacccaatccactgggggagcaatacttcaaaagagaatcctttcctgtttgcattggaagccgtggt

SEQ ID NO: 143941 - DNA, 925 bp, Homo sapiens
  Payload ID: 8447
  Gene Symbol: IL20
  Gene Name: interleukin 20
  Uniprot ID: Q9NYY1
  ENST ID: ENST00000367096
  CDS Start-End: 45-575
ctttgaattcctagctcctgtggtctccagatttcaggcctaagatgaaagcctctagtcttgccttcagccttctctctgctgcgttttatctcctatggactccttccactggactgaagacactcaatttgggaagctgtgtgatcgccacaaaccttcaggaaatacgaaatggattttctgagatacggggcagtgtgcaagccaaagatggaaacattgacatcagaatcttaaggaggactgagtctttgcaagacacaaagcctgcgaatcgatgctgcctcctgcgccatttgctaagactctatctggacagggtatttaaaaactaccagacccctgaccattatactctccggaagatcagcagcctcgccaattcctttcttaccatcaagaaggacctccggctctgtcatgcccacatgacatgccattgtggggaggaagcaatgaagaaatacagccagattctgagtcactttgaaaagctggaacctcaggcagcagttgtgaaggctttgggggaactagacattcttctgcaatggatggaggagacagaataggaggaaagtgatgctgctgctaagaatattcgaggtcaagagctccagtcttcaatacctgcagaggaggcatgaccccaaaccaccatctctttactgtactagtcttgtgctggtcacagtgtatcttatttatgcattacttgcttccttgcatgattgtctttatgcatccccaatcttaattgagaccatacttgtataagatttttgtaatatctttctgctattggatatatttattagttaatatatttatttattttttgctatttaatgtatttatttttttacttggacatgaaactttaaaaaaattcacagattatatttataacctgactagagca

SEQ ID NO: 143942 - DNA, 1553 bp, Homo sapiens
  Payload ID: 8447
  Gene Symbol: IL20
  Gene Name: interleukin 20
  Uniprot ID: Q9NYY1
  ENST ID: ENST00000367098
  CDS Start-End: 364-894
gatggcgcagccacagcttctgtgagattcgatttctccccagttcccctgtgggtctgaggggaccagaagggtgagctacgttggctttctggaaggggaggctatatgcgtcaattccccaaaacaagttttgacatttcccctgaaatgtcattctctatctattcactgcaagtgcctgctgttccaggccttacctgctgggcactaacggcggagccaggatggggacagaataaaggagccacgacctgtgccaccaactcgcactcagactctgaactcagacctgaaatcttctcttcacgggaggcttggcagtttttcttactcctgtggtctccagatttcaggcctaagatgaaagcctctagtcttgccttcagccttctctctgctgcgttttatctcctatggactccttccactggactgaagacactcaatttgggaagctgtgtgatcgccacaaaccttcaggaaatacgaaatggattttctgagatacggggcagtgtgcaagccaaagatggaaacattgacatcagaatcttaaggaggactgagtctttgcaagacacaaagcctgcgaatcgatgctgcctcctgcgccatttgctaagactctatctggacagggtatttaaaaactaccagacccctgaccattatactctccggaagatcagcagcctcgccaattcctttcttaccatcaagaaggacctccggctctgtcatgcccacatgacatgccattgtggggaggaagcaatgaagaaatacagccagattctgagtcactttgaaaagctggaacctcaggcagcagttgtgaaggctttgggggaactagacattcttctgcaatggatggaggagacagaataggaggaaagtgatgctgctgctaagaatattcgaggtcaagagctccagtcttcaatacctgcagaggaggcatgaccccaaaccaccatctctttactgtactagtcttgtgctggtcacagtgtatcttatttatgcattacttgcttccttgcatgattgtctttatgcatccccaatcttaattgagaccatacttgtataagatttttgtaatatctttctgctattggatatatttattagttaatatatttatttattttttgctatttaatgtatttatttttttacttggacatgaaactttaaaaaaattcacagattatatttataacctgactagagcaggtgatgtatttttatacagtaaaaaaaaaaaaccttgtaaattctagaagagtggctaggggggttattcatttgtattcaactaaggacatatttactcatgctgatgctctgtgagatatttgaaattgaaccaatgactacttaggatgggttgtggaataagttttgatgtggaattgcacatctaccttacaattactgaccatccccagtagactccccagtcccataattgtgtatcttccagccaggaatcctacacggccagcatgtatttctacaaataaagttttctttgcataaca

SEQ ID NO: 143943 - DNA, 1153 bp, Homo sapiens
  Payload ID: 8447
  Gene Symbol: IL20
  Gene Name: interleukin 20
  Uniprot ID: Q9NYY1
  ENST ID: ENST00000391930
  CDS Start-End: 45-500
ctttgaattcctagctcctgtggtctccagatttcaggcctaagatgaaagcctctagtcttgccttcagccttctctctgctgcgttttatctcctatggactccttccactggactgaagacactcaatttgggaagctgtgtgatcgccacaaaccttcaggaaatacgaaatggattttctgagatacggggcagtgtgcaagccaaagatggaaacattgacatcagaatcttaaggaggactgagtctttgcaagacacaaagcctgcgaatcgatgctgcctcctgcgccatttgctaagactctatctggacagggtatttaaaaactaccagacccctgaccattatactctccggaagatcagcagcctcgccaattcctttcttaccatcaagaaggacctccggctctgtctggaacctcaggcagcagttgtgaaggctttgggggaactagacattcttctgcaatggatggaggagacagaataggaggaaagtgatgctgctgctaagaatattcgaggtcaagagctccagtcttcaatacctgcagaggaggcatgaccccaaaccaccatctctttactgtactagtcttgtgctggtcacagtgtatcttatttatgcattacttgcttccttgcatgattgtctttatgcatccccaatcttaattgagaccatacttgtataagatttttgtaatatctttctgctattggatatatttattagttaatatatttatttattttttgctatttaatgtatttatttttttacttggacatgaaactttaaaaaaattcacagattatatttataacctgactagagcaggtgatgtatttttatacagtaaaaaaaaaaaaccttgtaaattctagaagagtggctaggggggttattcatttgtattcaactaaggacatatttactcatgctgatgctctgtgagatatttgaaattgaaccaatgactacttaggatgggttgtggaataagttttgatgtggaattgcacatctaccttacaattactgaccatccccagtagactccccagtcccataattgtgtatcttccagccaggaatcctacacggccagcatgtatttctacaaataaagttttctttgc

SEQ ID NO: 143944 - DNA, 2047 bp, Homo sapiens
  Payload ID: 8448
  Gene Symbol: IL20RB
  Gene Name: interleukin 20 receptor beta
  Uniprot ID: Q6UXL0
  ENST ID: ENST00000329582
  CDS Start-End: 250-1185
aaagttacattttctctggaactctcctaggccactccctgctgatgcaacatctgggtttgggcagaaaggagggtgcttcggagcccgccctttctgagcttcctgggccggctctagaacaattcaggcttcgctgcgactcagacctcagctccaacatatgcattctgaagaaagatggctgagatggacagaatgctttattttggaaagaaacaatgttctaggtcaaactgagtctaccaaatgcagactttcacaatggttctagaagaaatctggacaagtcttttcatgtggtttttctacgcattgattccatgtttgctcacagatgaagtggccattctgcctgcccctcagaacctctctgtactctcaaccaacatgaagcatctcttgatgtggagcccagtgatcgcgcctggagaaacagtgtactattctgtcgaataccagggggagtacgagagcctgtacacgagccacatctggatccccagcagctggtgctcactcactgaaggtcctgagtgtgatgtcactgatgacatcacggccactgtgccatacaaccttcgtgtcagggccacattgggctcacagacctcagcctggagcatcctgaagcatccctttaatagaaactcaaccatccttacccgacctgggatggagatcaccaaagatggcttccacctggttattgagctggaggacctggggccccagtttgagttccttgtggcctactggaggagggagcctggtgccgaggaacatgtcaaaatggtgaggagtgggggtattccagtgcacctagaaaccatggagccaggggctgcatactgtgtgaaggcccagacattcgtgaaggccattgggaggtacagcgccttcagccagacagaatgtgtggaggtgcaaggagaggccattcccctggtactggccctgtttgcctttgttggcttcatgctgatccttgtggtcgtgccactgttcgtctggaaaatgggccggctgctccagtactcctgttgccccgtggtggtcctcccagacaccttgaaaataaccaattcaccccagaagttaatcagctgcagaagggaggaggtggatgcctgtgccacggctgtgatgtctcctgaggaactcctcagggcctggatctcataggtttgcggaagggcccaggtgaagccgagaacctggtctgcatgacatggaaaccatgaggggacaagttgtgtttctgttttccgccacggacaagggatgagagaagtaggaagagcctgttgtctacaagtctagaagcaaccatcagaggcagggtggtttgtctaacagaacactgactgaggcttaggggatgtgacctctagactgggggctgccacttgctggctgagcaaccctgggaaaagtgacttcatcccttcggtcctaagttttctcatctgtaatgggggaattacctacacacctgctaaacacacacacacagagtctctctctatatatacacacgtacacataaatacacccagcacttgcaaggctagagggaaactggtgacactctacagtctgactgattcagtgtttctggagagcaggacataaatgtatgatgagaatgatcaaggactctacacactgggtggcttggagagcccactttcccagaataatccttgagagaaaaggaatcatgggagcaatggtgttgagttcacttcaagcccaatgccggtgcagaggggaatggcttagcgagctctacagtaggtgacctggaggaaggtcacagccacactgaaaatgggatgtgcatgaacacggaggatccatgaactactgtaaagtgttgacagtgtgtgcacactgcagacagcaggtgaaatgtatgtgtgcaatgcgacgagaatgcagaagtcagtaacatgtgcatgtttgttgtgctccttttttctgttggtaaagtacagaattcagcaaataaaaagggccaccctggccaaaagcggtctttaaa

SEQ ID NO: 143945 - DNA, 956 bp, Homo sapiens
  Payload ID: 8448
  Gene Symbol: IL20RB
  Gene Name: interleukin 20 receptor beta
  ENST ID: ENST00000491483
  CDS Start-End: 29-196
gctttgtttacctaagcaatcctgggcaatggcgggcgccccttccccagcctcgttgccgccttgcagtttgatctcagactgctgtgctagcaatcagcgcgattccgtgggcgtaggaccctctgagccaggctggagtgcagtggtgcaatctcagcttactgcaacctccgccagtgaggcccttcattagacactaatttgaagctatggcattcccccactatgagcccacctgtcagccaggctatctgccttgatcctagatgaagtggccattctgcctgcccctcagaacctctctgtactctcaaccaacatgaagcatctcttgatgtggagcccagtgatcgcgcctggagaaacagtgtactattctgtcgaataccagggggagtacgagagcctgtacacgagccacatctggatccccagcagctggtgctcactcactgaaggtcctgagtgtgatgtcactgatgacatcacggccactgtgccatacaaccttcgtgtcagggccacattgggctcacagacctcagcctggagcatcctgaagcatccctttaatagaaactcaaccatccttacccgacctgggatggagatcaccaaagatggcttccacctggttattgagctggaggacctggggccccagtttgagttccttgtggcctactggaggagggagcctggtgccgaggaacatgtcaaaatggtgaggagtgggggtattccagtgcacctagaaaccatggagccaggggctgcatactgtgtgaaggcccagacattcgtgaaggccattgggaggtacagcgccttcagccagacagaatgtgtggaggtgcaaggagaggccattcccctggtactggccctgtttgcctttgttggcttcatgctgatccttgtggtcgtgccactgttcgtctggaaaatgggcc

SEQ ID NO: 143946 - DNA, 1887 bp, Homo sapiens
  Payload ID: 8448
  Gene Symbol: IL20RB
  Gene Name: interleukin 20 receptor beta
  ENST ID: ENST00000469964
  CDS Start-End: 106-255
cagacctcagctccaacatatgcattctgaagaaagatggctgagatggacagaatgctttattttggaaagaaacaatgttctaggtcaaactgagtctaccaaatgcagactttcacaatggttctagaagaaatctggacaagtcttttcatgtggtttttctacgcattgattccatgtttgctcacaggctggagtgcagtggtgcaatctcagcttactgcaacctccgccagtgaggcccttcattagacactaatttgaagctatggcattcccccactatgagcccacctgtcagccaggctatctgccttgatcctagatgaagtggccattctgcctgcccctcagaacctctctgtactctcaaccaacatgaagcatctcttgatgtggagcccagtgatcgcgcctggagaaacagtgtactattctgtcgaataccagggggagtacgagagcctgtacacgagccacatctggatccccagcagctggtgctcactcactgaaggtcctgagtgtgatgtcactgatgacatcacggccactgtgccatacaaccttcgtgtcagggccacattgggctcacagacctcagcctggagcatcctgaagcatccctttaatagaaactcaaccatccttacccgacctgggatggagatcaccaaagatggcttccacctggttattgagctggaggacctggggccccagtttgagttccttgtggcctactggaggagggagcctggtgccgaggagaggccattcccctggtactggccctgtttgcctttgttggcttcatgctgatccttgtggtcgtgccactgttcgtctggaaaatgggccggctgctccagtactcctgttgccccgtggtggtcctcccagacaccttgaaaataaccaattcaccccagaagttaatcagctgcagaagggaggaggtggatgcctgtgccacggctgtgatgtctcctgaggaactcctcagggcctggatctcataggtttgcggaagggcccaggtgaagccgagaacctggtctgcatgacatggaaaccatgaggggacaagttgtgtttctgttttccgccacggacaagggatgagagaagtaggaagagcctgttgtctacaagtctagaagcaaccatcagaggcagggtggtttgtctaacagaacactgactgaggcttaggggatgtgacctctagactgggggctgccacttgctggctgagcaaccctgggaaaagtgacttcatcccttcggtcctaagttttctcatctgtaatgggggaattacctacacacctgctaaacacacacacacagagtctctctctatatatacacacgtacacataaatacacccagcacttgcaaggctagagggaaactggtgacactctacagtctgactgattcagtgtttctggagagcaggacataaatgtatgatgagaatgatcaaggactctacacactgggtggcttggagagcccactttcccagaataatccttgagagaaaaggaatcatgggagcaatggtgttgagttcacttcaagcccaatgccggtgcagaggggaatggcttagcgagctctacagtaggtgacctggaggaaggtcacagccacactgaaaatgggatgtgcatgaacacggaggatccatgaactactgtaaagtgttgacagtgtgtgcacactgcagacagcaggtgaaatgtatgtgtgcaatgcgacgagaatgcagaagtcagtaacatgtgcatgtttgttgtgctccttttttctgttggtaaagtacagaattcagcaaataaaaagggccaccctggccaaaagcggtctttaaa

SEQ ID NO: 143947 - DNA, 1787 bp, Homo sapiens
  Payload ID: 8448
  Gene Symbol: IL20RB
  Gene Name: interleukin 20 receptor beta
  ENST ID: ENST00000475972
  CDS Start-End: 1-363
gccattctgcctgcccctcagaacctctctgtactctcaaccaacatgaagcatctcttgatgtggagcccagtgatcgcgcctggagaaacagtgtactattctgtcgaataccagggggagtacgagagcctgtacacgagccacatctggatccccagcagctggtgctcactcactgaaggtcctgagtgtgatgtcactgatgacatcacggccactgtgccatacaaccttcgtgtcagggccacattgggctcacagacctcagcctggagcatcctgaagcatccctttaatagaaactcaagaactgcctttcttctgagtgtccacttgtgtccggaattggtgggttcttgatctcactgacttcaagaatgaagccgcagaccctcgcgccatccttacccgacctgggatggagatcaccaaagatggcttccacctggttattgagctggaggacctggggccccagtttgagttccttgtggcctactggaggagggagcctggtgccgaggaacatgtcaaaatggtgaggagtgggggtattccagtgcacctagaaaccatggagccaggggctgcatactgtgtgaaggcccagacattcgtgaaggccattgggaggtacagcgccttcagccagacagaatgtgtggaggtgcaaggagaggccattcccctggtactggccctgtttgcctttgttggcttcatgctgatccttgtggtcgtgccactgttcgtctggaaaatgggccggctgctccagtactcctgttgccccgtggtggtcctcccagacaccttgaaaataaccaattcaccccagaagttaatcagctgcagaagggaggaggtggatgcctgtgccacggctgtgatgtctcctgaggaactcctcagggcctggatctcataggtttgcggaagggcccaggtgaagccgagaacctggtctgcatgacatggaaaccatgaggggacaagttgtgtttctgttttccgccacggacaagggatgagagaagtaggaagagcctgttgtctacaagtctagaagcaaccatcagaggcagggtggtttgtctaacagaacactgactgaggcttaggggatgtgacctctagactgggggctgccacttgctggctgagcaaccctgggaaaagtgacttcatcccttcggtcctaagttttctcatctgtaatgggggaattacctacacacctgctaaacacacacacacagagtctctctctatatatacacacgtacacataaatacacccagcacttgcaaggctagagggaaactggtgacactctacagtctgactgattcagtgtttctggagagcaggacataaatgtatgatgagaatgatcaaggactctacacactgggtggcttggagagcccactttcccagaataatccttgagagaaaaggaatcatgggagcaatggtgttgagttcacttcaagcccaatgccggtgcagaggggaatggcttagcgagctctacagtaggtgacctggaggaaggtcacagccacactgaaaatgggatgtgcatgaacacggaggatccatgaactactgtaaagtgttgacagtgtgtgcacactgcagacagcaggtgaaatgtatgtgtgcaatgcgacgagaatgcagaagtcagtaacatgtgcatgtttgttgtgctccttttttctgttggtaaagtacagaattcagcaaataaaaagggccaccctggccaaaagcggtc

SEQ ID NO: 143948 - DNA, 3485 bp, Homo sapiens
  Payload ID: 8449
  Gene Symbol: IL20RA
  Gene Name: interleukin 20 receptor, alpha
  Uniprot ID: Q9UHF4
  ENST ID: ENST00000316649
  CDS Start-End: 237-1898
tccagctgggtagccgggggagcgcgcgtgggggctccgcgagtcgctcgcccttggtttctggggaagcctgggggacgcggctgtggcggaggcgccctgggactcaggtcgcctggagcgtggcacgcagagccccaggcgcggagctgaggccgcgcggccgcgcttggccccagcgggcgtgggactgagcagtctgctgccccccgacatgtgacccagccccgccgcccatgcgggctcccggccgcccggccctgcggccgctgccgctgccgccgctgctgctgttgctcctggcggcgccttggggacgggcagttccctgtgtctctggtggtttgcctaaacctgcaaacatcaccttcttatccatcaacatgaagaatgtcctacaatggactccaccagagggtcttcaaggagttaaagttacttacactgtgcagtatttcatatatgggcaaaagaaatggctgaataaatcagaatgcagaaatatcaatagaacctactgtgatctttctgctgaaacttctgactacgaacaccagtattatgccaaagttaaggccatttggggaacaaagtgttccaaatgggctgaaagtggacggttctatccttttttagaaacacaaattggcccaccagaggtggcactgactacagatgagaagtccatttctgttgtcctgacagctccagagaagtggaagagaaatccagaagaccttcctgtttccatgcaacaaatatactccaatctgaagtataacgtgtctgtgttgaatactaaatcaaacagaacgtggtcccagtgtgtgaccaaccacacgctggtgctcacctggctggagccgaacactctttactgcgtacacgtggagtccttcgtcccagggccccctcgccgtgctcagccttctgagaagcagtgtgccaggactttgaaagatcaatcatcagagttcaaggctaaaatcatcttctggtatgttttgcccgtatctattaccgtgtttcttttttctgtgatgggctattccatctaccgatatatccacgttggcaaagagaaacacccagcaaatttgattttgatttatggaaatgaatttgacaaaagattctttgtgcctgctgaaaaaatcgtgattaactttatcaccctcaatatctcggatgattctaaaatttctcatcaggatatgagtttactgggaaaaagcagtgatgtatccagccttaatgatcctcagcccagcgggaacctgaggccccctcaggaggaagaggaggtgaaacatttagggtatgcttcgcatttgatggaaattttttgtgactctgaagaaaacacggaaggtacttctctcacccagcaagagtccctcagcagaacaatacccccggataaaacagtcattgaatatgaatatgatgtcagaaccactgacatttgtgcggggcctgaagagcaggagctcagtttgcaggaggaggtgtccacacaaggaacattattggagtcgcaggcagcgttggcagtcttgggcccgcaaacgttacagtactcatacacccctcagctccaagacttagaccccctggcgcaggagcacacagactcggaggaggggccggaggaagagccatcgacgaccctggtcgactgggatccccaaactggcaggctgtgtattccttcgctgtccagcttcgaccaggattcagagggctgcgagccttctgagggggatgggctcggagaggagggtcttctatctagactctatgaggagccggctccagacaggccaccaggagaaaatgaaacctatctcatgcaattcatggaggaatgggggttatatgtgcagatggaaaactgatgccaacacttccttttgccttttgtttcctgtgcaaacaagtgagtcacccctttgatcccagccataaagtacctgggatgaaagaagttttttccagtttgtcagtgtctgtgagaattacttatttcttttctctattctcatagcacgtgtgtgattggttcatgcatgtaggtctcttaacaatgatggtgggcctctggagtccaggggctggccggttgttctatgcagagaaagcagtcaataaatgtttgccagactgggtgcagaatttattcaggtgggtgtactctggcctcttggttcattattttcaaacaagcacacttgtacaattattttctgggtacttcccatatgcacatagcactgtaaaaaatatttcccaaagatcactcattttataaataccactttttcagaattgggtttattgcgagcaggaggagatacttaaaacatgcacatataccaggttggtggtaagttggtcgcatgtgaaaacctcaactatttaatcatcatgattcatattttgagtgaatacatcaggcacagaccttcatgatatcacacactcttggctactttaagaggccatctttaatactttatgagtagttctggagtgtaaacataaacgagtattcttttgtagtcagaaaagtgtcctctcaataatttagtaggggcttattgtctctcaaaactaacctaaaagaaaatgacacattttataatagaatattacatttatttctggaagtgtgttttcaaaaagatatttacatagtctgtaaactagaaagtgttaggtaaagctctaggttactgtgttactattataatattaaacattcgaataggcagtcgttcaaagactctttggaatatctatgaatgaatatcctctattcttataatattaaaacccataagtaaatataggacatacaagagaaatgagttaaatgactatgtaagggagagtttattaaaatttgatgaaatttactgtaggaactaaactatgccataaaacaatagctttctagttcatttccagtaactgttcccatctcctttaccacttgttaagaaaattaaattcttcagtcacgctgctttaaaatgggacaaaatctattaagttgaaccatatataattgtggatatttggctgtttttaatctgacaagcagtaacttcatatggtttgccttaatatatatttgttttagtcatgaactcataatccattgatgctctttcatgagaagagatatcacccatatttccttattgatattattggtacaggcagacaaccctggtaggagagatggattctggggtcatgacctttcgtgattatccgcaaatgcaaacagtttcagatctaatggtttaatttagggagtaattatattaatcagagtgttctgttattctcaatctttatagaaacgattctgctggttttgaagaacagatgtattacactaactgtaaaagtagttcaagagtgagaaagaataaattgttattaagagcaaaagaaaaataaagtgattgatgata

SEQ ID NO: 143949 - DNA, 1244 bp, Homo sapiens
  Payload ID: 8449
  Gene Symbol: IL20RA
  Gene Name: interleukin 20 receptor, alpha
  ENST ID: ENST00000367746
  CDS Start-End: 237-866
tccagctgggtagccgggggagcgcgcgtgggggctccgcgagtcgctcgcccttggtttctggggaagcctgggggacgcggctgtggcggaggcgccctgggactcaggtcgcctggagcgtggcacgcagagccccaggcgcggagctgaggccgcgcggccgcgcttggccccagcgggcgtgggactgagcagtctgctgccccccgacatgtgacccagccccgccgcccatgcgggctcccggccgcccggccctgcggccgctgccgctgccgccgctgctgctgttgctcctggcggcgccttggggacgggcagttccctgtgtctctggtggtttgcctaaacctgcaaacatcaccttcttatccatcaacatgaagaatgtcctacaatggactccaccagagggtcttcaaggagttaaagttacttacactgtgcagtatttcatatatgggcaaaagaaatggctgaataaatcagaatgcagaaatatcaatagaacctactgtgatctttctgctgaaacttctgactacgaacaccagtattatgccaaagttaaggccatttggggaacaaagtgttccaaatgggctgaaagtggacggttctatccttttttagaaacacaaattggcccaccagaggtggcactgactacagatgagaagtccatttctgttgtcctgacagctccagagaagtggaagagaaatccagaagaccttcctgtttccatgcaacaaatatactccaatctgaagtataacgtgtctgtgttgaatactaaatcaaacagaacggtaagcctgaaatggaatggggcatacattcatgtaccactctgtagctaatgtgggaacaaacaaccctgatgcattgattctctgcatgtgaatctgggaagtcatgatgttcaaaagatacgccgcacaaaataaagttctatatacagaaattttacagaactaacttcagatcttctttacagaaactctgttgacaggatatggtgttgttattggagtgtagagagattgtacacttcactttgatgaagagctttcacttgcacagtctttctctgagaagaagaaaaaaatgtgagcaaggacccaggacaatgaataagaactctatccatgtgttgtttagaattgttctcagcattggtccagttcctgaccatgctctgctgagctaaaggaaaagagtatattgaaactgttgct

SEQ ID NO: 143950 - DNA, 3522 bp, Homo sapiens
  Payload ID: 8449
  Gene Symbol: IL20RA
  Gene Name: interleukin 20 receptor, alpha
  Uniprot ID: Q9UHF4
  ENST ID: ENST00000367748
  CDS Start-End: 607-1935
ccgatattgaactttaactgaccatcagaccggcctgaataccagaatctctttgcaatgcactcgcctcgctcattaccagaaggaggttttacctgcctagtgacctggttggtctgggcatgaaccccgagaggtggaaactctcagactctcaggactgacagccgagtggctggggactataaatccgcgagaactgccctcgcgctgccatccagctgggtagccgggggagcgcgcgtgggggctccgcgagtcgctcgcccttggtttctggggaagcctgggggacgcggctgtggcggaggcgccctgggactcaggtcgcctggagcgtggcacgcagagccccaggcgcggagctgaggccgcgcggccgcgcttggccccagcgggcgtgggactgagcagtctgctgccccccgacatgtgacccagccccgccgcccatgcgggctcccggccgcccggccctgcggccgctgccgctgccgccgctgctgctgttgctcctggcggcgccttggggacgggcagttccctgtgtctctggtggtttgcctaaacctgcaaacatcaccttcttatccatcaacatgaagaatgtcctacaatggactccaccagagggtcttcaaggagttaaagttacttacactgtgcagtatttcatcacaaattggcccaccagaggtggcactgactacagatgagaagtccatttctgttgtcctgacagctccagagaagtggaagagaaatccagaagaccttcctgtttccatgcaacaaatatactccaatctgaagtataacgtgtctgtgttgaatactaaatcaaacagaacgtggtcccagtgtgtgaccaaccacacgctggtgctcacctggctggagccgaacactctttactgcgtacacgtggagtccttcgtcccagggccccctcgccgtgctcagccttctgagaagcagtgtgccaggactttgaaagatcaatcatcagagttcaaggctaaaatcatcttctggtatgttttgcccgtatctattaccgtgtttcttttttctgtgatgggctattccatctaccgatatatccacgttggcaaagagaaacacccagcaaatttgattttgatttatggaaatgaatttgacaaaagattctttgtgcctgctgaaaaaatcgtgattaactttatcaccctcaatatctcggatgattctaaaatttctcatcaggatatgagtttactgggaaaaagcagtgatgtatccagccttaatgatcctcagcccagcgggaacctgaggccccctcaggaggaagaggaggtgaaacatttagggtatgcttcgcatttgatggaaattttttgtgactctgaagaaaacacggaaggtacttctctcacccagcaagagtccctcagcagaacaatacccccggataaaacagtcattgaatatgaatatgatgtcagaaccactgacatttgtgcggggcctgaagagcaggagctcagtttgcaggaggaggtgtccacacaaggaacattattggagtcgcaggcagcgttggcagtcttgggcccgcaaacgttacagtactcatacacccctcagctccaagacttagaccccctggcgcaggagcacacagactcggaggaggggccggaggaagagccatcgacgaccctggtcgactgggatccccaaactggcaggctgtgtattccttcgctgtccagcttcgaccaggattcagagggctgcgagccttctgagggggatgggctcggagaggagggtcttctatctagactctatgaggagccggctccagacaggccaccaggagaaaatgaaacctatctcatgcaattcatggaggaatgggggttatatgtgcagatggaaaactgatgccaacacttccttttgccttttgtttcctgtgcaaacaagtgagtcacccctttgatcccagccataaagtacctgggatgaaagaagttttttccagtttgtcagtgtctgtgagaattacttatttcttttctctattctcatagcacgtgtgtgattggttcatgcatgtaggtctcttaacaatgatggtgggcctctggagtccaggggctggccggttgttctatgcagagaaagcagtcaataaatgtttgccagactgggtgcagaatttattcaggtgggtgtactctggcctcttggttcattattttcaaacaagcacacttgtacaattattttctgggtacttcccatatgcacatagcactgtaaaaaatatttcccaaagatcactcattttataaataccactttttcagaattgggtttattgcgagcaggaggagatacttaaaacatgcacatataccaggttggtggtaagttggtcgcatgtgaaaacctcaactatttaatcatcatgattcatattttgagtgaatacatcaggcacagaccttcatgatatcacacactcttggctactttaagaggccatctttaatactttatgagtagttctggagtgtaaacataaacgagtattcttttgtagtcagaaaagtgtcctctcaataatttagtaggggcttattgtctctcaaaactaacctaaaagaaaatgacacattttataatagaatattacatttatttctggaagtgtgttttcaaaaagatatttacatagtctgtaaactagaaagtgttaggtaaagctctaggttactgtgttactattataatattaaacattcgaataggcagtcgttcaaagactctttggaatatctatgaatgaatatcctctattcttataatattaaaacccataagtaaatataggacatacaagagaaatgagttaaatgactatgtaagggagagtttattaaaatttgatgaaatttactgtaggaactaaactatgccataaaacaatagctttctagttcatttccagtaactgttcccatctcctttaccacttgttaagaaaattaaattcttcagtcacgctgctttaaaatgggacaaaatctattaagttgaaccatatataattgtggatatttggctgtttttaatctgacaagcagtaacttcatatggtttgccttaatatatatttgttttagtcatgaactcataatccattgatgctctttcatgagaagagatatcacccatatttccttattgatattattggtacaggcagacaaccctggtaggagagatggattctggggtcatgacctttcgtgattatccgcaaatgcaaacagtttcagatctaatggtttaatttagggagtaattatattaatcagagtgttctgttattctcaatctttatagaaacgattctgctggttttgaagaacagatgtattacactaactgtaaaagtagttcaagagtgagaaagaataaattgttattaagagcaaaagaaaaataaagtgattgatgata

SEQ ID NO: 143951 - DNA, 3382 bp, Homo sapiens
  Payload ID: 8449
  Gene Symbol: IL20RA
  Gene Name: interleukin 20 receptor, alpha
  Uniprot ID: Q9UHF4
  ENST ID: ENST00000541547
  CDS Start-End: 281-1795
ggtcggggacggttaccatgcggggcccctcgccggccagtcccaggttcccgccaccaccgccgcggccgcgcggaggggcccctgtggatgccgcgtctcggccgccgggccccgcagtcctgcaagccgcgcgtcgcgagatccgcgctttaaaagccaaactccccgaaagggtcagccccgaaggaacatgatccagaaagacgcagcttcttaaattccctgtgtctctggtggtttgcctaaacctgcaaacatcaccttcttatccatcaacatgaagaatgtcctacaatggactccaccagagggtcttcaaggagttaaagttacttacactgtgcagtatttcatatatgggcaaaagaaatggctgaataaatcagaatgcagaaatatcaatagaacctactgtgatctttctgctgaaacttctgactacgaacaccagtattatgccaaagttaaggccatttggggaacaaagtgttccaaatgggctgaaagtggacggttctatccttttttagaaacacaaattggcccaccagaggtggcactgactacagatgagaagtccatttctgttgtcctgacagctccagagaagtggaagagaaatccagaagaccttcctgtttccatgcaacaaatatactccaatctgaagtataacgtgtctgtgttgaatactaaatcaaacagaacgtggtcccagtgtgtgaccaaccacacgctggtgctcacctggctggagccgaacactctttactgcgtacacgtggagtccttcgtcccagggccccctcgccgtgctcagccttctgagaagcagtgtgccaggactttgaaagatcaatcatcagagttcaaggctaaaatcatcttctggtatgttttgcccgtatctattaccgtgtttcttttttctgtgatgggctattccatctaccgatatatccacgttggcaaagagaaacacccagcaaatttgattttgatttatggaaatgaatttgacaaaagattctttgtgcctgctgaaaaaatcgtgattaactttatcaccctcaatatctcggatgattctaaaatttctcatcaggatatgagtttactgggaaaaagcagtgatgtatccagccttaatgatcctcagcccagcgggaacctgaggccccctcaggaggaagaggaggtgaaacatttagggtatgcttcgcatttgatggaaattttttgtgactctgaagaaaacacggaaggtacttctctcacccagcaagagtccctcagcagaacaatacccccggataaaacagtcattgaatatgaatatgatgtcagaaccactgacatttgtgcggggcctgaagagcaggagctcagtttgcaggaggaggtgtccacacaaggaacattattggagtcgcaggcagcgttggcagtcttgggcccgcaaacgttacagtactcatacacccctcagctccaagacttagaccccctggcgcaggagcacacagactcggaggaggggccggaggaagagccatcgacgaccctggtcgactgggatccccaaactggcaggctgtgtattccttcgctgtccagcttcgaccaggattcagagggctgcgagccttctgagggggatgggctcggagaggagggtcttctatctagactctatgaggagccggctccagacaggccaccaggagaaaatgaaacctatctcatgcaattcatggaggaatgggggttatatgtgcagatggaaaactgatgccaacacttccttttgccttttgtttcctgtgcaaacaagtgagtcacccctttgatcccagccataaagtacctgggatgaaagaagttttttccagtttgtcagtgtctgtgagaattacttatttcttttctctattctcatagcacgtgtgtgattggttcatgcatgtaggtctcttaacaatgatggtgggcctctggagtccaggggctggccggttgttctatgcagagaaagcagtcaataaatgtttgccagactgggtgcagaatttattcaggtgggtgtactctggcctcttggttcattattttcaaacaagcacacttgtacaattattttctgggtacttcccatatgcacatagcactgtaaaaaatatttcccaaagatcactcattttataaataccactttttcagaattgggtttattgcgagcaggaggagatacttaaaacatgcacatataccaggttggtggtaagttggtcgcatgtgaaaacctcaactatttaatcatcatgattcatattttgagtgaatacatcaggcacagaccttcatgatatcacacactcttggctactttaagaggccatctttaatactttatgagtagttctggagtgtaaacataaacgagtattcttttgtagtcagaaaagtgtcctctcaataatttagtaggggcttattgtctctcaaaactaacctaaaagaaaatgacacattttataatagaatattacatttatttctggaagtgtgttttcaaaaagatatttacatagtctgtaaactagaaagtgttaggtaaagctctaggttactgtgttactattataatattaaacattcgaataggcagtcgttcaaagactctttggaatatctatgaatgaatatcctctattcttataatattaaaacccataagtaaatataggacatacaagagaaatgagttaaatgactatgtaagggagagtttattaaaatttgatgaaatttactgtaggaactaaactatgccataaaacaatagctttctagttcatttccagtaactgttcccatctcctttaccacttgttaagaaaattaaattcttcagtcacgctgctttaaaatgggacaaaatctattaagttgaaccatatataattgtggatatttggctgtttttaatctgacaagcagtaacttcatatggtttgccttaatatatatttgttttagtcatgaactcataatccattgatgctctttcatgagaagagatatcacccatatttccttattgatattattggtacaggcagacaaccctggtaggagagatggattctggggtcatgacctttcgtgattatccgcaaatgcaaacagtttcagatctaatggtttaatttagggagtaattatattaatcagagtgttctgttattctcaatctttatagaaacgattctgctggttttgaagaacagatgtattacactaactgtaaaagtagttcaagagtgagaaagaataaattgttattaagagcaaaagaaaaataaagtgattgatgata

SEQ ID NO: 143952 - DNA, 655 bp, Homo sapiens
  Payload ID: 8449
  Gene Symbol: IL20RA
  Gene Name: interleukin 20 receptor, alpha
  ENST ID: ENST00000460306
  CDS Start-End: 237-365
tccagctgggtagccgggggagcgcgcgtgggggctccgcgagtcgctcgcccttggtttctggggaagcctgggggacgcggctgtggcggaggcgccctgggactcaggtcgcctggagcgtggcacgcagagccccaggcgcggagctgaggccgcgcggccgcgcttggccccagcgggcgtgggactgagcagtctgctgccccccgacatgtgacccagccccgccgcccatgcgggctcccggccgcccggccctgcggccgctgccgctgccgccgctgctgctgttgctcctggcggcgccttggggacgggcagggtattcccgtcctctcctgggtctttgggctaaggtctaaggactgctgggaagaccaccttagaagatgtatgtagttacctggatactacctgctcgtaattgaaggattatctacaatgtcttctgtacaacgtgggcttactaaggttctatgactttgccactctcagaattccttttgatgtagaaactcagagttgacaggaccttaaaagtcaccccacccagctgccactctcttgattgtcctctgcagcatcacttccaagtaatgacctgtctgctgtgtgagcacctctcatcacaggatactcactaccctgcacc

SEQ ID NO: 143953 - DNA, 921 bp, Homo sapiens
  Payload ID: 8449
  Gene Symbol: IL20RA
  Gene Name: interleukin 20 receptor, alpha
  ENST ID: ENST00000468393
  CDS Start-End: 391-921
tccagctgggtagccgggggagcgcgcgtgggggctccgcgagtcgctcgcccttggtttctggggaagcctgggggacgcggctgtggcggaggcgccctgggactcaggtcgcctggagcgtggcacgcagagccccaggcgcggagctgaggccgcgcggccgcgcttggccccagcgggcgtgggactgagcagtctgctgccccccgacatgtgacccagccccgccgcccatgcgggctcccggccgcccggccctgcggccgctgccgctgccgccgctgctgctgttgctcctggcggcgccttggggacgggcagttccctgtgtctctggtggtttgcctaaacctgcaaacatcaccttcttatccatcaacatgaagaatgtcctacaatggactccaccagagggtcttcaaggagttaaagttacttacactgtgcagtatttcatcacaaattggcccaccagaggtggcactgactacagatgagaagtccatttctgttgtcctgacagctccagagaagtggaagagaaatccagaagaccttcctgtttccatgcaacaaatatactccaatctgaagtataacgtgtctgtgttgaatactaaatcaaacagaacgtggtcccagtgtgtgaccaaccacacgctggtgctcacctggctggagccgaacactctttactgcgtacacgtggagtccttcgtcccagggccccctcgccgtgctcagccttctgagaagcagtgtgccaggactttgaaagatcaatcatcagagttcaaggctaaaatcatcttctggtatgttttgcccgtatctattaccgtgtttcttttttctgtgatgggctattccatctaccgatatatccacgttggcaaagagaaacacccagcaaatttg

SEQ ID NO: 143954 - DNA, 521 bp, Homo sapiens
  Payload ID: 8449
  Gene Symbol: IL20RA
  Gene Name: interleukin 20 receptor, alpha
  ENST ID: ENST00000635289
  CDS Start-End: 254-521
ggccagtcccaggttcccgccaccaccgccgcggccgcgcggaggggcccctgtggatgccgcgtctcggccgccgggccccgcagtcctgcaagccgcgcgtcgcgagatccgcgctttaaaagccaaactccccgaaagggtcagccccgaaggaacatgatccagaaagacgcagcttcttaaattccctgtgtctctggtggtttgcctaaacctgcaaacatcaccttcttatccatcaacatgaagaatgtcctacaatggactccaccagagggtcttcaaggagttaaagttacttacactgtgcagtatttcatctccagagaagtggaagagaaatccagaagaccttcctgtttccatgcaacaaatatactccaatctgaagtataacgtgtctgtgttgaatactaaatcaaacagaacgtggtcccagtgtgtgaccaaccacacgctggtgctcacctggctggagccgaacactctttactgcgtacacgtggagtccttcgtcc

SEQ ID NO: 143955 - DNA, 629 bp, Homo sapiens
  Payload ID: 8450
  Gene Symbol: IL21
  Gene Name: interleukin 21
  Uniprot ID: Q9HBE4
  ENST ID: ENST00000264497
  CDS Start-End: 59-547
gttctcagtcaagctgaagtgaaaacgagaccaaggtctagctctactgttggtacttatgagatccagtcctggcaacatggagaggattgtcatctgtctgatggtcatcttcttggggacactggtccacaaatcaagctcccaaggtcaagatcgccacatgattagaatgcgtcaacttatagatattgttgatcagctgaaaaattatgtgaatgacttggtccctgaatttctgccagctccagaagatgtagagacaaactgtgagtggtcagctttttcctgctttcagaaggcccaactaaagtcagcaaatacaggaaacaatgaaaggataatcaatgtatcaattaaaaagctgaagaggaaaccaccttccacaaatgcagggagaagacagaaacacagactaacatgcccttcatgtgattcttatgagaaaaaaccacccaaagaattcctagaaagattcaaatcacttctccaaaagatgattcatcagcatctgtcctctagaacacacggaagtgaagattcctgaggatctaacttgcagttggacactatgttacatactctaatatagtagtgaaagtcatttctttgtattccaagtggaggag

SEQ ID NO: 143956 - DNA, 707 bp, Homo sapiens
  Payload ID: 8450
  Gene Symbol: IL21
  Gene Name: interleukin 21
  Uniprot ID: Q9HBE4
  ENST ID: ENST00000611104
  CDS Start-End: 47-508
gctgaagtgaaaacgagaccaaggtctagctctactgttggtacttatgagatccagtcctggcaacatggagaggattgtcatctgtctgatggtcatcttcttggggacactggtccacaaatcaagctcccaaggtcaagatcgccacatgattagaatgcgtcaacttatagatattgttgatcagctgaaaaattatgtgaatgacttggtccctgaatttctgccagctccagaagatgtagagacaaactgtgagtggtcagctttttcctgctttcagaaggcccaactaaagtcagcaaatacaggaaacaatgaaaggataatcaatgtatcaattaaaaagctgaagaggaaaccaccttccacaaatgcagggagaagacagaaacacagactaacatgcccttcatgtgattcttatgagaaaaaaccacccaaagaattcctagaaagattcaaatcacttctccaaaaggtatctaccttaagtttcatttgattttctgctttatctttacctatccagatttgcttcttagttactcacggtatactatttccacagatgattcatcagcatctgtcctctagaacacacggaagtgaagattcctgaggatctaacttgcagttggacactatgttacatactctaatatagtagtgaaagtcatttctttgtattccaagtggaggag

SEQ ID NO: 143957 - DNA, 4849 bp, Homo sapiens
  Payload ID: 8451
  Gene Symbol: IL21R
  Gene Name: interleukin 21 receptor
  Uniprot ID: Q9HBE5
  ENST ID: ENST00000337929
  CDS Start-End: 474-2090
ctcttcctccccactctgcacatgcggctgggtggcagccagcggcctcagacagacccactggcgtctctctgctgagtgaccgtaagctcggcgtctggccctctgcctgcctctccctgagtgtggctgacagccacgcagctgtgtctgtctgtctgcggcccgtgcatccctgctgcggccgcctggtaccttccttgccgtctctttcctctgtctgctgctctgtgggacacctgcctggaggcccagctgcccgtcatcagagtgacaggtcttatgacagcctgattggtgactcgggctgggtgtggattctcaccccaggcctctgcctgctttctcagaccctcatctgtcacccccacgctgaacccagctgccacccccagaagcccatcagactgcccccagcacacggaatggatttctgagaaagaagccgaaacagaaggcccgtgggagtcagcatgccgcgtggctgggccgcccccttgctcctgctgctgctccagggaggctggggctgccccgacctcgtctgctacaccgattacctccagacggtcatctgcatcctggaaatgtggaacctccaccccagcacgctcacccttacctggcaagaccagtatgaagagctgaaggacgaggccacctcctgcagcctccacaggtcggcccacaatgccacgcatgccacctacacctgccacatggatgtattccacttcatggccgacgacattttcagtgtcaacatcacagaccagtctggcaactactcccaggagtgtggcagctttctcctggctgagagcatcaagccggctccccctttcaacgtgactgtgaccttctcaggacagtataatatctcctggcgctcagattacgaagaccctgccttctacatgctgaagggcaagcttcagtatgagctgcagtacaggaaccggggagacccctgggctgtgagtccgaggagaaagctgatctcagtggactcaagaagtgtctccctcctccccctggagttccgcaaagactcgagctatgagctgcaggtgcgggcagggcccatgcctggctcctcctaccaggggacctggagtgaatggagtgacccggtcatctttcagacccagtcagaggagttaaaggaaggctggaaccctcacctgctgcttctcctcctgcttgtcatagtcttcattcctgccttctggagcctgaagacccatccattgtggaggctatggaagaagatatgggccgtccccagccctgagcggttcttcatgcccctgtacaagggctgcagcggagacttcaagaaatgggtgggtgcacccttcactggctccagcctggagctgggaccctggagcccagaggtgccctccaccctggaggtgtacagctgccacccaccacggagcccggccaagaggctgcagctcacggagctacaagaaccagcagagctggtggagtctgacggtgtgcccaagcccagcttctggccgacagcccagaactcggggggctcagcttacagtgaggagagggatcggccatacggcctggtgtccattgacacagtgactgtgctagatgcagaggggccatgcacctggccctgcagctgtgaggatgacggctacccagccctggacctggatgctggcctggagcccagcccaggcctagaggacccactcttggatgcagggaccacagtcctgtcctgtggctgtgtctcagctggcagccctgggctaggagggcccctgggaagcctcctggacagactaaagccaccccttgcagatggggaggactgggctgggggactgccctggggtggccggtcacctggaggggtctcagagagtgaggcgggctcacccctggccggcctggatatggacacgtttgacagtggctttgtgggctctgactgcagcagccctgtggagtgtgacttcaccagccccggggacgaaggacccccccggagctacctccgccagtgggtggtcattcctccgccactttcgagccctggaccccaggccagctaatgaggctgactggatgtccagagctggccaggccactgggccctgagccagagacaaggtcacctgggctgtgatgtgaagacacctgcagcctttggtctcctggatgggcctttgagcctgatgtttacagtgtctgtgtgtgtgtgtgcatatgtgtgtgtgtgcatatgcatgtgtgtgtgtgtgtgtgtcttaggtgcgcagtggcatgtccacgtgtgtgtgtgattgcacgtgcctgtgggcctgggataatgcccatggtactccatgcattcacctgccctgtgcatgtctggactcacggagctcacccatgtgcacaagtgtgcacagtaaacgtgtttgtggtcaacagatgacaacagccgtcctccctcctagggtcttgtgttgcaagttggtccacagcatctccggggctttgtgggatcagggcattgcctgtgactgaggcggagcccagccctccagcgtctgcctccaggagctgcaagaagtccatattgttccttatcacctgccaacaggaagcgaaaggggatggagtgagcccatggtgacctcgggaatggcaattttttgggcggcccctggacgaaggtctgaatcccgactctgataccttctggctgtgctacctgagccaagtcgcctcccctctctgggctagagtttccttatccagacagtggggaaggcatgacacacctgggggaaattggcgatgtcacccgtgtacggtacgcagcccagagcagaccctcaataaacgtcagcttccttccttctgcggccagagccgaggcgggcgggggtgagaacatcaatcgtcagcgacagcctgggcacccgcggggccgtcccgcctgcagagggccactcgggggggtttccaggcttaaaatcagtccgtttcgtctcttggaaacagctccccaccaaccaagatttctttttctaacttctgctactaagtttttaaaaattccctttatgcacccaagagatatttattaaacaccaattacgtagcaggccatggctcatgggacccaccccccgtggcactcatggagggggctgcaggttggaactatgcagtgtgctccggccacacatcctgctgggccccctaccctgccccaattcaatcctgccaataaatcctgtcttatttgttcatcctggagaattgaagggaggtcaagttgtttgtcaatgatttgtcagagaacctgttgaaatgtgaattaagaagctaagaaaatatttcttagcaacattttctttttcttttttttttttttcttttgagacagagtctcactctcgtcgcccaggctggaatgcagtggtgcgatctcggctctctgcaacctctgtctcccgggttcaagcgatttcctgcgtcagccccagagtagctggaattacaggcacacaccaccacgcctggctaatttttgtatttttagtagagctggggccaccctggcccggccccgtcttcctccccaaaggtcagactgcaggctgcagggctgtgctggaggagccagctctagctcacccatgcttttgcaacagggtcgggttggaagtcagcacaggtcagtcctgcggaaggttccttcgtgactcatctgtgaagtggggtggttgggagaggtagctgagagaatgcatgagagtcctcggtgcctggcaggaggctggaaggttctagaacactgatggttataagagtgggactgtgagcctgggatcggggggtgtgagacttggatgggagcacaagagtggaaacacagcttctgcacggagcaggcgcagccctcaacaccccgtgcacctgcaccctagggactcttgggtccagatgtgctgtggttttcacaccttcttgggggcaacaggttccaggagccacctgtgggtgccacctgagccacaggctcccaggaaagcagcacagctctcctgcacccagagcttgctgggtggcggaggggaacacagatggttggggaaggcctgaggccagattgggggactctggactggggcagatgaggctcctcagaatcccacctttgaagggaactcagcttataaacacagaggagcaaagttggagggccgggcgtagtggctcacacctgtgatctcagcactttgggaggccaaggaaggtggatcacttgaggccaggagttcgagaccagcctgggcaacatagcaaggccccatctctacaaaaattattattttttaaaaaaattagccaggtgtggtggtgcttgcctatagtcccagctactcgggaggctaaggtgggaggatcgctggagcccaggaatttgaggctgcagtgagctgtgattacaccgttgcactccagcctgggtcacagatcaagaccctgtctcttaaaaataaaagttggagacaagagctggctcacctgaaaggagggattagtaggtaggagggtggatggaggatggatggatgtgtgggtggataggaagatggtattaagttggtgcaaaagtctttgatattactcttaatggctttaataaaaagcttgaaggaagaatgattggttggatagacagagataaatgcatactggaaacaaagataaagataaaacacaagttataccaggccagcaactctattttgttcactgcctttagtcccagcctggcacatagtaggcactcaataaagcctgatttgtagca

SEQ ID NO: 143958 - DNA, 2953 bp, Homo sapiens
  Payload ID: 8451
  Gene Symbol: IL21R
  Gene Name: interleukin 21 receptor
  Uniprot ID: Q9HBE5
  ENST ID: ENST00000395754
  CDS Start-End: 135-1751
cctcaggcaaaccactagaggcagctcagatagaggagctctttgggaagagacgccgggcaggcagaagcagcaggtaccccctccacatccctagggctctgtgatgtaggcagaggcccgtgggagtcagcatgccgcgtggctgggccgcccccttgctcctgctgctgctccagggaggctggggctgccccgacctcgtctgctacaccgattacctccagacggtcatctgcatcctggaaatgtggaacctccaccccagcacgctcacccttacctggcaagaccagtatgaagagctgaaggacgaggccacctcctgcagcctccacaggtcggcccacaatgccacgcatgccacctacacctgccacatggatgtattccacttcatggccgacgacattttcagtgtcaacatcacagaccagtctggcaactactcccaggagtgtggcagctttctcctggctgagagcatcaagccggctccccctttcaacgtgactgtgaccttctcaggacagtataatatctcctggcgctcagattacgaagaccctgccttctacatgctgaagggcaagcttcagtatgagctgcagtacaggaaccggggagacccctgggctgtgagtccgaggagaaagctgatctcagtggactcaagaagtgtctccctcctccccctggagttccgcaaagactcgagctatgagctgcaggtgcgggcagggcccatgcctggctcctcctaccaggggacctggagtgaatggagtgacccggtcatctttcagacccagtcagaggagttaaaggaaggctggaaccctcacctgctgcttctcctcctgcttgtcatagtcttcattcctgccttctggagcctgaagacccatccattgtggaggctatggaagaagatatgggccgtccccagccctgagcggttcttcatgcccctgtacaagggctgcagcggagacttcaagaaatgggtgggtgcacccttcactggctccagcctggagctgggaccctggagcccagaggtgccctccaccctggaggtgtacagctgccacccaccacggagcccggccaagaggctgcagctcacggagctacaagaaccagcagagctggtggagtctgacggtgtgcccaagcccagcttctggccgacagcccagaactcggggggctcagcttacagtgaggagagggatcggccatacggcctggtgtccattgacacagtgactgtgctagatgcagaggggccatgcacctggccctgcagctgtgaggatgacggctacccagccctggacctggatgctggcctggagcccagcccaggcctagaggacccactcttggatgcagggaccacagtcctgtcctgtggctgtgtctcagctggcagccctgggctaggagggcccctgggaagcctcctggacagactaaagccaccccttgcagatggggaggactgggctgggggactgccctggggtggccggtcacctggaggggtctcagagagtgaggcgggctcacccctggccggcctggatatggacacgtttgacagtggctttgtgggctctgactgcagcagccctgtggagtgtgacttcaccagccccggggacgaaggacccccccggagctacctccgccagtgggtggtcattcctccgccactttcgagccctggaccccaggccagctaatgaggctgactggatgtccagagctggccaggccactgggccctgagccagagacaaggtcacctgggctgtgatgtgaagacacctgcagcctttggtctcctggatgggcctttgagcctgatgtttacagtgtctgtgtgtgtgtgtgcatatgtgtgtgtgtgcatatgcatgtgtgtgtgtgtgtgtgtcttaggtgcgcagtggcatgtccacgtgtgtgtgtgattgcacgtgcctgtgggcctgggataatgcccatggtactccatgcattcacctgccctgtgcatgtctggactcacggagctcacccatgtgcacaagtgtgcacagtaaacgtgtttgtggtcaacagatgacaacagccgtcctccctcctagggtcttgtgttgcaagttggtccacagcatctccggggctttgtgggatcagggcattgcctgtgactgaggcggagcccagccctccagcgtctgcctccaggagctgcaagaagtccatattgttccttatcacctgccaacaggaagcgaaaggggatggagtgagcccatggtgacctcgggaatggcaattttttgggcggcccctggacgaaggtctgaatcccgactctgataccttctggctgtgctacctgagccaagtcgcctcccctctctgggctagagtttccttatccagacagtggggaaggcatgacacacctgggggaaattggcgatgtcacccgtgtacggtacgcagcccagagcagaccctcaataaacgtcagcttccttccttctgcggccagagccgaggcgggcgggggtgagaacatcaatcgtcagcgacagcctgggcacccgcggggccgtcccgcctgcagagggccactcgggggggtttccaggcttaaaatcagtccgtttcgtctcttggaaacagctccccaccaaccaagatttctttttctaacttctgctactaagtttttaaaaattccctttatgcacccaagagatatttattaaacaccaattacgtagcaggccatggctcatgggacccaccccccgtggcactcatggagggggctgcaggttggaactatgcagtgtgctccggccacacatcctgctgggccccctaccctgccccaattcaatcctgccaataaatcctgtcttatttgttcatcctggagaattga

SEQ ID NO: 143959 - DNA, 3009 bp, Homo sapiens
  Payload ID: 8451
  Gene Symbol: IL21R
  Gene Name: interleukin 21 receptor
  Uniprot ID: Q9HBE5
  ENST ID: ENST00000564089
  CDS Start-End: 603-2219
actctgcacatgcggctgggtggcagccagcggcctcagacagacccactggcgtctctctgctgagtgaccgtaagctcggcgtctggccctctgcctgcctctccctgagtgtggctgacagccacgcagctgtgtctgtctgtctgcggcccgtgcatccctgctgcggccgcctggtaccttccttgccgtctctttcctctgtctgctgctctgtgggacacctgcctggaggcccagctgcccgtcatcagagtgacaggtcttatgacagcctgattggtgactcgggctgggtgtggattctcaccccaggcctctgcctgctttctcagaccctcatctgtcacccccacgctgaacccagctgccacccccagaagcccatcagactgcccccagcacacggaatggatttctgagaaagaagccgaaacagaagatgaggcaatgaggctgcgagaggtagagtgattttccctcggtgactcaactgggacgtagcaggtcgggcagtcaagccaggtgaccccatgagctgtcgctgcatctttctcatgaagcacggggaacgggtcggatggcccgtgggagtcagcatgccgcgtggctgggccgcccccttgctcctgctgctgctccagggaggctggggctgccccgacctcgtctgctacaccgattacctccagacggtcatctgcatcctggaaatgtggaacctccaccccagcacgctcacccttacctggcaagaccagtatgaagagctgaaggacgaggccacctcctgcagcctccacaggtcggcccacaatgccacgcatgccacctacacctgccacatggatgtattccacttcatggccgacgacattttcagtgtcaacatcacagaccagtctggcaactactcccaggagtgtggcagctttctcctggctgagagcatcaagccggctccccctttcaacgtgactgtgaccttctcaggacagtataatatctcctggcgctcagattacgaagaccctgccttctacatgctgaagggcaagcttcagtatgagctgcagtacaggaaccggggagacccctgggctgtgagtccgaggagaaagctgatctcagtggactcaagaagtgtctccctcctccccctggagttccgcaaagactcgagctatgagctgcaggtgcgggcagggcccatgcctggctcctcctaccaggggacctggagtgaatggagtgacccggtcatctttcagacccagtcagaggagttaaaggaaggctggaaccctcacctgctgcttctcctcctgcttgtcatagtcttcattcctgccttctggagcctgaagacccatccattgtggaggctatggaagaagatatgggccgtccccagccctgagcggttcttcatgcccctgtacaagggctgcagcggagacttcaagaaatgggtgggtgcacccttcactggctccagcctggagctgggaccctggagcccagaggtgccctccaccctggaggtgtacagctgccacccaccacggagcccggccaagaggctgcagctcacggagctacaagaaccagcagagctggtggagtctgacggtgtgcccaagcccagcttctggccgacagcccagaactcggggggctcagcttacagtgaggagagggatcggccatacggcctggtgtccattgacacagtgactgtgctagatgcagaggggccatgcacctggccctgcagctgtgaggatgacggctacccagccctggacctggatgctggcctggagcccagcccaggcctagaggacccactcttggatgcagggaccacagtcctgtcctgtggctgtgtctcagctggcagccctgggctaggagggcccctgggaagcctcctggacagactaaagccaccccttgcagatggggaggactgggctgggggactgccctggggtggccggtcacctggaggggtctcagagagtgaggcgggctcacccctggccggcctggatatggacacgtttgacagtggctttgtgggctctgactgcagcagccctgtggagtgtgacttcaccagccccggggacgaaggacccccccggagctacctccgccagtgggtggtcattcctccgccactttcgagccctggaccccaggccagctaatgaggctgactggatgtccagagctggccaggccactgggccctgagccagagacaaggtcacctgggctgtgatgtgaagacacctgcagcctttggtctcctggatgggcctttgagcctgatgtttacagtgtctgtgtgtgtgtgtgcatatgtgtgtgtgtgcatatgcatgtgtgtgtgtgtgtgtgtcttaggtgcgcagtggcatgtccacgtgtgtgtgtgattgcacgtgcctgtgggcctgggataatgcccatggtactccatgcattcacctgccctgtgcatgtctggactcacggagctcacccatgtgcacaagtgtgcacagtaaacgtgtttgtggtcaacagatgacaacagccgtcctccctcctagggtcttgtgttgcaagttggtccacagcatctccggggctttgtgggatcagggcattgcctgtgactgaggcggagcccagccctccagcgtctgcctccaggagctgcaagaagtccatattgttccttatcacctgccaacaggaagcgaaaggggatggagtgagcccatggtgacctcgggaatggcaattttttgggcggcccctggacgaaggtctgaatcccgactctgataccttctggctgtgctacctgagccaagtcgcctcccctctctgggctagagtttccttatccagacagtggggaaggcatgacacacctgggggaaattggcgatgtcacccgtgtacggtacgcagcccagagcagaccctcaataaacgtcagcttccttc

SEQ ID NO: 143960 - DNA, 1150 bp, Homo sapiens
  Payload ID: 8452
  Gene Symbol: IL22
  Gene Name: interleukin 22
  Uniprot ID: Q9GZX6
  ENST ID: ENST00000328087
  CDS Start-End: 57-596
cttcgaccaggttctccttccccagtcaccagttgctcgagttagaattgtctgcaatggccgccctgcagaaatctgtgagctctttccttatggggaccctggccaccagctgcctccttctcttggccctcttggtacagggaggagcagctgcgcccatcagctcccactgcaggcttgacaagtccaacttccagcagccctatatcaccaaccgcaccttcatgctggctaaggaggctagcttggctgataacaacacagacgttcgtctcattggggagaaactgttccacggagtcagtatgagtgagcgctgctatctgatgaagcaggtgctgaacttcacccttgaagaagtgctgttccctcaatctgataggttccagccttatatgcaggaggtggtgcccttcctggccaggctcagcaacaggctaagcacatgtcatattgaaggtgatgacctgcatatccagaggaatgtgcaaaagctgaaggacacagtgaaaaagcttggagagagtggagagatcaaagcaattggagaactggatttgctgtttatgtctctgagaaatgcctgcatttgaccagagcaaagctgaaaaatgaataactaaccccctttccctgctagaaataacaattagatgccccaaagcgattttttttaaccaaaaggaagatgggaagccaaactccatcatgatgggtggattccaaatgaacccctgcgttagttacaaaggaaaccaatgccacttttgtttataagaccagaaggtagactttctaagcatagatatttattgataacatttcattgtaactggtgttctatacacagaaaacaatttattttttaaataattgtctttttccataaaaaagattactttccattcctttaggggaaaaaacccctaaatagcttcatgtttccataatcagtactttatatttataaatgtatttattattattataagactgcattttatttatatcattttattaatatggatttatttatagaaacatcattcgatattgctacttgagtgtaaggctaatattgatatttatgacaataattatagagctataacatgtttatttgacctcaataaacacttggatatcc

SEQ ID NO: 143961 - DNA, 1168 bp, Homo sapiens
  Payload ID: 8452
  Gene Symbol: IL22
  Gene Name: interleukin 22
  Uniprot ID: Q9GZX6
  ENST ID: ENST00000538666
  CDS Start-End: 72-611
gtcacaagcagaatcttcagaacaggttctccttccccagtcaccagttgctcgagttagaattgtctgcaatggccgccctgcagaaatctgtgagctctttccttatggggaccctggccaccagctgcctccttctcttggccctcttggtacagggaggagcagctgcgcccatcagctcccactgcaggcttgacaagtccaacttccagcagccctatatcaccaaccgcaccttcatgctggctaaggaggctagcttggctgataacaacacagacgttcgtctcattggggagaaactgttccacggagtcagtatgagtgagcgctgctatctgatgaagcaggtgctgaacttcacccttgaagaagtgctgttccctcaatctgataggttccagccttatatgcaggaggtggtgcccttcctggccaggctcagcaacaggctaagcacatgtcatattgaaggtgatgacctgcatatccagaggaatgtgcaaaagctgaaggacacagtgaaaaagcttggagagagtggagagatcaaagcaattggagaactggatttgctgtttatgtctctgagaaatgcctgcatttgaccagagcaaagctgaaaaatgaataactaaccccctttccctgctagaaataacaattagatgccccaaagcgattttttttaaccaaaaggaagatgggaagccaaactccatcatgatgggtggattccaaatgaacccctgcgttagttacaaaggaaaccaatgccacttttgtttataagaccagaaggtagactttctaagcatagatatttattgataacatttcattgtaactggtgttctatacacagaaaacaatttattttttaaataattgtctttttccataaaaaagattactttccattcctttaggggaaaaaacccctaaatagcttcatgtttccataatcagtactttatatttataaatgtatttattattattataagactgcattttatttatatcattttattaatatggatttatttatagaaacatcattcgatattgctacttgagtgtaaggctaatattgatatttatgacaataattatagagctataacatgtttatttgacctcaataaacacttggatatcctaa

SEQ ID NO: 143962 - DNA, 2798 bp, Homo sapiens
  Payload ID: 8453
  Gene Symbol: IL22RA1
  Gene Name: interleukin 22 receptor, alpha 1
  Uniprot ID: Q8N6P7
  ENST ID: ENST00000270800
  CDS Start-End: 40-1764
gcagagtagaggccaagggagggctctgtgccagccccgatgaggacgctgctgaccatcttgactgtgggatccctggctgctcacgcccctgaggacccctcggatctgctccagcacgtgaaattccagtccagcaactttgaaaacatcctgacgtgggacagcgggccggagggcaccccagacacggtctacagcatcgagtataagacgtacggagagagggactgggtggcaaagaagggctgtcagcggatcacccggaagtcctgcaacctgacggtggagacgggcaacctcacggagctctactatgccagggtcaccgctgtcagtgcgggaggccggtcagccaccaagatgactgacaggttcagctctctgcagcacactaccctcaagccacctgatgtgacctgtatctccaaagtgagatcgattcagatgattgttcatcctacccccacgccaatccgtgcaggcgatggccaccggctaaccctggaagacatcttccatgacctgttctaccacttagagctccaggtcaaccgcacctaccaaatgcaccttggagggaagcagagagaatatgagttcttcggcctgacccctgacacagagttccttggcaccatcatgatttgcgttcccacctgggccaaggagagtgccccctacatgtgccgagtgaagacactgccagaccggacatggacctactccttctccggagccttcctgttctccatgggcttcctcgtcgcagtactctgctacctgagctacagatatgtcaccaagccgcctgcacctcccaactccctgaacgtccagcgagtcctgactttccagccgctgcgcttcatccaggagcacgtcctgatccctgtctttgacctcagcggccccagcagtctggcccagcctgtccagtactcccagatcagggtgtctggacccagggagcccgcaggagctccacagcggcatagcctgtccgagatcacctacttagggcagccagacatctccatcctccagccctccaacgtgccacctccccagatcctctccccactgtcctatgccccaaacgctgcccctgaggtcgggcccccatcctatgcacctcaggtgacccccgaagctcaattcccattctacgccccacaggccatctctaaggtccagccttcctcctatgcccctcaagccactccggacagctggcctccctcctatggggtatgcatggaaggttctggcaaagactcccccactgggacactttctagtcctaaacaccttaggcctaaaggtcagcttcagaaagagccaccagctggaagctgcatgttaggtggcctttctctgcaggaggtgacctccttggctatggaggaatcccaagaagcaaaatcattgcaccagcccctggggatttgcacagacagaacatctgacccaaatgtgctacacagtggggaggaagggacaccacagtacctaaagggccagctccccctcctctcctcagtccagatcgagggccaccccatgtccctccctttgcaacctccttcccgtccatgttccccctcggaccaaggtccaagtccctggggcctgctggagtcccttgtgtgtcccaaggatgaagccaagagcccagcccctgagacctcagacctggagcagcccacagaactggattctcttttcagaggcctggccctgactgtgcagtgggagtcctgaggggaatgggaaaggcttggtgcttcctccctgtccctacccagtgtcacatccttggctgtcaatcccatgcctgcccacgccacacactctgcgatctggcctcagacgggtgcccttgagagaagcagagggagtggcatgcagggcccctgccatgggtgcgctcctcaccggagcaaagcagcatgataaggactgcagcgggggagctctggggagcagcttgtgtagacaagcgcgtgctcgctgagccctgcaaggcagaaatgacagtgcaaggaggaaatgcagggaaactcccgaggtccagagccccacctcctaacaccatggattcaaagtgctcagggaatttgcctctccttgccccattcctggccagtttcacaatctagctcgacagagcatgaggcccctgcctcttctgtcattgttcaaaggtgggaagagagcctggaaaagaaccaggcctggaaaagaaccagaaggaggctgggcagaaccagaacaacctgcacttctgccaaggccagggccagcaggacggcaggactctagggaggggtgtggcctgcagctcattcccagccagggcaactgcctgacgttgcacgatttcagcttcattcctctgatagaacaaagcgaaatgcaggtccaccagggagggagacacacaagccttttctgcaggcaggagtttcagaccctatcctgagaatggggtttgaaaggaaggtgagggctgtggcccctggacgggtacaataacacactgtactgatgtcacaactttgcaagctctgccttgggttcagcccatctgggctcaaattccagcctcaccactcacaagctgtgtgacttcaaacaaatgaaatcagtgcccagaacctcggtttcctcatctgtaatgtggggatcataacacctacctcatggagttgtggtgaagatgaaatgaagtcatgtctttaaagtgcttaatagtgcctggtacatgggcagtgcccaataaacggtagctattt

SEQ ID NO: 143963 - DNA, 2801 bp, Homo sapiens
  Payload ID: 8454
  Gene Symbol: IL22RA2
  Gene Name: interleukin 22 receptor, alpha 2
  Uniprot ID: Q969J5
  ENST ID: ENST00000349184
  CDS Start-End: 302-997
ctcactttaccactactcgctatagagccctggtcaagttctctccacctctctatctatgtctcagtttcttcatctgtaacatcaaatgaataataataccaatctcctagacttcataagaggattaacaaagacaaaatatgggaaaaacataacatggcgtcccataattattagatcttattattgacactaaaatggcattaaaattaccaaaaggaagacagcatctgtttcctctttggtcctgagctggttaaaaggaacactggttgcctgaacagtcacacttgcaaccatgatgcctaaacattgctttctaggcttcctcatcagtttcttccttactggtgtagcaggaactcagtcaacgcatgagtctctgaagcctcagagggtacaatttcagtcccgaaattttcacaacattttgcaatggcagcctgggagggcacttactggcaacagcagtgtctattttgtgcagtacaaaatatatggacagagacaatggaaaaataaagaagactgttggggtactcaagaactctcttgtgaccttaccagtgaaacctcagacatacaggaaccttattacgggagggtgagggcggcctcggctgggagctactcagaatggagcatgacgccgcggttcactccctggtgggaaacaaaaatagatcctccagtcatgaatataacccaagtcaatggctctttgttggtaattctccatgctccaaatttaccatatagataccaaaaggaaaaaaatgtatctatagaagattactatgaactactataccgagtttttataattaacaattcactagaaaaggagcaaaaggtttatgaaggggctcacagagcggttgaaattgaagctctaacaccacactccagctactgtgtagtggctgaaatatatcagcccatgttagacagaagaagtcagagaagtgaagagagatgtgtggaaattccatgacttgtggaatttggcattcagcaatgtggaaattctaaagctccctgagaacaggatgactcgtgtttgaaggatcttatttaaaattgtttttgtattttcttaaagcaatattcactgttacaccttggggacttctttgtttatccattcttttatcctttatatttcatttgtaaactatatttgaacgacattccccccgaaaaattgaaatgtaaagatgaggcagagaataaagtgttctatgaaattcagaactttatttctgaatgtaacatccctaataacaaccttcattcttctaatacagcaaaataaaaatttaacaaccaaggaatagtatttaagaaaatgttgaaataatttttttaaaatagcattacagactgaggcggtcctgaagcaatggtttttcactctcttattgagccaattaaattgacattgctttgacaatttaaaacttctataaaggtgaatatttttcatacatttctattttatatgaatatactttttatatatttattattattaaatatttctacttaatgaatcaaaattttgttttaaagtctactttatgtaaataagaacaggttttggggaaaaaaatcttatgatttctggattgatatctgaattaaaactatcaacaacaaggaagtctgctctgtacaattgtccctcatttaaaagatatattaagcttttcttttctgtttgtttttgttttgtttagtttttaatcctgtcttagaagaacttatctttattctcaaaattaaatgtaatttttttagtgacaaagaagaaaggaaacctcattactcaatccttctggccaagagtgtcttgcttgtggcgccttcctcatctctatataggaggatcccatgaatgatggtttattgggaactgctggggtcgaccccatacagagaactcagcttgaagctggaagcacacagtgggtagcaggagaaggaccggtgttggtaggtgcctacagagactatagagctagacaaagccctccaaactggcccctcctgctcactgcctctcctgagtagaaatctggtgacctaaggctcagtgtggtcaacagaaagctgccttcttcacttgaggctaagtcttcatatatgtttaaggttgtctttctagtgaggagatacatatcagagaacatttgtacaattccccatgaaaattgctccaaagttgataacaatatagtcggtgcttctagttatatgcaagtactcagtgataaatggattaaaaaatattcagaaatgtattggggggtggaggagaataagaggcagagcaagagctagagaattggtttccttgcttccctgtatgctcagaaaacattgatttgagcatagacgcagagactgaaaaaaaaatttactttgatctctgtttttgaattcttattatttatattttgcttactaccttttttgccttttgtccttttgtggagagggcgatgaattaagagtagtggggtgggtggcgagtaagtaaaatttcaaatagcattttagtgaatgcaattcagtagtcctgaagcctgacttaataaaacaaaattcatttatggttgtttcatgaaagttattagataggatcaagttttgtttgtatattgtttgccttgctctgtttttgcttttgtgcttaggcaagtgcaaaatactctatggaaatcataattgtcatcttcttcatggtgttagggatatattgtcacatgatttcaataaatcctttttttgcttta

SEQ ID NO: 143964 - DNA, 2886 bp, Homo sapiens
  Payload ID: 8454
  Gene Symbol: IL22RA2
  Gene Name: interleukin 22 receptor, alpha 2
  Uniprot ID: Q969J5
  ENST ID: ENST00000296980
  CDS Start-End: 302-1093
ctcactttaccactactcgctatagagccctggtcaagttctctccacctctctatctatgtctcagtttcttcatctgtaacatcaaatgaataataataccaatctcctagacttcataagaggattaacaaagacaaaatatgggaaaaacataacatggcgtcccataattattagatcttattattgacactaaaatggcattaaaattaccaaaaggaagacagcatctgtttcctctttggtcctgagctggttaaaaggaacactggttgcctgaacagtcacacttgcaaccatgatgcctaaacattgctttctaggcttcctcatcagtttcttccttactggtgtagcaggaactcagtcaacgcatgagtctctgaagcctcagagggtacaatttcagtcccgaaattttcacaacattttgcaatggcagcctgggagggcacttactggcaacagcagtgtctattttgtgcagtacaaaatcatgttctcatgcagcatgaaaagctctcaccagaagccaagtggatgctggcagcacatttcttgtaacttcccaggctgcagaacattggctaaatatggacagagacaatggaaaaataaagaagactgttggggtactcaagaactctcttgtgaccttaccagtgaaacctcagacatacaggaaccttattacgggagggtgagggcggcctcggctgggagctactcagaatggagcatgacgccgcggttcactccctggtgggaaacaaaaatagatcctccagtcatgaatataacccaagtcaatggctctttgttggtaattctccatgctccaaatttaccatatagataccaaaaggaaaaaaatgtatctatagaagattactatgaactactataccgagtttttataattaacaattcactagaaaaggagcaaaaggtttatgaaggggctcacagagcggttgaaattgaagctctaacaccacactccagctactgtgtagtggctgaaatatatcagcccatgttagacagaagaagtcagagaagtgaagagagatgtgtggaaattccatgacttgtggaatttggcattcagcaatgtggaaattctaaagctccctgagaacaggatgactcgtgtttgaaggatcttatttaaaattgtttttgtattttcttaaagcaatattcactgttacaccttggggacttctttgtttatccattcttttatcctttatatttcatttgtaaactatatttgaacgacattccccccgaaaaattgaaatgtaaagatgaggcagagaataaagtgttctatgaaattcagaactttatttctgaatgtaacatccctaataacaaccttcattcttctaatacagcaaaataaaaatttaacaaccaaggaatagtatttaagaaaatgttgaaataatttttttaaaatagcattacagactgaggcggtcctgaagcaatggtttttcactctcttattgagccaattaaattgacattgctttgacaatttaaaacttctataaaggtgaatatttttcatacatttctattttatatgaatatactttttatatatttattattattaaatatttctacttaatgaatcaaaattttgttttaaagtctactttatgtaaataagaacaggttttggggaaaaaaatcttatgatttctggattgatatctgaattaaaactatcaacaacaaggaagtctgctctgtacaattgtccctcatttaaaagatatattaagcttttcttttctgtttgtttttgttttgtttagtttttaatcctgtcttagaagaacttatctttattctcaaaattaaatgtaatttttttagtgacaaagaagaaaggaaacctcattactcaatccttctggccaagagtgtcttgcttgtggcgccttcctcatctctatataggaggatcccatgaatgatggtttattgggaactgctggggtcgaccccatacagagaactcagcttgaagctggaagcacacagtgggtagcaggagaaggaccggtgttggtaggtgcctacagagactatagagctagacaaagccctccaaactggcccctcctgctcactgcctctcctgagtagaaatctggtgacctaaggctcagtgtggtcaacagaaagctgccttcttcacttgaggctaagtcttcatatatgtttaaggttgtctttctagtgaggagatacatatcagagaacatttgtacaattccccatgaaaattgctccaaagttgataacaatatagtcggtgcttctagttatatgcaagtactcagtgataaatggattaaaaaatattcagaaatgtattggggggtggaggagaataagaggcagagcaagagctagagaattggtttccttgcttccctgtatgctcagaaaacattgatttgagcatagacgcagagactgaaaaaaaaatttactttgatctctgtttttgaattcttattatttatattttgcttactaccttttttgccttttgtccttttgtggagagggcgatgaattaagagtagtggggtgggtggcgagtaagtaaaatttcaaatagcattttagtgaatgcaattcagtagtcctgaagcctgacttaataaaacaaaattcatttatggttgtttcatgaaagttattagataggatcaagttttgtttgtatattgtttgccttgctctgtttttgcttttgtgcttaggcaagtgcaaaatactctatggaaatcataattgtcatcttcttcatggtgttagggatatattgtcacatgatttcaataaatcctt

SEQ ID NO: 143965 - DNA, 2620 bp, Homo sapiens
  Payload ID: 8454
  Gene Symbol: IL22RA2
  Gene Name: interleukin 22 receptor, alpha 2
  Uniprot ID: Q969J5
  ENST ID: ENST00000339602
  CDS Start-End: 302-694
ctcactttaccactactcgctatagagccctggtcaagttctctccacctctctatctatgtctcagtttcttcatctgtaacatcaaatgaataataataccaatctcctagacttcataagaggattaacaaagacaaaatatgggaaaaacataacatggcgtcccataattattagatcttattattgacactaaaatggcattaaaattaccaaaaggaagacagcatctgtttcctctttggtcctgagctggttaaaaggaacactggttgcctgaacagtcacacttgcaaccatgatgcctaaacattgctttctaggcttcctcatcagtttcttccttactggtgtagcaggaactcagtcaacgcatgagtctctgaagcctcagagggtacaatttcagtcccgaaattttcacaacattttgcaatggcagcctgggagggcacttactggcaacagcagtgtctattttgtgcagtacaaaatatatggacagagacaatggaaaaataaagaagactgttggggtactcaagaactctcttgtgaccttaccagtgaaacctcagacatacaggaaccttattacgggagggtgagggcggcctcggctgggagctactcagaatggagcatgacgccgcggttcactccctggtgggaaagagcaaaaggtttatgaaggggctcacagagcggttgaaattgaagctctaacaccacactccagctactgtgtagtggctgaaatatatcagcccatgttagacagaagaagtcagagaagtgaagagagatgtgtggaaattccatgacttgtggaatttggcattcagcaatgtggaaattctaaagctccctgagaacaggatgactcgtgtttgaaggatcttatttaaaattgtttttgtattttcttaaagcaatattcactgttacaccttggggacttctttgtttatccattcttttatcctttatatttcatttgtaaactatatttgaacgacattccccccgaaaaattgaaatgtaaagatgaggcagagaataaagtgttctatgaaattcagaactttatttctgaatgtaacatccctaataacaaccttcattcttctaatacagcaaaataaaaatttaacaaccaaggaatagtatttaagaaaatgttgaaataatttttttaaaatagcattacagactgaggcggtcctgaagcaatggtttttcactctcttattgagccaattaaattgacattgctttgacaatttaaaacttctataaaggtgaatatttttcatacatttctattttatatgaatatactttttatatatttattattattaaatatttctacttaatgaatcaaaattttgttttaaagtctactttatgtaaataagaacaggttttggggaaaaaaatcttatgatttctggattgatatctgaattaaaactatcaacaacaaggaagtctgctctgtacaattgtccctcatttaaaagatatattaagcttttcttttctgtttgtttttgttttgtttagtttttaatcctgtcttagaagaacttatctttattctcaaaattaaatgtaatttttttagtgacaaagaagaaaggaaacctcattactcaatccttctggccaagagtgtcttgcttgtggcgccttcctcatctctatataggaggatcccatgaatgatggtttattgggaactgctggggtcgaccccatacagagaactcagcttgaagctggaagcacacagtgggtagcaggagaaggaccggtgttggtaggtgcctacagagactatagagctagacaaagccctccaaactggcccctcctgctcactgcctctcctgagtagaaatctggtgacctaaggctcagtgtggtcaacagaaagctgccttcttcacttgaggctaagtcttcatatatgtttaaggttgtctttctagtgaggagatacatatcagagaacatttgtacaattccccatgaaaattgctccaaagttgataacaatatagtcggtgcttctagttatatgcaagtactcagtgataaatggattaaaaaatattcagaaatgtattggggggtggaggagaataagaggcagagcaagagctagagaattggtttccttgcttccctgtatgctcagaaaacattgatttgagcatagacgcagagactgaaaaaaaaatttactttgatctctgtttttgaattcttattatttatattttgcttactaccttttttgccttttgtccttttgtggagagggcgatgaattaagagtagtggggtgggtggcgagtaagtaaaatttcaaatagcattttagtgaatgcaattcagtagtcctgaagcctgacttaataaaacaaaattcatttatggttgtttcatgaaagttattagataggatcaagttttgtttgtatattgtttgccttgctctgtttttgcttttgtgcttaggcaagtgcaaaatactctatggaaatcataattgtcatcttcttcatggtgttagggatatattgtcacatgatttcaataaatcctt

SEQ ID NO: 143966 - DNA, 2912 bp, Homo sapiens
  Payload ID: 8455
  Gene Symbol: IL23R
  Gene Name: interleukin 23 receptor
  Uniprot ID: Q5VWK5
  ENST ID: ENST00000347310
  CDS Start-End: 172-2061
gctgacatttccattgacctcagaagtgaaaatctaaagtgagtgctgacaggcaggcagtgaggaaagaagacatgacacagccaacaagggtggcagcctggctctgaagtggaattatgtgcttcaaacaggttgaaagagggaaacagtcttttcctgcttccagacatgaatcaggtcactattcaatgggatgcagtaatagccctttacatactcttcagctggtgtcatggaggaattacaaatataaactgctctggccacatctgggtagaaccagccacaatttttaagatgggtatgaatatctctatatattgccaagcagcaattaagaactgccaaccaaggaaacttcatttttataaaaatggcatcaaagaaagatttcaaatcacaaggattaataaaacaacagctcggctttggtataaaaactttctggaaccacatgcttctatgtactgcactgctgaatgtcccaaacattttcaagagacactgatatgtggaaaagacatttcttctggatatccgccagatattcctgatgaagtaacctgtgtcatttatgaatattcaggcaacatgacttgcacctggaatgctgggaagctcacctacatagacacaaaatacgtggtacatgtgaagagtttagagacagaagaagagcaacagtatctcacctcaagctatattaacatctccactgattcattacaaggtggcaagaagtacttggtttgggtccaagcagcaaacgcactaggcatggaagagtcaaaacaactgcaaattcacctggatgatatagtgataccttctgcagccgtcatttccagggctgagactataaatgctacagtgcccaagaccataatttattgggatagtcaaacaacaattgaaaaggtttcctgtgaaatgagatacaaggctacaacaaaccaaacttggaatgttaaagaatttgacaccaattttacatatgtgcaacagtcagaattctacttggagccaaacattaagtacgtatttcaagtgagatgtcaagaaacaggcaaaaggtactggcagccttggagttcactgttttttcataaaacacctgaaacagttccccaggtcacatcaaaagcattccaacatgacacatggaattctgggctaacagttgcttccatctctacagggcaccttacttctgacaacagaggagacattggacttttattgggaatgatcgtctttgctgttatgttgtcaattctttctttgattgggatatttaacagatcattccgaactgggattaaaagaaggatcttattgttaataccaaagtggctttatgaagatattcctaatatgaaaaacagcaatgttgtgaaaatgctacaggaaaatagtgaacttatgaataataattccagtgagcaggtcctatatgttgatcccatgattacagagataaaagaaatcttcatcccagaacacaagcctacagactacaagaaggagaatacaggacccctggagacaagagactacccgcaaaactcgctattcgacaatactacagttgtatatattcctgatctcaacactggatataaaccccaaatttcaaattttctgcctgagggaagccatctcagcaataataatgaaattacttccttaacacttaaaccaccagttgattccttagactcaggaaataatcccaggttacaaaagcatcctaattttgctttttctgtttcaagtgtgaattcactaagcaacacaatatttcttggagaattaagcctcatattaaatcaaggagaatgcagttctcctgacatacaaaactcagtagaggaggaaaccaccatgcttttggaaaatgattcacccagtgaaactattccagaacagaccctgcttcctgatgaatttgtctcctgtttggggatcgtgaatgaggagttgccatctattaatacttattttccacaaaatattttggaaagccacttcaataggatttcactcttggaaaagtagagctgtgtggtcaaaatcaatatgagaaagctgccttgcaatctgaacttgggttttccctgcaatagaaattgaattctgcctctttttgaaaaaaatgtattcacatacaaatcttcacatggacacatgttttcatttcccttggataaatacctaggtaggggattgctgggccatatgataagcatatgtttcagttctaccaatcttgtttccagagtagtgacatttctgtgctcctaccatcaccatgtaagaattcccgggagctccatgcctttttaattttagccattcttctgcctcatttcttaaaattagagaattaaggtcccgaaggtggaacatgcttcatggtcacacatacaggcacaaaaacagcattatgtggacgcctcatgtattttttatagagtcaactatttcctctttattttccctcattgaaagatgcaaaacagctctctattgtgtacagaaagggtaaataatgcaaaatacctggtagtaaaataaatgctgaaaattttcctttaaaatagaatcattaggccaggcgtggtggctcatgcttgtaatcccagcactttggtaggctgaggtaggtggatcacctgaggtcaggagttcgagtccagcctggccaatatgctgaaaccctgtctctactaaaattacaaaaattagccggccatggtggcaggtgcttgtaatcccagctacttgggaggctgaggcaggagaatcacttgaaccaggaaggcagaggttgcactgagctgagattgtgccactgcactccagcctgggcaacaagagcaaaactctgtctggaaaaaaaaaaaaaa

SEQ ID NO: 143967 - DNA, 1459 bp, Homo sapiens
  Payload ID: 8455
  Gene Symbol: IL23R
  Gene Name: interleukin 23 receptor
  Uniprot ID: Q5VWK5
  ENST ID: ENST00000395227
  CDS Start-End: 233-916
ttacccatccattttaggttaaagaatttgacaccaattttacatatgtgcaacagtcagaattctacttggagccaaacattaagtacgtatttcaagtgagatgtcaagaaacaggcaaaaggtactggcagccttggagttcactgttttttcataaaacacctgaaacaggattaaaagaaggatcttattgttaataccaaagtggctttatgaagatattcctaatatgaaaaacagcaatgttgtgaaaatgctacaggaaaatagtgaacttatgaataataattccagtgagcaggtcctatatgttgatcccatgattacagagataaaagaaatcttcatcccagaacacaagcctacagactacaagaaggagaatacaggacccctggagacaagagactacccgcaaaactcgctattcgacaatactacagttgtatatattcctgatctcaacactggatataaaccccaaatttcaaattttctgcctgagggaagccatctcagcaataataatgaaattacttccttaacacttaaaccaccagttgattccttagactcaggaaataatcccaggttacaaaagcatcctaattttgctttttctgtttcaagtgtgaattcactaagcaacacaatatttcttggagaattaagcctcatattaaatcaaggagaatgcagttctcctgacatacaaaactcagtagaggaggaaaccaccatgcttttggaaaatgattcacccagtgaaactattccagaacagaccctgcttcctgatgaatttgtctcctgtttggggatcgtgaatgaggagttgccatctattaatacttattttccacaaaatattttggaaagccacttcaataggatttcactcttggaaaagtagagctgtgtggtcaaaatcaatatgagaaagctgccttgcaatctgaacttgggttttccctgcaatagaaattgaattctgcctctttttgaaaaaaatgtattcacatacaaatcttcacatggacacatgttttcatttcccttggataaatacctaggtaggggattgctgggccatatgataagcatatgtttcagttctaccaatcttgtttccagagtagtgacatttctgtgctcctaccatcaccatgtaagaattcccgggagctccatgcctttttaattttagccattcttctgcctcatttcttaaaattagagaattaaggtcccgaaggtggaacatgcttcatggtcacacatacaggcacaaaaacagcattatgtggacgcctcatgtattttttatagagtcaactatttcctctttattttccctcattgaaagatgcaaaacagctctctattgtgtacagaaagggtaaataatgcaaaatacctggtagtaaaataaatgctgaaaattttcctttaaaat

SEQ ID NO: 143968 - DNA, 1295 bp, Homo sapiens
  Payload ID: 8455
  Gene Symbol: IL23R
  Gene Name: interleukin 23 receptor
  Uniprot ID: Q5VWK5
  ENST ID: ENST00000425614
  CDS Start-End: 51-1175
ctcattttctcttgccaccactaagtaagaagagccttttgcctcccaccatgattctgaggccttaccagccatgtggaactgttaaagaatttgacaccaattttacatatgtgcaacagtcagaattctacttggagccaaacattaagtacgtatttcaagtgagatgtcaagaaacaggcaaaaggtactggcagccttggagttcactgttttttcataaaacacctgaaacagttccccaggtcacatcaaaagcattccaacatgacacatggaattctgggctaacagttgcttccatctctacagggcaccttacttctgacaacagaggagacattggacttttattgggaatgatcgtctttgctgttatgttgtcaattctttctttgattgggatatttaacagatcattccgaactgggattaaaagaaggatcttattgttaataccaaagtggctttatgaagatattcctaatatgaaaaacagcaatgttgtgaaaatgctacaggaaaatagtgaacttatgaataataattccagtgagcaggtcctatatgttgatcccatgattacagagataaaagaaatcttcatcccagaacacaagcctacagactacaagaaggagaatacaggacccctggagacaagagactacccgcaaaactcgctattcgacaatactacagttgtatatattcctgatctcaacactggatataaaccccaaatttcaaattttctgcctgagggaagccatctcagcaataataatgaaattacttccttaacacttaaaccaccagttgattccttagactcaggaaataatcccaggttacaaaagcatcctaattttgctttttctgtttcaagtgtgaattcactaagcaacacaatatttcttggagaattaagcctcatattaaatcaaggagaatgcagttctcctgacatacaaaactcagtagaggaggaaaccaccatgcttttggaaaatgattcacccagtgaaactattccagaacagaccctgcttcctgatgaatttgtctcctgtttggggatcgtgaatgaggagttgccatctattaatacttattttccacaaaatattttggaaagccacttcaataggatttcactcttggaaaagtagagctgtgtggtcaaaatcaatatgagaaagctgccttgcaatctgaacttgggttttccctgcaatagaaattgaattctgcctctttttgaaaaaaatgtattcacatacaaatcttca

SEQ ID NO: 143969 - DNA, 1507 bp, Homo sapiens
  Payload ID: 8455
  Gene Symbol: IL23R
  Gene Name: interleukin 23 receptor
  ENST ID: ENST00000473881
  CDS Start-End: 29-244
aagtaagaagagccttttgcctcccaccatgattctgaggccttaccagccatgtggaactgttaaagaatttgacaccaattttacatatgtgcaacagtcagaattctacttggagccaaacattaagtacgtatttcaagtgagatgtcaagaaacaggcaaaaggtactggcagccttggagttcactgttttttcataaaacacctgaaacaggattaaaagaaggatcttattgttaataccaaagtggctttatgaagatattcctaatatgaaaaacagcaatgttgtgaaaatgctacaggaaaatagtgaacttatgaataataattccagtgagcaggtcctatatgttgatcccatgattacagagataaaagaaatcttcatcccagaacacaagcctacagactacaagaaggagaatacaggacccctggagacaagagactacccgcaaaactcgctattcgacaatactacagttgtatatattcctgatctcaacactggatataaaccccaaatttcaaattttctgcctgagggaagccatctcagcaataataatgaaattacttccttaacacttaaaccaccagttgattccttagactcaggaaataatcccaggttacaaaagcatcctaattttgctttttctgtttcaagtgtgaattcactaagcaacacaatatttcttggagaattaagcctcatattaaatcaaggagaatgcagttctcctgacatacaaaactcagtagaggaggaaaccaccatgcttttggaaaatgattcacccagtgaaactattccagaacagaccctgcttcctgatgaatttgtctcctgtttggggatcgtgaatgaggagttgccatctattaatacttattttccacaaaatattttggaaagccacttcaataggatttcactcttggaaaagtagagctgtgtggtcaaaatcaatatgagaaagctgccttgcaatctgaacttgggttttccctgcaatagaaattgaattctgcctctttttgaaaaaaatgtattcacatacaaatcttcacatggacacatgttttcatttcccttggataaatacctaggtaggggattgctgggccatatgataagcatatgtttcagttctaccaatcttgtttccagagtagtgacatttctgtgctcctaccatcaccatgtaagaattcccgggagctccatgcctttttaattttagccattcttctgcctcatttcttaaaattagagaattaaggtcccgaaggtggaacatgcttcatggtcacacatacaggcacaaaaacagcattatgtggacgcctcatgtattttttatagagtcaactatttcctctttattttccctcattgaaagatgcaaaacagctctctattgtgtacagaaagggtaaataatgcaaaatacctggtagtaaaataaatgctgaaaattttcctttaaaatagaa

SEQ ID NO: 143970 - DNA, 1046 bp, Homo sapiens
  Payload ID: 8456
  Gene Symbol: IL23A
  Gene Name: interleukin 23, alpha subunit p19
  Uniprot ID: Q9NPF7
  ENST ID: ENST00000228534
  CDS Start-End: 171-740
gagaaaaacaacaggaagcagcttacaaactcggtgaacaactgagggaaccaaaccagagacgcgctgaacagagagaatcaggctcaaagcaagtggaagtgggcagagattccaccaggactggtgcaaggcgcagagccagccagatttgagaagaaggcaaaaagatgctggggagcagagctgtaatgctgctgttgctgctgccctggacagctcagggcagagctgtgcctgggggcagcagccctgcctggactcagtgccagcagctttcacagaagctctgcacactggcctggagtgcacatccactagtgggacacatggatctaagagaagagggagatgaagagactacaaatgatgttccccatatccagtgtggagatggctgtgacccccaaggactcagggacaacagtcagttctgcttgcaaaggatccaccagggtctgattttttatgagaagctgctaggatcggatattttcacaggggagccttctctgctccctgatagccctgtgggccagcttcatgcctccctactgggcctcagccaactcctgcagcctgagggtcaccactgggagactcagcagattccaagcctcagtcccagccagccatggcagcgtctccttctccgcttcaaaatccttcgcagcctccaggcctttgtggctgtagccgcccgggtctttgcccatggagcagcaaccctgagtccctaaaggcagcagctcaaggatggcactcagatctccatggcccagcaaggccaagataaatctaccaccccaggcacctgtgagccaacaggttaattagtccattaattttagtgggacctgcatatgttgaaaattaccaatactgactgacatgtgatgctgacctatgataaggttgagtatttattagatgggaagggaaatttggggattatttatcctcctggggacagtttggggaggattatttattgtatttatattgaattatgtacttttttcaataaagtcttatttttgtggcta

SEQ ID NO: 143971 - DNA, 1701 bp, Homo sapiens
  Payload ID: 8457
  Gene Symbol: IL24
  Gene Name: interleukin 24
  Uniprot ID: Q13007
  ENST ID: ENST00000294984
  CDS Start-End: 275-895
cttgcctgcaaacctttacttctgaaatgacttccacggctgggacgggaaccttccacccacagctatgcctctgattggtgaatggtgaaggtgcctgtctaacttttctgtaaaaagaaccagctgcctccaggcagccagccctcaagcatcacttacaggaccagagggacaagacatgactgtgatgaggagctgctttcgccaatttaacaccaagaagaattgaggctgcttgggaggaaggccaggaggaacacgagactgagagatgaattttcaacagaggctgcaaagcctgtggactttagccagacccttctgccctcctttgctggcgacagcctctcaaatgcagatggttgtgctcccttgcctgggttttaccctgcttctctggagccaggtatcaggggcccagggccaagaattccactttgggccctgccaagtgaagggggttgttccccagaaactgtgggaagccttctgggctgtgaaagacactatgcaagctcaggataacatcacgagtgcccggctgctgcagcaggaggttctgcagaacgtctcggatgctgagagctgttaccttgtccacaccctgctggagttctacttgaaaactgttttcaaaaactaccacaatagaacagttgaagtcaggactctgaagtcattctctactctggccaacaactttgttctcatcgtgtcacaactgcaacccagtcaagaaaatgagatgttttccatcagagacagtgcacacaggcggtttctgctattccggagagcattcaaacagttggacgtagaagcagctctgaccaaagcccttggggaagtggacattcttctgacctggatgcagaaattctacaagctctgaatgtctagaccaggacctccctccccctggcactggtttgttccctgtgtcatttcaaacagtctcccttcctatgctgttcactggacacttcacgcccttggccatgggtcccattcttggcccaggattattgtcaaagaagtcattctttaagcagcgccagtgacagtcagggaaggtgcctctggatgctgtgaagagtctacagagaagattcttgtatttattacaactctatttaattaatgtcagtatttcaactgaagttctatttatttgtgagactgtaagttacatgaaggcagcagaatattgtgccccatgcttctttacccctcacaatccttgccacagtgtggggcagtggatgggtgcttagtaagtacttaataaactgtggtgctttttttggcctgtctttggattgttaaaaaacagagagggatgcttggatgtaaaactgaacttcagagcatgaaaatcacactgtcttctgatatctgcagggacagagcattggggtgggggtaaggtgcatctgtttgaaaagtaaacgataaaatgtggattaaagtgcccagcacaaagcagatcctcaataaacatttcatttcccacccacactcgccagctcaccccatcatccctttcccttggtgccctccttttttttttatcctagtcattcttccctaatcttccacttgagtgtcaagctgaccttgctgatggtgacattgcacctggatgtactatccaatctgtgatgacattccctgctaataaaagacaacataactcaa

SEQ ID NO: 143972 - DNA, 1819 bp, Homo sapiens
  Payload ID: 8457
  Gene Symbol: IL24
  Gene Name: interleukin 24
  Uniprot ID: Q13007
  ENST ID: ENST00000367093
  CDS Start-End: 275-739
cttgcctgcaaacctttacttctgaaatgacttccacggctgggacgggaaccttccacccacagctatgcctctgattggtgaatggtgaaggtgcctgtctaacttttctgtaaaaagaaccagctgcctccaggcagccagccctcaagcatcacttacaggaccagagggacaagacatgactgtgatgaggagctgctttcgccaatttaacaccaagaagaattgaggctgcttgggaggaaggccaggaggaacacgagactgagagatgaattttcaacagaggctgcaaagcctgtggactttagccagcagacccttctgccctcctttgctggcgacagcctctcaaatgcagatggttgtgctcccttgcctgggttttaccctgcttctctggagccaggtatcaggggcccagggccaagaattccactttgggccctgccaagtgaagggggttgttccccagaaactgtgggaagccttctgggctgtgaaagacactatgcaagctcaggataacatcacgagtgcccggctgctgcagcaggaggttctgcagaacgtctcgcaagaaaatgagatgttttccatcagagacagtgcacacaggcggtttctgctattccggagagcattcaaacagttggacgtagaagcagctctgaccaaagcccttggggaagtggacattcttctgacctggatgcagaaattctacaagctctgaatgtctagaccaggacctccctccccctggcactggtttgttccctgtgtcatttcaaacagtctcccttcctatgctgttcactggacacttcacgcccttggccatgggtcccattcttggcccaggattattgtcaaagaagtcattctttaagcagcgccagtgacagtcagggaaggtgcctctggatgctgtgaagagtctacagagaagattcttgtatttattacaactctatttaattaatgtcagtatttcaactgaagttctatttatttgtgagactgtaagttacatgaaggcagcagaatattgtgccccatgcttctttacccctcacaatccttgccacagtgtggggcagtggatgggtgcttagtaagtacttaataaactgtggtgctttttttggcctgtctttggattgttaaaaaacagagagggatgcttggatgtaaaactgaacttcagagcatgaaaatcacactgtcttctgatatctgcagggacagagcattggggtgggggtaaggtgcatctgtttgaaaagtaaacgataaaatgtggattaaagtgcccagcacaaagcagatcctcaataaacatttcatttcccacccacactcgccagctcaccccatcatccctttcccttggtgccctccttttttttttatcctagtcattcttccctaatcttccacttgagtgtcaagctgaccttgctgatggtgacattgcacctggatgtactatccaatctgtgatgacattccctgctaataaaagacaacataactcaagtctggcagactttcttctctatttctggatgaatgcccagtgagactgtgttgtacagctagaaaaggccttcttcccaatagcaaggctgtgcatctagcctcaagctctggctgaactttgtggtcgacatcaatctaaagatacagtgtctgactataaccttgttccaaaaacctaggcaaagagtatatgtaggaggtgggatatcacttccatgacataagtgctattgcagagccgtggccacccaggaactcctgactgctttcc

SEQ ID NO: 143973 - DNA, 1779 bp, Homo sapiens
  Payload ID: 8457
  Gene Symbol: IL24
  Gene Name: interleukin 24
  ENST ID: ENST00000367095
  CDS Start-End: 275-430
cttgcctgcaaacctttacttctgaaatgacttccacggctgggacgggaaccttccacccacagctatgcctctgattggtgaatggtgaaggtgcctgtctaacttttctgtaaaaagaaccagctgcctccaggcagccagccctcaagcatcacttacaggaccagagggacaagacatgactgtgatgaggagctgctttcgccaatttaacaccaagaagaattgaggctgcttgggaggaaggccaggaggaacacgagactgagagatgaattttcaacagaggctgcaaagcctgtggactttagccagcaagctcaggataacatcacgagtgcccggctgctgcagcaggaggttctgcagaacgtctcggatgctgagagctgttaccttgtccacaccctgctggagttctacttgaaaactgttttcaaaaactaccacaatagaacagttgaagtcaggactctgaagtcattctctactctggccaacaactttgttctcatcgtgtcacaactgcaacccagtcaagaaaatgagatgttttccatcagagacagtgcacacaggcggtttctgctattccggagagcattcaaacagttggacgtagaagcagctctgaccaaagcccttggggaagtggacattcttctgacctggatgcagaaattctacaagctctgaatgtctagaccaggacctccctccccctggcactggtttgttccctgtgtcatttcaaacagtctcccttcctatgctgttcactggacacttcacgcccttggccatgggtcccattcttggcccaggattattgtcaaagaagtcattctttaagcagcgccagtgacagtcagggaaggtgcctctggatgctgtgaagagtctacagagaagattcttgtatttattacaactctatttaattaatgtcagtatttcaactgaagttctatttatttgtgagactgtaagttacatgaaggcagcagaatattgtgccccatgcttctttacccctcacaatccttgccacagtgtggggcagtggatgggtgcttagtaagtacttaataaactgtggtgctttttttggcctgtctttggattgttaaaaaacagagagggatgcttggatgtaaaactgaacttcagagcatgaaaatcacactgtcttctgatatctgcagggacagagcattggggtgggggtaaggtgcatctgtttgaaaagtaaacgataaaatgtggattaaagtgcccagcacaaagcagatcctcaataaacatttcatttcccacccacactcgccagctcaccccatcatccctttcccttggtgccctccttttttttttatcctagtcattcttccctaatcttccacttgagtgtcaagctgaccttgctgatggtgacattgcacctggatgtactatccaatctgtgatgacattccctgctaataaaagacaacataactcaagtctggcagactttcttctctatttctggatgaatgcccagtgagactgtgttgtacagctagaaaaggccttcttcccaatagcaaggctgtgcatctagcctcaagctctggctgaactttgtggtcgacatcaatctaaagatacagtgtctgactataaccttgttccaaaaacctaggcaaagagtatatgtaggaggtgggatatcacttccatgacataagtgctattgcagagccgtggccacccaggaactcctgactgctttcc

SEQ ID NO: 143974 - DNA, 1320 bp, Homo sapiens
  Payload ID: 8457
  Gene Symbol: IL24
  Gene Name: interleukin 24
  Uniprot ID: Q13007
  ENST ID: ENST00000391929
  CDS Start-End: 276-899
gcttgcctgcaaacctttacttctgaaatgacttccacggctgggacgggaaccttccacccacagctatgcctctgattggtgaatggtgaaggtgcctgtctaacttttctgtaaaaagaaccagctgcctccaggcagccagccctcaagcatcacttacaggaccagagggacaagacatgactgtgatgaggagctgctttcgccaatttaacaccaagaagaattgaggctgcttgggaggaaggccaggaggaacacgagactgagagatgaattttcaacagaggctgcaaagcctgtggactttagccagcagacccttctgccctcctttgctggcgacagcctctcaaatgcagatggttgtgctcccttgcctgggttttaccctgcttctctggagccaggtatcaggggcccagggccaagaattccactttgggccctgccaagtgaagggggttgttccccagaaactgtgggaagccttctgggctgtgaaagacactatgcaagctcaggataacatcacgagtgcccggctgctgcagcaggaggttctgcagaacgtctcggatgctgagagctgttaccttgtccacaccctgctggagttctacttgaaaactgttttcaaaaactaccacaatagaacagttgaagtcaggactctgaagtcattctctactctggccaacaactttgttctcatcgtgtcacaactgcaacccagtcaagaaaatgagatgttttccatcagagacagtgcacacaggcggtttctgctattccggagagcattcaaacagttggacgtagaagcagctctgaccaaagcccttggggaagtggacattcttctgacctggatgcagaaattctacaagctctgaatgtctagaccaggacctccctccccctggcactggtttgttccctgtgtcatttcaaacagtctcccttcctatgctgttcactggacacttcacgcccttggccatgggtcccattcttggcccaggattattgtcaaagaagtcattctttaagcagcgccagtgacagtcagggaaggtgcctctggatgctgtgaagagtctacagagaagattcttgtatttattacaactctatttaattaatgtcagtatttcaactgaagttctatttatttgtgagactgtaagttacatgaaggcagcagaatattgtgccccatgcttctttacccctcacaatccttgccacagtgtggggcagtggatgggtgcttagtaagtacttaataaactgtggtgctttttttggcctgtc

SEQ ID NO: 143975 - DNA, 182 bp, Homo sapiens
  Payload ID: 8457
  Gene Symbol: IL24
  Gene Name: interleukin 24
  ENST ID: ENST00000480741
  CDS Start-End: 1-182
atgaattttcaacagaggctgcaaagcctgtggactttagccagcaagctcaggataacatcacgagtgcccggctgctgcagcaggaggttctgcagaacgtctcgcaagaaaatgagatgttttccatcagagacagtgcacacaggcggtttctgctattccggagagcattcaaacag

SEQ ID NO: 143976 - DNA, 1621 bp, Homo sapiens
  Payload ID: 8457
  Gene Symbol: IL24
  Gene Name: interleukin 24
  Uniprot ID: Q13007
  ENST ID: ENST00000611909
  CDS Start-End: 276-467
gcttgcctgcaaacctttacttctgaaatgacttccacggctgggacgggaaccttccacccacagctatgcctctgattggtgaatggtgaaggtgcctgtctaacttttctgtaaaaagaaccagctgcctccaggcagccagccctcaagcatcacttacaggaccagagggacaagacatgactgtgatgaggagctgctttcgccaatttaacaccaagaagaattgaggctgcttgggaggaaggccaggaggaacacgagactgagagatgaattttcaacagaggctgcaaagcctgtggactttagccagcaagctcaggataacatcacgagtgcccggctgctgcagcaggaggttctgcagaacgtctcgcaagaaaatgagatgttttccatcagagacagtgcacacaggcggtttctgctattccggagagcattcaaacagttggacgtagaagcagctctgaccaaagcccttggggaagtggacattcttctgacctggatgcagaaattctacaagctctgaatgtctagaccaggacctccctccccctggcactggtttgttccctgtgtcatttcaaacagtctcccttcctatgctgttcactggacacttcacgcccttggccatgggtcccattcttggcccaggattattgtcaaagaagtcattctttaagcagcgccagtgacagtcagggaaggtgcctctggatgctgtgaagagtctacagagaagattcttgtatttattacaactctatttaattaatgtcagtatttcaactgaagttctatttatttgtgagactgtaagttacatgaaggcagcagaatattgtgccccatgcttctttacccctcacaatccttgccacagtgtggggcagtggatgggtgcttagtaagtacttaataaactgtggtgctttttttggcctgtctttggattgttaaaaaacagagagggatgcttggatgtaaaactgaacttcagagcatgaaaatcacactgtcttctgatatctgcagggacagagcattggggtgggggtaaggtgcatctgtttgaaaagtaaacgataaaatgtggattaaagtgcccagcacaaagcagatcctcaataaacatttcatttcccacccacactcgccagctcaccccatcatccctttcccttggtgccctccttttttttttatcctagtcattcttccctaatcttccacttgagtgtcaagctgaccttgctgatggtgacattgcacctggatgtactatccaatctgtgatgacattccctgctaataaaagacaacataactcaagtctggcagactttcttctctatttctggatgaatgcccagtgagactgtgttgtacagctagaaaaggccttcttcccaatagcaaggctgtgcatctagcctcaagctctggctgaactttgtggtcgacatcaatctaaagatacagtgtctgactataaccttgttccaaaaacctaggcaaagagtatatgtaggaggtgggatatcacttccatgacataagtgctattgcagagccgtggccacccaggaactcctgactgctttcc

SEQ ID NO: 143977 - DNA, 1315 bp, Homo sapiens
  Payload ID: 8458
  Gene Symbol: IL25
  Gene Name: interleukin 25
  Uniprot ID: Q9H293
  ENST ID: ENST00000329715
  CDS Start-End: 259-792
ggcttgctgaaaataaaatcaggactcctaacctgctccagtcagcctgcttccacgaggcctgtcagtcagtgccccacttgtgactgagtgtgcagtgcccagcatgtaccaggtcagtgcagagggctgcctgagggctgtgctgagagggagaggagcagagatgctgctgagggtggagggaggccaagctgccaggtttggggctgggggccaagtggagtgagaaactgggatcccagggggagggtgcagatgagggagcgacccagattaggtgaggacagttctctcattagccttttcctacaggtggttgcattcttggcaatggtcatgggaacccacacctacagccactggcccagctgctgccccagcaaagggcaggacacctctgaggagctgctgaggtggagcactgtgcctgtgcctcccctagagcctgctaggcccaaccgccacccagagtcctgtagggccagtgaagatggacccctcaacagcagggccatctccccctggagatatgagttggacagagacttgaaccggctcccccaggacctgtaccacgcccgttgcctgtgcccgcactgcgtcagcctacagacaggctcccacatggacccccggggcaactcggagctgctctaccacaaccagactgtcttctaccggcggccatgccatggcgagaagggcacccacaagggctactgcctggagcgcaggctgtaccgtgtttccttagcttgtgtgtgtgtgcggccccgtgtgatgggctagccggacctgctggaggctggtccctttttgggaaacctggagccaggtgtacaaccacttgccatgaagggccaggatgcccagatgcttggcccctgtgaagtgctgtctggagcagcaggatcccgggacaggatggggggctttggggaaagcctgcacttctgcacattttgaaaagagcagctgctgcttagggccgccggaagctggtgtcctgtcattttctctcaggaaaggttttcaaagttctgcccatttctggaggccaccactcctgtctcttcctcttttcccatcccctgctaccctggcccagcacaggcactttctagatatttcccccttgctggagaagaaagagcccctggttttatttgtttgtttactcatcactcagtgagcatctactttgggtgcattctagtgtagttactagtcttttgacatggatgattctgaggaggaagctgttattgaatgtatagagatttatccaaataaatatctttatttaaaaatg

SEQ ID NO: 143978 - DNA, 744 bp, Homo sapiens
  Payload ID: 8458
  Gene Symbol: IL25
  Gene Name: interleukin 25
  Uniprot ID: Q9H293
  ENST ID: ENST00000397242
  CDS Start-End: 159-644
ctcaagtcactccctaaaaagacagtggaaataaatttgaataaacaaaacaggcttgctgaaaataaaatcaggactcctaacctgctccagtcagcctgcttccacgaggcctgtcagtcagtgccccacttgtgactgagtgtgcagtgcccagcatgtaccaggtggttgcattcttggcaatggtcatgggaacccacacctacagccactggcccagctgctgccccagcaaagggcaggacacctctgaggagctgctgaggtggagcactgtgcctgtgcctcccctagagcctgctaggcccaaccgccacccagagtcctgtagggccagtgaagatggacccctcaacagcagggccatctccccctggagatatgagttggacagagacttgaaccggctcccccaggacctgtaccacgcccgttgcctgtgcccgcactgcgtcagcctacagacaggctcccacatggacccccggggcaactcggagctgctctaccacaaccagactgtcttctaccggcggccatgccatggcgagaagggcacccacaagggctactgcctggagcgcaggctgtaccgtgtttccttagcttgtgtgtgtgtgcggccccgtgtgatgggctagccggacctgctggaggctggtccctttttgggaaacctggagccaggtgtacaaccacttgccatgaagggccaggatgcccagatgcttggcccctgtg

SEQ ID NO: 143979 - DNA, 1075 bp, Homo sapiens
  Payload ID: 8459
  Gene Symbol: IL26
  Gene Name: interleukin 26
  Uniprot ID: Q9NPH9
  ENST ID: ENST00000229134
  CDS Start-End: 66-581
atctaaccggcattagtatctcttgggctgctgtgagtgacacacgctgagtggggtgaagggaaatgctggtgaatttcattttgaggtgtgggttgctgttagtcactctgtctcttgccattgccaagcacaagcaatcttccttcaccaaaagttgttacccaaggggaacattgtcccaagctgttgacgctctctatatcaaagcagcatggctcaaagcaacgattccagaagaccgcataaaaaatatacgattattaaaaaagaaaacaaaaaagcagtttatgaaaaactgtcaatttcaagaacagcttctgtccttcttcatggaagacgtttttggtcaactgcaattgcaaggctgcaagaaaatacgctttgtggaggactttcatagccttaggcagaaattgagccactgtatttcctgtgcttcatcagctagagagatgaaatccattaccaggatgaaaagaatattttataggattggaaacaaaggaatctacaaagccatcagtgaactggatattcttctttcctggattaaaaaattattggaaagcagtcagtaaaccaaagccaagtacattgattttacagttattttgaaatacaataagaactgctagaaatatgtttataacagtctatttcttttaaaaactttttaacataatactgacggcatgttaggtgattcagaatagacaagaaggatttagtaaattaacgttttggatataagttgtcactaatttgcacattttctgtgttttcaaataatgtttccattctgaacatgttttgtcattcacaagtacattgtgtcaacttaatttaaagtatgtaacctgaattaactcgtgtaatatttgtgtgtggagtgggatgtggggggtggagggggaatgacagatttctggaatgcaatgtaatgttactgagacttaaatagatgttatgtatatgattgtctgtttaagtgtttgaaaattgttaattatgcccagtgtgaacttagtacttaacacattttgattttaattaaataaattgggtttccttc

SEQ ID NO: 143980 - DNA, 1044 bp, Homo sapiens
  Payload ID: 8460
  Gene Symbol: IL27
  Gene Name: interleukin 27
  Uniprot ID: Q8NEV9
  ENST ID: ENST00000356897
  CDS Start-End: 24-755
gaccaaagaggctgggccccgccatgggccagacggcaggcgaccttggctggcggctcagcctgttgctgcttcccttgctcctggttcaagctggtgtctggggattcccaaggcccccagggaggccccagctgagcctgcaggagctgcggagggagttcacagtcagcctgcatctcgccaggaagctgctctccgaggttcggggccaggcccaccgctttgcggaatctcacctgccaggagtgaacctgtacctcctgcccctgggagagcagctccctgatgtttccctgaccttccaggcctggcgccgcctctctgacccggagcgtctctgcttcatctccaccacgcttcagcccttccatgccctgctgggagggctggggacccagggccgctggaccaacatggagaggatgcagctgtgggccatgaggctggacctccgcgatctgcagcggcacctccgcttccaggtgctggctgcaggattcaacctcccggaggaggaggaggaggaagaggaggaggaggaggaggagaggaaggggctgctcccaggggcactgggcagcgccttacagggcccggcccaggtgtcctggccccagctcctctccacctaccgcctgctgcactccttggagctcgtcttatctcgggccgtgcgggagttgctgctgctgtccaaggctgggcactcagtctggcccttggggttcccaacattgagcccccagccctgatcggtggcttcttagccccctgccccccaccctttagaactttaggactggagtcttggcatcagggcagccttcgcatcatcagccttggacaagggagggctcttccagccccctgccccaggctctacccagtaactgaaagcccctctggtcctcgccagctatttatttcttggatatttatttattgtttagggagatgatggtttatttattgtcttggggcccgatggtcctcctcgggccaagcccccatgctgggtgcccaataaagcactctcatcca

SEQ ID NO: 143981 - DNA, 657 bp, Homo sapiens
  Payload ID: 8460
  Gene Symbol: IL27
  Gene Name: interleukin 27
  ENST ID: ENST00000568075
  CDS Start-End: 587-657
cccgcactggcccacgctgaagataggggacttgagttccagtcttccttctgctaccgaccggctttgtgaccttgaacaagacttcccctccctgattccatcctcatgtcacatctgaagcctccaacttctgtcactgagctcaggattcccaggcaagcccacggagtgccccacagggtcagagccgtaacaggacttggaaaataacccgaaaattgggctcagcctgttgctgcttcccttgctcctggttcaagctggtgtctggggattcccaaggcccccagggaggccccagctgagcctgcaggagctgcggagggagttcacagtcagcctgcatctcgccaggaagctgctctccgaggttcggggccaggcccaccgctttgcggaatctcacctgccaggagtgaacctgtacctcctgcccctgggagagcagctccctgatgtttccctgaccttccaggcctggcgccgcctctctgacccggagcgtctctgcttcatctccaccacgcttcagcccttccatgccctgctgggagggctggggacccagggccgctggaccaacatggagaggatgcagctgtgggccatgaggctggacctccgcgatctgcagcggcacctccgcttccaggt

SEQ ID NO: 143982 - DNA, 2962 bp, Homo sapiens
  Payload ID: 8461
  Gene Symbol: IL27RA
  Gene Name: interleukin 27 receptor, alpha
  Uniprot ID: Q6UWB1
  ENST ID: ENST00000263379
  CDS Start-End: 126-2036
ggcctgccggggtggttcggcttcccgttgccgcctcgggcgctgtacccagagctcgaagaggagcagcgcggccgcgcggacccggcaaggctgggccggactcggggctcccgagggacgccatgcggggaggcaggggcgcccctttctggctgtggccgctgcccaagctggcgctgctgcctctgttgtgggtgcttttccagcggacgcgtccccagggcagcgccgggccactgcagtgctacggagttggacccttgggcgacttgaactgctcgtgggagcctcttggggacctgggagccccctccgagttacacctccagagccaaaagtaccgttccaacaaaacccagactgtggcagtggcagccggacggagctgggtggccattcctcgggaacagctcaccatgtctgacaaactccttgtctggggcactaaggcaggccagcctctctggccccccgtcttcgtgaacctagaaacccaaatgaagccaaacgccccccggctgggccctgacgtggacttttccgaggatgaccccctggaggccactgtccattgggccccacctacatggccatctcataaagttctgatctgccagttccactaccgaagatgtcaggaggcggcctggaccctgctggaaccggagctgaagaccatacccctgacccctgttgagatccaagatttggagctagccactggctacaaagtgtatggccgctgccggatggagaaagaagaggatttgtggggcgagtggagccccattttgtccttccagacaccgccttctgctccaaaagatgtgtgggtatcagggaacctctgtgggacgcctggaggagaggaacctttgcttctatggaaggccccagggccctgtgtgcaggtgagctacaaagtctggttctgggttggaggtcgtgagctgagtccagaaggaattacctgctgctgctccctaattcccagtggggcggagtgggccagggtgtccgctgtcaacgccacaagctgggagcctctcaccaacctctctttggtctgcttggattcagcctctgccccccgtagcgtggcagtcagcagcatcgctgggagcacggagctactggtgacctggcaaccggggcctggggaaccactggagcatgtagtggactgggctcgagatggggaccccctggagaaactcaactgggtccggcttccccctgggaacctcagtgctctgttaccagggaatttcactgtcggggtcccctatcgaatcactgtgaccgcagtctctgcttcaggcttggcctctgcatcctccgtctgggggttcagggaggaattagcacccctagtggggccaacgctttggcgactccaagatgcccctccagggacccccgccatagcgtggggagaggtcccaaggcaccagcttcgaggccacctcacccactacaccttgtgtgcacagagtggaaccagcccctccgtctgcatgaatgtgagtggcaacacacagagtgtcaccctgcctgaccttccttggggtccctgtgagctgtgggtgacagcatctaccatcgctggacagggccctcctggtcccatcctccggcttcatctaccagataacaccctgaggtggaaagttctgccgggcatcctattcttgtggggcttgttcctgttggggtgtggcctgagcctggccacctctggaaggtgctaccacctaaggcacaaagtgctgccccgctgggtctgggagaaagttcctgatcctgccaacagcagttcaggccagccccacatggagcaagtacctgaggcccagccccttggggacttgcccatcctggaagtggaggagatggagcccccgccggttatggagtcctcccagcccgcccaggccaccgccccgcttgactctgggtatgagaagcacttcctgcccacacctgaggagctgggccttctggggccccccaggccacaggttctggcctgaaccacacgtctggctgggggctgccagccaggctagagggatgctcatgcaggttgcaccccagtcctggattagccctcttgatggatgaagacactgaggactcagagaggctgagtcacttacctgaggacacccagccaggcagagctgggattgaaggacccctatagagaagggcttggcccccatggggaagacacggatggaaggtggagcaaaggaaaatacatgaaattgagagtggcagctgcctgccaaaatctgttccgctgtaacagaactgaatttggaccccagcacagtggctcacgcctgtaatcccagcactttggcaggccaaggtggaaggatcacttagagctaggagtttgagaccagcctgggcaatatagcaagacccctcactacaaaaataaaacatcaaaaacaaaaacaattagctgggcatgatggcacacacctgtagtccgagccacttgggaggctgaggtgggaggatcggttgagcccaggagttcgaagctgcagggacctctgattgcaccactgcactccaggctgggtaacagaatgagaccttatctcaaaaataaacaaactaataaaaagcaaaaaaaaaaaaaaaagaaaagaaaaaacactgcatttgggcaccatctcagctcccttgcatccaggtgcagcatggactgagttcttgacaacagaatgtggtcagaagtgacatatgccaacacggggtctgggtgggggctcccccacatcctttccttgcctatgagctggaacataacacatgcctatgatccagctttggtcatacccaaggggaaggtggagcaagaaatgaaaaggaacctgaatccctgaatgactgcatggatagaaccactaagaaaaataaacttttatatttttatagc

SEQ ID NO: 143983 - DNA, 1050 bp, Homo sapiens
  Payload ID: 8462
  Gene Symbol: IL3
  Gene Name: interleukin 3
  Uniprot ID: P08700
  ENST ID: ENST00000296870
  CDS Start-End: 179-637
gaggttccatgtcagataaagatccttccgacgcctgccccacaccaccacctccccccgccttgcccggggttgtgggcaccttgctgctgcacatataaggcgggaggctgttgccaactcttcagagccccacgaaggaccagaacaagacagagtgcctcctgccgatccaaacatgagccgcctgcccgtcctgctcctgctccaactcctggtccgccccggactccaagctcccatgacccagacaacgcccttgaagacaagctgggttaactgctctaacatgatcgatgaaattataacacacttaaagcagccacctttgcctttgctggacttcaacaacctcaatggggaagaccaagacattctgatggaaaataaccttcgaaggccaaacctggaggcattcaacagggctgtcaagagtttacagaacgcatcagcaattgagagcattcttaaaaatctcctgccatgtctgcccctggccacggccgcacccacgcgacatccaatccatatcaaggacggtgactggaatgaattccggaggaaactgacgttctatctgaaaacccttgagaatgcgcaggctcaacagacgactttgagcctcgcgatcttttgagtccaacgtccagctcgttctctgggccttctcaccacagagcctcgggacatcaaaaacagcagaacttctgaaacctctgggtcatctctcacacattccaggaccagaagcatttcaccttttcctgcggcatcagatgaattgttaattatctaatttctgaaatgtgcagctcccatttggccttgtgcggttgtgttctcatttttatcccattgagactatttatttatgtatgtatgtatttatttatttattgcctggagtgtgaactgtatttattttagcagaggagccatgtcctgctgcttctgcaaaaaactcagagtggggtggggagcatgttcatttgtacctcgagttttaaactggttcctagggatgtgtgagaataaactagactctgaaca

SEQ ID NO: 143984 - DNA, 1706 bp, Homo sapiens
  Payload ID: 8463
  Gene Symbol: IL3RA
  Gene Name: interleukin 3 receptor, alpha (low affinity)
  Uniprot ID: P26951
  ENST ID: ENST00000331035
  CDS Start-End: 350-1486
gtcaggttcatggttacgaagctgctgaccccaggatcccagcccgtgggagagaagggggtctctgacagcccccacccctccccactgccagatccttattgggtctgagtttcaggggtggggccccagctggaggttataaaacagctcaatcggggagtacaaccttcggtttctcttcggggaaagctgctttcagcgcacacgggaagatatcagaaacatcctaggatcaggacaccccagatcttctcaactggaaccacgaaggctgtttcttccacacagtactttgatctccatttaagcaggcacctctgtcctgcgttccggagctgcgttcccgatggtcctcctttggctcacgctgctcctgatcgccctgccctgtctcctgcaaacgaaggaagatccaaacccaccaatcacgaacctaaggatgaaagcaaaggctcagcagttgacctgggaccttaacagaaatgtgaccgatatcgagtgtgttaaagacgccgactattctatgccggcagtgaacaatagctattgccagtttggagcaatttccttatgtgaagtgaccaactacaccgtccgagtggccaacccaccattctccacgtggatcctcttccctgagaacagtgggaagccttgggcaggtgcggagaatctgacctgctggattcatgacgtggatttcttgagctgcagctgggcggtaggcccgggggcccccgcggacgtccagtacgacctgtacttgaacgttgccaacaggcgtcaacagtacgagtgtcttcactacaaaacggatgctcagggaacacgtatcgggtgtcgtttcgatgacatctctcgactctccagcggttctcaaagttcccacatcctggtgcggggcaggagcgcagccttcggtatcccctgcacagataagtttgtcgtcttttcacagattgagatattaactccacccaacatgactgcaaagtgtaataagacacattcctttatgcactggaaaatgagaagtcatttcaatcgcaaatttcgctatgagcttcagatacaaaagagaatgcagcctgtaatcacagaacaggtcagagacagaacctccttccagctactcaatcctggaacgtacacagtacaaataagagcccgggaaagagtgtatgaattcttgagcgcctggagcaccccccagcgcttcgagtgcgaccaggaggagggcgcaaacacacgtgcctggcggacgtcgctgctgatcgcgctggggacgctgctggccctggtctgtgtcttcgtgatctgcagaaggtatctggtgatgcagagactctttccccgcatccctcacatgaaagaccccatcggtgacagcttccaaaacgacaagctggtggtctgggaggcgggcaaagccggcctggaggagtgtctggtgactgaagtacaggtcgtgcagaaaacttgagactggggttcagggcttgtgggggtctgcctcaatctccctggccgggccaggcgcctgcacagactggctgctggacctgcgcacgcagcccaggaatggacattcctaacgggtggtgggcatgggagatgcctgtgtaatttcgtccgaagctgccaggaagaagaacagaactttgtgtgtttatttcatgataaagtgatttttttttttttaa

SEQ ID NO: 143985 - DNA, 1476 bp, Homo sapiens
  Payload ID: 8463
  Gene Symbol: IL3RA
  Gene Name: interleukin 3 receptor, alpha (low affinity)
  Uniprot ID: P26951
  ENST ID: ENST00000381469
  CDS Start-End: 350-1252
gtcaggttcatggttacgaagctgctgaccccaggatcccagcccgtgggagagaagggggtctctgacagcccccacccctccccactgccagatccttattgggtctgagtttcaggggtggggccccagctggaggttataaaacagctcaatcggggagtacaaccttcggtttctcttcggggaaagctgctttcagcgcacacgggaagatatcagaaacatcctaggatcaggacaccccagatcttctcaactggaaccacgaaggctgtttcttccacacagtactttgatctccatttaagcaggcacctctgtcctgcgttccggagctgcgttcccgatggtcctcctttggctcacgctgctcctgatcgccctgccctgtctcctgcaaacgaaggaaggtgggaagccttgggcaggtgcggagaatctgacctgctggattcatgacgtggatttcttgagctgcagctgggcggtaggcccgggggcccccgcggacgtccagtacgacctgtacttgaacgttgccaacaggcgtcaacagtacgagtgtcttcactacaaaacggatgctcagggaacacgtatcgggtgtcgtttcgatgacatctctcgactctccagcggttctcaaagttcccacatcctggtgcggggcaggagcgcagccttcggtatcccctgcacagataagtttgtcgtcttttcacagattgagatattaactccacccaacatgactgcaaagtgtaataagacacattcctttatgcactggaaaatgagaagtcatttcaatcgcaaatttcgctatgagcttcagatacaaaagagaatgcagcctgtaatcacagaacaggtcagagacagaacctccttccagctactcaatcctggaacgtacacagtacaaataagagcccgggaaagagtgtatgaattcttgagcgcctggagcaccccccagcgcttcgagtgcgaccaggaggagggcgcaaacacacgtgcctggcggacgtcgctgctgatcgcgctggggacgctgctggccctggtctgtgtcttcgtgatctgcagaaggtatctggtgatgcagagactctttccccgcatccctcacatgaaagaccccatcggtgacagcttccaaaacgacaagctggtggtctgggaggcgggcaaagccggcctggaggagtgtctggtgactgaagtacaggtcgtgcagaaaacttgagactggggttcagggcttgtgggggtctgcctcaatctccctggccgggccaggcgcctgcacagactggctgctggacctgcgcacgcagcccaggaatggacattcctaacgggtggtgggcatgggagatgcctgtgtaatttcgtccgaagctgccaggaagaagaacagaactttgtgtgtttatttcatgataaagtgatttttttttttttaaccca

SEQ ID NO: 143986 - DNA, 662 bp, Homo sapiens
  Payload ID: 8463
  Gene Symbol: IL3RA
  Gene Name: interleukin 3 receptor, alpha (low affinity)
  ENST ID: ENST00000432757
  CDS Start-End: 170-662
cttcggggaaagctgctttcagcgcacacgggaagatatcagaaacatcctaggatcaggacaccccagatcttctcaactggaaccacgaaggctgtttcttccacacagtactttgatctccatttaagcaggcacctctgtcctgcgttccggagctgcgttcccgatggtcctcctttggctcacgctgctcctgatcgccctgccctgtctcctgcaaacgaaggaaggtgggaagccttgggcaggtgcggagaatctgacctgctggattcatgacgtggatttcttgagctgcagctgggcggtaggcccgggggcccccgcggacgtccagtacgacctgtacttgaacgttgccaacaggcgtcaacagtacgagtgtcttcactacaaaacggatgctcagggaacacgtatcgggtgtcgtttcgatgacatctctcgactctccagcggttctcaaagttcccacatcctggtgcggggcaggagcgcagccttcggtatcccctgcacagataagtttgtcgtcttttcacagattgagatattaactccacccaacatgactgcaaagtgtaataagacacattcctttatgcactggaaaatgagaagtcatttcaatcgcaaatttcgctatgagcttcagatac

SEQ ID NO: 143987 - DNA, 904 bp, Homo sapiens
  Payload ID: 8464
  Gene Symbol: IL31
  Gene Name: interleukin 31
  Uniprot ID: Q6EBC2
  ENST ID: ENST00000377035
  CDS Start-End: 28-522
ctgaagctggccttgctctctctcgccatggcctctcactcaggcccctcgacgtctgtgctctttctgttctgctgcctgggaggctggctggcctcccacacgttgcccgtccgtttactacgaccaagtgatgatgtacagaaaatagtcgaggaattacagtccctctcgaagatgcttttgaaagatgtggaggaagagaagggcgtgctcgtgtcccagaattacacgctgccgtgtctcagccctgacgcccagccgccaaacaacatccacagcccagccatccgggcatatctcaagacaatcagacagctagacaacaaatctgttattgatgagatcatagagcacctcgacaaactcatatttcaagatgcaccagaaacaaacatttctgtgccaacagacacccatgaatgtaaacgcttcatcctgactatttctcaacagttttcagagtgcatggacctcgcactaaaatcattgacctctggagcccaacaggccaccacttaaggccatctcttcctttcggattggcaggaacttaaggagccttaaaaagatgaccgacagctaagtgtgggaactctgccgtgattccttaagtacatttttccaatgaataatctcagggacccctcatatgggctagtcccgggagggctgagatgtgaatttgtgaattaccttgaaaaacattaggttattgttattagtcttggtatttatggaatgcttttcttctgcaggcttaagtcttacttattataccctcgtgagggtgggaggtggcagctatgttaatttattgatatttattgtactaagagttgtcaatgctccctgggggagccctcggaatctatttaataaattatattgaatttttctcata

SEQ ID NO: 143988 - DNA, 2695 bp, Homo sapiens
  Payload ID: 8465
  Gene Symbol: IL31RA
  Gene Name: interleukin 31 receptor A
  Uniprot ID: Q8NI17
  ENST ID: ENST00000297015
  CDS Start-End: 241-2478
ttaacaataatgcaatccatttcccagcataagtgggtaagtgccactttgacttgggctgggcttaaaagcacaagaaaagctcgcagacaatcagagtggaaacactcccacatcttagtgtggataaattaaagtccagattgttcttcctgtcctgacttgtgctgtgggaggtggagttgcctttgatgcaaatcctttgagccagcagaacatctgtggaacatcccctgatacatgaagctctctccccagccttcatgtgttaacctggggatgatgtggacctgggcactgtggatgctcccctcactctgcaaattcagcctggcagctctgccagctaagcctgagaacatttcctgtgtctactactataggaaaaatttaacctgcacttggagtccaggaaaggaaaccagttatacccagtacacagttaagagaacttacgcttttggagaaaaacatgataattgtacaaccaatagttctacaagtgaaaatcgtgcttcgtgctcttttttccttccaagaataacgatcccagataattataccattgaggtggaagctgaaaatggagatggtgtaattaaatctcatatgacatactggagattagagaacatagcgaaaactgaaccacctaagattttccgtgtgaaaccagttttgggcatcaaacgaatgattcaaattgaatggataaagcctgagttggcgcctgtttcatctgatttaaaatacacacttcgattcaggacagtcaacagtaccagctggatggaagtcaacttcgctaagaaccgtaaggataaaaaccaaacgtacaacctcacggggctgcagccttttacagaatatgtcatagctctgcgatgtgcggtcaaggagtcaaagttctggagtgactggagccaagaaaaaatgggaatgactgaggaagaagctccatgtggcctggaactgtggagagtcctgaaaccagctgaggcggatggaagaaggccagtgcggttgttatggaagaaggcaagaggagccccagtcctagagaaaacacttggctacaacatatggtactatccagaaagcaacactaacctcacagaaacaatgaacactactaaccagcagcttgaactgcatctgggaggcgagagcttttgggtgtctatgatttcttataattctcttgggaagtctccagtggccaccctgaggattccagctattcaagaaaaatcatttcagtgcattgaggtcatgcaggcctgcgttgctgaggaccagctagtggtgaagtggcaaagctctgctctagacgtgaacacttggatgattgaatggtttccggatgtggactcagagcccaccaccctttcctgggaatctgtgtctcaggccacgaactggacgatccagcaagataaattaaaacctttctggtgctataacatctctgtgtatccaatgttgcatgacaaagttggcgagccatattccatccaggcttatgccaaagaaggcgttccatcagaaggtcctgagaccaaggtggagaacattggcgtgaagacggtcacgatcacatggaaagagattcccaagagtgagagaaagggtatcatctgcaactacaccatcttttaccaagctgaaggtggaaaaggattctccaagacagtcaattccagcatcttgcagtacggcctggagtccctgaaacgaaagacctcttacattgttcaggtcatggccagcaccagtgctgggggaaccaacgggaccagcataaatttcaagacattgtcattcagtgtctttgagattatcctcataacttctctgattggtggaggccttcttattctcattatcctgacagtggcatatggtctcaaaaaacccaacaaattgactcatctgtgttggcccaccgttcccaaccctgctgaaagtagtatagccacatggcatggagatgatttcaaggataagctaaacctgaaggagtctgatgactctgtgaacacagaagacaggatcttaaaaccatgttccacccccagtgacaagttggtgattgacaagttggtggtgaactttgggaatgttctgcaagaaattttcacagatgaagccagaacgggtcaggaaaacaatttaggaggggaaaagaatgggtatgtgacctgccccttcaggcctgattgtcccctggggaaaagttttgaggagctcccagtttcacctgagattccgcccagaaaatcccaatacctacgttcgaggatgccagaggggacccgcccagaagccaaagagcagcttctcttttctggtcaaagtttagtaccagatcatctgtgtgaggaaggagccccaaatccatatttgaaaaattcagtgacagccagggaatttcttgtgtctgaaaaacttccagagcacaccaagggagaagtctaaatgcgaccatagcatgagaccctcggggcctcagtgtggatggcccttgccagagaagatgtcaagactcggcacgcagcgcttgcttggccctgccacatcctgcctaggttaaagtttcccctgccccttgagctgccagttgaacttggtcggcaaagatgcgaccttgtactgggaagaagggatggtgataagcccgagttttgtaaaggaa

SEQ ID NO: 143989 - DNA, 2658 bp, Homo sapiens
  Payload ID: 8465
  Gene Symbol: IL31RA
  Gene Name: interleukin 31 receptor A
  Uniprot ID: Q8NI17
  ENST ID: ENST00000354961
  CDS Start-End: 249-2237
gtttttagttaacaataatgcaatccatttcccagcataagtgggtaagtgccactttgacttgggctgggcttaaaagcacaagaaaagctcgcagacaatcagagtggaaacactcccacatcttagtgtggataaattaaagtccagattgttcttcctgtcctgacttgtgctgtgggaggtggagttgcctttgatgcaaatcctttgagccagcagaacatctgtggaacatcccctgatacatgaagctctctccccagccttcatgtgttaacctggggatgatgtggacctgggcactgtggatgctcccctcactctgcaaattcagcctggcagctctgccagctaagcctgagaacatttcctgtgtctactactataggaaaaatttaacctgcacttggagtccaggaaaggaaaccagttatacccagtacacagttaagagaacttacgcttttggagaaaaacatgataattgtacaaccaatagttctacaagtgaaaatcgtgcttcgtgctcttttttccttccaagaataacgatcccagataattataccattgaggtggaagctgaaaatggagatggtgtaattaaatctcatatgacatactggagattagagaacatagcgaaaactgaaccacctaagattttccgtgtgaaaccagttttgggcatcaaacgaatgattcaaattgaatggataaagcctgagttggcgcctgtttcatctgatttaaaatacacacttcgattcaggacagtcaacagtaccagctggatggaagtcaacttcgctaagaaccgtaaggataaaaaccaaacgtacaacctcacggggctgcagccttttacagaatatgtcatagctctgcgatgtgcggtcaaggagtcaaagttctggagtgactggagccaagaaaaaatgggaatgactgaggaagaagctccatgtggcctggaactgtggagagtcctgaaaccagctgaggcggatggaagaaggccagtgcggttgttatggaagaaggcaagaggagccccagtcctagagaaaacacttggctacaacatatggtactatccagaaagcaacactaacctcacagaaacaatgaacactactaaccagcagcttgaactgcatctgggaggcgagagcttttgggtgtctatgatttcttataattctcttgggaagtctccagtggccaccctgaggattccagctattcaagaaaaatcatttcagtgcattgaggtcatgcaggcctgcgttgctgaggaccagctagtggtgaagtggcaaagctctgctctagacgtgaacacttggatgattgaatggtttccggatgtggactcagagcccaccaccctttcctgggaatctgtgtctcaggccacgaactggacgatccagcaagataaattaaaacctttctggtgctataacatctctgtgtatccaatgttgcatgacaaagttggcgagccatattccatccaggcttatgccaaagaaggcgttccatcagaaggtcctgagaccaaggtggagaacattggcgtgaagacggtcacgatcacatggaaagagattcccaagagtgagagaaagggtatcatctgcaactacaccatcttttaccaagctgaaggtggaaaaggattctccaagacagtcaattccagcatcttgcagtacggcctggagtccctgaaacgaaagacctcttacattgttcaggtcatggccagcaccagtgctgggggaaccaacgggaccagcataaatttcaagacattgtcattcagtgtctttgagattatcctcataacttctctgattggtggaggccttcttattctcattatcctgacagtggcatatggtctcaaaaaacccaacaaattgactcatctgtgttggcccaccgttcccaaccctgctgaaagtagtatagccacatggcatggagatgatttcaaggataagctaaacctgaaggagtctgatgactctgtgaacacagaagacaggatcttaaaaccatgttccacccccagtgacaagttggtgattgacaagttggtggtgaactttgggaatgttctgcaagaaattttcacagatgaagccagaacgggtcaggaaaacaatttaggaggggaaaagaatgggactagaattctgtcttcctgcccaacttcaatataagtgtggactaaaatgcgagaaaggtgtcctgtggtctatgcaaattagaaaggacatgcagagttttccaactaggaagactgaatctgtggccccaagagaaccatctctgaagactgggtatgtggtcttttccacacatggaccacctacggatgcaatctgtaatgcatgtgcatgagaagtctgttattaagtagagtgtgaaaacatggttatggtaataggaacagcttttaaaatgcttttgtatttgggcctttcatacaaaaaagccataataccattttcatgtaatgctatacttctatactattttcatgtaatactatacttctatactattttcatgtaatactatacttctatactattttcatgtaatactatacttctatattaaagttttacccactcagcc

SEQ ID NO: 143990 - DNA, 2529 bp, Homo sapiens
  Payload ID: 8465
  Gene Symbol: IL31RA
  Gene Name: interleukin 31 receptor A
  Uniprot ID: Q8NI17
  ENST ID: ENST00000359040
  CDS Start-End: 66-2111
tgtgtgtgcagtatgaaaattgagacaggaaggcagagtgtcagcttgttccacctcagctgggaatgtgcatcaggcaactcaagtttttcaccacggcatgtgtctgtgaatgtccgcaaaacattctctctccccagccttcatgtgttaacctggggatgatgtggacctgggcactgtggatgctcccctcactctgcaaattcagcctggcagctctgccagctaagcctgagaacatttcctgtgtctactactataggaaaaatttaacctgcacttggagtccaggaaaggaaaccagttatacccagtacacagttaagagaacttacgcttttggagaaaaacatgataattgtacaaccaatagttctacaagtgaaaatcgtgcttcgtgctcttttttccttccaagaataacgatcccagataattataccattgaggtggaagctgaaaatggagatggtgtaattaaatctcatatgacatactggagattagagaacatagcgaaaactgaaccacctaagattttccgtgtgaaaccagttttgggcatcaaacgaatgattcaaattgaatggataaagcctgagttggcgcctgtttcatctgatttaaaatacacacttcgattcaggacagtcaacagtaccagctggatggaagtcaacttcgctaagaaccgtaaggataaaaaccaaacgtacaacctcacggggctgcagccttttacagaatatgtcatagctctgcgatgtgcggtcaaggagtcaaagttctggagtgactggagccaagaaaaaatgggaatgactgaggaagaagctccatgtggcctggaactgtggagagtcctgaaaccagctgaggcggatggaagaaggccagtgcggttgttatggaagaaggcaagaggagccccagtcctagagaaaacacttggctacaacatatggtactatccagaaagcaacactaacctcacagaaacaatgaacactactaaccagcagcttgaactgcatctgggaggcgagagcttttgggtgtctatgatttcttataattctcttgggaagtctccagtggccaccctgaggattccagctattcaagaaaaatcatttcagtgcattgaggtcatgcaggcctgcgttgctgaggaccagctagtggtgaagtggcaaagctctgctctagacgtgaacacttggatgattgaatggtttccggatgtggactcagagcccaccaccctttcctgggaatctgtgtctcaggccacgaactggacgatccagcaagataaattaaaacctttctggtgctataacatctctgtgtatccaatgttgcatgacaaagttggcgagccatattccatccaggcttatgccaaagaaggcgttccatcagaaggtcctgagaccaaggtggagaacattggcgtgaagacggtcacgatcacatggaaagagattcccaagagtgagagaaagggtatcatctgcaactacaccatcttttaccaagctgaaggtggaaaaggattctccaagacagtcaattccagcatcttgcagtacggcctggagtccctgaaacgaaagacctcttacattgttcaggtcatggccagcaccagtgctgggggaaccaacgggaccagcataaatttcaagacattgtcattcagtgtctttgagattatcctcataacttctctgattggtggaggccttcttattctcattatcctgacagtggcatatggtctcaaaaaacccaacaaattgactcatctgtgttggcccaccgttcccaaccctgctgaaagtagtatagccacatggcatggagatgatttcaaggataagctaaacctgaaggagtctgatgactctgtgaacacagaagacaggatcttaaaaccatgttccacccccagtgacaagttggtgattgacaagttggtggtgaactttgggaatgttctgcaagaaattttcacagatgaagccagaacgggtcaggaaaacaatttaggaggggaaaagaatgggactagaattctgtcttcctgcccaacttcaatataagtgtggactaaaatgcgagaaaggtgtcctgtggtctatgcaaattagaaaggacatgcagagttttccaactaggaagactgaatctgtggccccaagagaaccatctctgaagactgggtatgtggtcttttccacacatggaccacctacggatgcaatctgtaatgcatgtgcatgagaagtctgttattaagtagagtgtgaaaacatggttatggtaataggaacagcttttaaaatgcttttgtatttgggcctttcatacaaaaaagccataataccattttcatgtaatgctatacttctatactattttcatgtaatactatacttctatactattttcatgtaatactatacttctatactattttcatgtaatactatacttctatattaaagttttacccactca

SEQ ID NO: 143991 - DNA, 2903 bp, Homo sapiens
  Payload ID: 8465
  Gene Symbol: IL31RA
  Gene Name: interleukin 31 receptor A
  Uniprot ID: Q8NI17
  ENST ID: ENST00000396834
  CDS Start-End: 497-2485
tgaaaagacatgtgtgtgcagtatgaaaattgagacaggaaggcagagtgtcagcttgttccacctcagctgggaatgtgcatcaggcaactcaagtttttcaccacggcatgtgtctgtgaatgtccgcaaaacattagtttcactcttgtcgccaggttggagtacaatggcacgatcttggctcactgcaacctctgcctcccgggttcaagcgattctcctgcctcagcctcccgagtagctgggattacagttaacaataatgcaatccatttcccagcataagtgggtaagtgccactttgacttgggctgggcttaaaagcacaagaaaagctcgcagacaatcagagtggaaacactcccacatcttagtgtggataaattaaagtccagattgttcttcctgtcctgacttgtgctgtgggaggtggagttgcctttgatgcaaatcctttgagccagcagaacatctgtggaacatcccctgatacatgaagctctctccccagccttcatgtgttaacctggggatgatgtggacctgggcactgtggatgctcccctcactctgcaaattcagcctggcagctctgccagctaagcctgagaacatttcctgtgtctactactataggaaaaatttaacctgcacttggagtccaggaaaggaaaccagttatacccagtacacagttaagagaacttacgcttttggagaaaaacatgataattgtacaaccaatagttctacaagtgaaaatcgtgcttcgtgctcttttttccttccaagaataacgatcccagataattataccattgaggtggaagctgaaaatggagatggtgtaattaaatctcatatgacatactggagattagagaacatagcgaaaactgaaccacctaagattttccgtgtgaaaccagttttgggcatcaaacgaatgattcaaattgaatggataaagcctgagttggcgcctgtttcatctgatttaaaatacacacttcgattcaggacagtcaacagtaccagctggatggaagtcaacttcgctaagaaccgtaaggataaaaaccaaacgtacaacctcacggggctgcagccttttacagaatatgtcatagctctgcgatgtgcggtcaaggagtcaaagttctggagtgactggagccaagaaaaaatgggaatgactgaggaagaagctccatgtggcctggaactgtggagagtcctgaaaccagctgaggcggatggaagaaggccagtgcggttgttatggaagaaggcaagaggagccccagtcctagagaaaacacttggctacaacatatggtactatccagaaagcaacactaacctcacagaaacaatgaacactactaaccagcagcttgaactgcatctgggaggcgagagcttttgggtgtctatgatttcttataattctcttgggaagtctccagtggccaccctgaggattccagctattcaagaaaaatcatttcagtgcattgaggtcatgcaggcctgcgttgctgaggaccagctagtggtgaagtggcaaagctctgctctagacgtgaacacttggatgattgaatggtttccggatgtggactcagagcccaccaccctttcctgggaatctgtgtctcaggccacgaactggacgatccagcaagataaattaaaacctttctggtgctataacatctctgtgtatccaatgttgcatgacaaagttggcgagccatattccatccaggcttatgccaaagaaggcgttccatcagaaggtcctgagaccaaggtggagaacattggcgtgaagacggtcacgatcacatggaaagagattcccaagagtgagagaaagggtatcatctgcaactacaccatcttttaccaagctgaaggtggaaaaggattctccaagacagtcaattccagcatcttgcagtacggcctggagtccctgaaacgaaagacctcttacattgttcaggtcatggccagcaccagtgctgggggaaccaacgggaccagcataaatttcaagacattgtcattcagtgtctttgagattatcctcataacttctctgattggtggaggccttcttattctcattatcctgacagtggcatatggtctcaaaaaacccaacaaattgactcatctgtgttggcccaccgttcccaaccctgctgaaagtagtatagccacatggcatggagatgatttcaaggataagctaaacctgaaggagtctgatgactctgtgaacacagaagacaggatcttaaaaccatgttccacccccagtgacaagttggtgattgacaagttggtggtgaactttgggaatgttctgcaagaaattttcacagatgaagccagaacgggtcaggaaaacaatttaggaggggaaaagaatgggactagaattctgtcttcctgcccaacttcaatataagtgtggactaaaatgcgagaaaggtgtcctgtggtctatgcaaattagaaaggacatgcagagttttccaactaggaagactgaatctgtggccccaagagaaccatctctgaagactgggtatgtggtcttttccacacatggaccacctacggatgcaatctgtaatgcatgtgcatgagaagtctgttattaagtagagtgtgaaaacatggttatggtaataggaacagcttttaaaatgcttttgtatttgggcctttcatacaaaaaagccataataccattttcatgtaatgctatacttctatactattttcatgtaatactatacttctatactattttcatgtaatactatacttctatactattttcatgtaatactatacttctatattaaagttttacccactca

SEQ ID NO: 143992 - DNA, 2426 bp, Homo sapiens
  Payload ID: 8465
  Gene Symbol: IL31RA
  Gene Name: interleukin 31 receptor A
  Uniprot ID: Q8NI17
  ENST ID: ENST00000396836
  CDS Start-End: 193-1941
caccagacagcactccagcactctgcttggggggcattcgaaacagcaaaatcactcataaaaggcaaaaaattgcaaaaaaaaatagtaataaccagcatggcactaaatagaccatgaaaagacatgtgtgtgcagtatgaaaattgagacaggaaggcagagtgtcagcttgttccacctcagctgggaatgtgcatcaggcaactcaagtttttcaccacggcatgtgtctgtgaatgtccgcaaaacattctctctccccagccttcatgtgttaacctggggatgatgtggacctgggcactgtggatgctcccctcactctgcaaattcagcctggcagctctgccagctaagcctgagaacatttcctgtgtctactactataggaaaaatttaacctgcacttggagtccaggaaaggaaaccagttatacccagtacacagttaagagaacttacgcttttggagaaaaacatgataattgtacaaccaatagttctacaagtgaaaatcgtgcttcgtgctcttttttccttccaagaataacgatcccagataattataccattgaggtggaagctgaaaatggagatggtgtaattaaatctcatatgacatactggagattagagaacatagcgaaaactgaaccacctaagattttccgtgtgaaaccagttttgggcatcaaacgaatgattcaaattgaatggataaagcctgagttggcgcctgtttcatctgatttaaaatacacacttcgattcaggacagtcaacagtaccagctggatggaagtcaacttcgctaagaaccgtaaggataaaaaccaaacgtacaacctcacggggctgcagccttttacagaatatgtcatagctctgcgatgtgcggtcaaggagtcaaagttctggagtgactggagccaagaaaaaatgggaatgactgaggaagaagctccatgtggcctggaactgtggagagtcctgaaaccagctgaggcggatggaagaaggccagtgcggttgttatggaagaaggcaagaggagccccagtcctagagaaaacacttggctacaacatatggtactatccagaaagcaacactaacctcacagaaacaatgaacactactaaccagcagcttgaactgcatctgggaggcgagagcttttgggtgtctatgatttcttataattctcttgggaagtctccagtggccaccctgaggattccagctattcaagaaaaatcatttcagtgcattgaggtcatgcaggcctgcgttgctgaggaccagctagtggtgaagtggcaaagctctgctctagacgtgaacacttggatgattgaatggtttccggatgtggactcagagcccaccaccctttcctgggaatctgtgtctcaggccacgaactggacgatccagcaagataaattaaaacctttctggtgctataacatctctgtgtatccaatgttgcatgacaaagttggcgagccatattccatccaggcttatgccaaagaaggcgttccatcagaaggtcctgagaccaaggtggagaacattggcgtgaagacggtcacgatcacatggaaagagattcccaagagtgagagaaagggtatcatctgcaactacaccatcttttaccaagctgaaggtggaaaaggattctgtaagcacgcccatagcgaagtggaaaaaaaccccaagccccagatagatgctatggatagacctgttgtaggcatggctcccccatctcattgtgacttgcaacctggcatgaatcacttagcttctttaaatctctctgaaaatggggccaagagcacccaccttttggggttttgggggttaaatgagagtgaagtgacagtacctgagaggagagtcctgaggaaatggaaggagttgttataatttgtcctggttaggccctgaattgacctcccgggagctccccgaccatcattcccaggaatggcgtgcctggcttaaagagtgaggaggaacagaccctgtcaccatgacttctactgcccctgccaaatcatgcttttgtttttcagtccaccttatctcctgacatcttaaatactgggcaaggcttggattcttgcttaggctaaataattttttcttatggtaaaatacacgtaaaatatttttccagtttaaacatttgaaagtgtacaatttagtggcattagaagcattcacaatattgtgcaaccatcaccactatttccagaactcttctatttctgcccaaatagaagccctatacccattcattagtcactccccattcctctcctcccacagcccctggcaactaccaaactgctttgtgtctctatggattgcctattttggatatttcatatacatagaatcataaaata

SEQ ID NO: 143993 - DNA, 2577 bp, Homo sapiens
  Payload ID: 8465
  Gene Symbol: IL31RA
  Gene Name: interleukin 31 receptor A
  Uniprot ID: Q8NI17
  ENST ID: ENST00000447346
  CDS Start-End: 66-2360
tgtgtgtgcagtatgaaaattgagacaggaaggcagagtgtcagcttgttccacctcagctgggaatgtgcatcaggcaactcaagtttttcaccacggcatgtgtctgtgaatgtccgcaaaacattctctctccccagccttcatgtgttaacctggggatgatgtggacctgggcactgtggatgctcccctcactctgcaaattcagcctggcagctctgccagctaagcctgagaacatttcctgtgtctactactataggaaaaatttaacctgcacttggagtccaggaaaggaaaccagttatacccagtacacagttaagagaacttacgcttttggagaaaaacatgataattgtacaaccaatagttctacaagtgaaaatcgtgcttcgtgctcttttttccttccaagaataacgatcccagataattataccattgaggtggaagctgaaaatggagatggtgtaattaaatctcatatgacatactggagattagagaacatagcgaaaactgaaccacctaagattttccgtgtgaaaccagttttgggcatcaaacgaatgattcaaattgaatggataaagcctgagttggcgcctgtttcatctgatttaaaatacacacttcgattcaggacagtcaacagtaccagctggatggaagtcaacttcgctaagaaccgtaaggataaaaaccaaacgtacaacctcacggggctgcagccttttacagaatatgtcatagctctgcgatgtgcggtcaaggagtcaaagttctggagtgactggagccaagaaaaaatgggaatgactgaggaagaagctccatgtggcctggaactgtggagagtcctgaaaccagctgaggcggatggaagaaggccagtgcggttgttatggaagaaggcaagaggagccccagtcctagagaaaacacttggctacaacatatggtactatccagaaagcaacactaacctcacagaaacaatgaacactactaaccagcagcttgaactgcatctgggaggcgagagcttttgggtgtctatgatttcttataattctcttgggaagtctccagtggccaccctgaggattccagctattcaagaaaaatcatttcagtgcattgaggtcatgcaggcctgcgttgctgaggaccagctagtggtgaagtggcaaagctctgctctagacgtgaacacttggatgattgaatggtttccggatgtggactcagagcccaccaccctttcctgggaatctgtgtctcaggccacgaactggacgatccagcaagataaattaaaacctttctggtgctataacatctctgtgtatccaatgttgcatgacaaagttggcgagccatattccatccaggcttatgccaaagaaggcgttccatcagaaggtcctgagaccaaggtggagaacattggcgtgaagacggtcacgatcacatggaaagagattcccaagagtgagagaaagggtatcatctgcaactacaccatcttttaccaagctgaaggtggaaaaggattctccaagacagtcaattccagcatcttgcagtacggcctggagtccctgaaacgaaagacctcttacattgttcaggtcatggccagcaccagtgctgggggaaccaacgggaccagcataaatttcaagacattgtcattcagtgtctttgagattatcctcataacttctctgattggtggaggccttcttattctcattatcctgacagtggcatatggtctcaaaaaacccaacaaattgactcatctgtgttggcccaccgttcccaaccctgctgaaagtagtatagccacatggcatggagatgatttcaaggataagctaaacctgaaggagtctgatgactctgtgaacacagaagacaggatcttaaaaccatgttccacccccagtgacaagttggtgattgacaagttggtggtgaactttgggaatgttctgcaagaaattttcacagatgaagccagaacgggtcaggaaaacaatttaggaggggaaaagaatgggtatgtgacctgccccttcaggcctgattgtcccctggggaaaagttttgaggagctcccagtttcacctgagattccgcccagaaaatcccaatacctacgttcgaggatgccagaggggacccgcccagaagccaaagagcagcttctcttttctggtcaaagtttagtaccagatcatctgtgtgaggaaggagccccaaatccatatttgaaaaattcagtgacagccagggaatttcttgtgtctgaaaaacttccagagcacaccaagggagaagtctaaatgcgaccatagcatgagaccctcggggcctcagtgtggatggcccttgccagagaagatgtcaagactcggcacgcagcgcttgcttggccctgccacatcctgcctaggttaaagtttcccctgccccttgagctgccagttgaacttggtcggcaaagatgcgaccttgtactgggaagaagggatggtgataagcccgagttttgtaaaggaa

SEQ ID NO: 143994 - DNA, 2414 bp, Homo sapiens
  Payload ID: 8465
  Gene Symbol: IL31RA
  Gene Name: interleukin 31 receptor A
  Uniprot ID: Q8NI17
  ENST ID: ENST00000490985
  CDS Start-End: 546-2414
cagcagaacatctgtggaacatcccctgatacatgaagctctctccccagccttcatgtgttaacctggggatgatgtggacctgggcactgtggatgctcccctcactctgcaaattcagcctggcagttcctaacaggccatggacccgtaccttgcccagcggttgaggaatcctgctagactacagcctggcaacctcccccggacttgctgtacctggtgaaataggctaccagccagatgaccttggtgcatgggacccatccgcatctctgccagctaagcctgagaacatttcctgtgtctactactataggaaaaatttaacctgcacttggagtccaggaaaggaaaccagttatacccagtacacagttaagagaacttacgcttttggagaaaaacatgataattgtacaaccaatagttctacaagtgaaaatcgtgcttcgtgctcttttttccttccaagaataacgatcccagataattataccattgaggtggaagctgaaaatggagatggtgtaattaaatctcatatgacatactggagattagagaacatagcgaaaactgaaccacctaagattttccgtgtgaaaccagttttgggcatcaaacgaatgattcaaattgaatggataaagcctgagttggcgcctgtttcatctgatttaaaatacacacttcgattcaggacagtcaacagtaccagctggatggaagtcaacttcgctaagaaccgtaaggataaaaaccaaacgtacaacctcacggggctgcagccttttacagaatatgtcatagctctgcgatgtgcggtcaaggagtcaaagttctggagtgactggagccaagaaaaaatgggaatgactgaggaagaagctccatgtggcctggaactgtggagagtcctgaaaccagctgaggcggatggaagaaggccagtgcggttgttatggaagaaggcaagaggagccccagtcctagagaaaacacttggctacaacatatggtactatccagaaagcaacactaacctcacagaaacaatgaacactactaaccagcagcttgaactgcatctgggaggcgagagcttttgggtgtctatgatttcttataattctcttgggaagtctccagtggccaccctgaggattccagctattcaagaaaaatcatttcagtgcattgaggtcatgcaggcctgcgttgctgaggaccagctagtggtgaagtggcaaagctctgctctagacgtgaacacttggatgattgaatggtttccggatgtggactcagagcccaccaccctttcctgggaatctgtgtctcaggccacgaactggacgatccagcaagataaattaaaacctttctggtgctataacatctctgtgtatccaatgttgcatgacaaagttggcgagccatattccatccaggcttatgccaaagaaggcgttccatcagaaggtcctgagaccaaggtggagaacattggcgtgaagacggtcacgatcacatggaaagagattcccaagagtgagagaaagggtatcatctgcaactacaccatcttttaccaagctgaaggtggaaaaggattctccaagacagtcaattccagcatcttgcagtacggcctggagtccctgaaacgaaagacctcttacattgttcaggtcatggccagcaccagtgctgggggaaccaacgggaccagcataaatttcaagacattgtcattcagtgtctttgagattatcctcataacttctctgattggtggaggccttcttattctcattatcctgacagtggcatatggtctcaaaaaacccaacaaattgactcatctgtgttggcccaccgttcccaaccctgctgaaagtagtatagccacatggcatggagatgatttcaaggataagctaaacctgaaggagtctgatgactctgtgaacacagaagacaggatcttaaaaccatgttccacccccagtgacaagttggtgattgacaagttggtggtgaactttgggaatgttctgcaagaaattttcacagatgaagccagaacgggtcaggaaaacaatttaggaggggaaaagaatgggtatgtgacctgccccttcaggcctgattgtcccctggggaaaagttttgaggagctcccagtttcacctgagattccgcccagaaaatcccaatacctacgttcgaggatgccagaggggacccgcccagaagccaaagagcagcttctcttttctggtcaaagtttagtaccagatcatctgtgtgaggaaggagccccaaatccatatttgaaaaattcagtgacagccagggaatttcttgtgtctgaaaaacttccagagcacaccaagggagaagtctaa

SEQ ID NO: 143995 - DNA, 1171 bp, Homo sapiens
  Payload ID: 8465
  Gene Symbol: IL31RA
  Gene Name: interleukin 31 receptor A
  ENST ID: ENST00000611895
  CDS Start-End: 34-1008
ctctctccccagccttcatgtgttaacctggggatgatgtggacctgggcactgtggatgctcccctcactctgcaaattcagcctggcagctctgccagctaagcctgagaacatttcctgtgtctactactataggaaaaatttaacctgcacttggagtccaggaaaggaaaccagttatacccagtacacagttaagagaacttacgcttttggagaaaaacatgataattgtacaaccaatagttctacaagtgaaaatcgtgcttcgtgctcttttttccttccaagaataacgatcccagataattataccattgaggtggaagctgaaaatggagatggtgtaattaaatctcatatgacatactggagattagagaacatagcgaaaactgaaccacctaagattttccgtgtgaaaccagttttgggcatcaaacgaatgattcaaattgaatggataaagcctgagttggcgcctgtttcatctgatttaaaatacacacttcgattcaggacagtcaacagtaccagctggatggaagtcaacttcgctaagaaccgtaaggataaaaaccaaacgtacaacctcacggggctgcagccttttacagaatatgtcatagctctgcgatgtgcggtcaaggagtcaaagttctggagtgactggagccaagaaaaaatgggaatgactgaggaagaagctccatgtggcctggaactgtggagagtcctgaaaccagctgaggcggatggaagaaggccagtgcggttgttatggaagaaggcaagaggagccccagtcctagagaaaacacttggctacaacatatggtactatccagaaagcaacactaacctcacagaaacaatgaacactactaaccagcagcttgaactgcatctgggaggcgagagcttttgggtgtctatgatttcttataattctcttgggaagtctccagtggccaccctgaggattccagctattcaagaaaaatagaaactttacagatgctagtcccagacataaaagaaaataatgttctggatgtgcacgatggctcacgcctgtaatcccagcactttgaggccaagacgggtggatcgctgagttcaggagttcaagacaagtccaggcaacatagtgaaaccttgtttctaca

SEQ ID NO: 143996 - DNA, 1056 bp, Homo sapiens
  Payload ID: 8466
  Gene Symbol: IL32
  Gene Name: interleukin 32
  Uniprot ID: P24001
  ENST ID: ENST00000008180
  CDS Start-End: 86-592
gtgccaggaagactgcgtgcagaaggtgactgtctcagtggagctgggtcatctcaggccttggctccttgaacttttggccgccatgtgcttcccgaaggtcctctctgatgacatgaagaagctgaaggcccgaatggtgatgtcgagcctggcagagctggaggacgacttcaaagagggctacctggagacagtggcggcttattatgaggagcagcacccagagctcactcctctacttgaaaaagaaagagatggattacggtgccgaggcaacagatcccctgtcccggatgttgaggatcccgcaaccgaggagcctggggagagcttttgtgacaaggtcatgagatggttccaggccatgctgcagcggctgcagacctggtggcacggggttctggcctgggtgaaggagaaggtggtggccctggtccatgcagtgcaggccctctggaaacagttccagagtttctgctgctctctgtcagagctcttcatgtcctctttccagtcctacggagccccacggggggacaaggaggagctgacaccccagaagtgctctgaaccccaatcctcaaaatgaagatactgacaccacctttgccctccccgtcaccgcgcacccaccctgacccctccctcagctgtcctgtgccccgccctctcccgcacactcagtccccctgcctggcgttcctgccgcagctctgacctggtgctgtcgccctggcatcttaataaaacctgcttatacttccctggcaggggagataccatgatcgcggaggtgggtttcccagggcaaggctgatctgttgccgtattagtccgttttcacacagctataaagaatgcctgagactgggtgatgtataaagaaaagaagtttaactgactcacagttccacatggctggggaagcctgaggaagcttacaatcatgggggaaggcggaagagaagcaaggcacgtcctacatggcagcaggagaagcagggtggggggaactaccaaacacttttgtccgcgtgtttgtgtgtttttttt

SEQ ID NO: 143997 - DNA, 1105 bp, Homo sapiens
  Payload ID: 8466
  Gene Symbol: IL32
  Gene Name: interleukin 32
  Uniprot ID: P24001
  ENST ID: ENST00000325568
  CDS Start-End: 227-793
gtactcagggagtttccccagccagctgtcccgagtctggactttccctctgcccctccccactctcaggctggtggggtggggaaagcagcccattcctgggctcagagactcccaccccagctcagagggagcaggggcccagccagggacggaccctcattcctcccagggaccccagacctctgtctctctcgggccttggctccttgaacttttggccgccatgtgcttcccgaaggtcctctctgatgacatgaagaagctgaaggcccgaatgcaccaggccatagaaagattttatgataaaatgcaaaatgcagaatcaggacgtggacaggtgatgtcgagcctggcagagctggaggacgacttcaaagagggctacctggagacagtggcggcttattatgaggagcagcacccagagctcactcctctacttgaaaaagaaagagatggattacggtgccgaggcaacagatcccctgtcccggatgttgaggatcccgcaaccgaggagcctggggagagcttttgtgacaaggtcatgagatggttccaggccatgctgcagcggctgcagacctggtggcacggggttctggcctgggtgaaggagaaggtggtggccctggtccatgcagtgcaggccctctggaaacagttccagagtttctgctgctctctgtcagagctcttcatgtcctctttccagtcctacggagccccacggggggacaaggaggagctgacaccccagaagtgctctgaaccccaatcctcaaaatgaagatactgacaccacctttgccctccccgtcaccgcgcacccaccctgacccctccctcagctgtcctgtgccccgccctctcccgcacactcagtccccctgcctggcgttcctgccgcagctctgacctggtgctgtcgccctggcatcttaataaaacctgcttatacttccctggcaggggagataccatgatcgcggaggtgggtttcccagggcaaggctgatctgttgccgtattagtccgttttcacacagctataaagaatgcctgagactgggtgatgtataaagaaaagaagtttaactga

SEQ ID NO: 143998 - DNA, 880 bp, Homo sapiens
  Payload ID: 8466
  Gene Symbol: IL32
  Gene Name: interleukin 32
  Uniprot ID: P24001
  ENST ID: ENST00000382213
  CDS Start-End: 29-568
gccttggctccttgaacttttggccgccatgtgcttcccgaaggtcctctctgatgacatgaagaagctgaaggcccgaatgcaccaggccatagaaagattttatgataaaatgcaaaatgcagaatcaggacgtggacaggacgacttcaaagagggctacctggagacagtggcggcttattatgaggagcagcacccagagctcactcctctacttgaaaaagaaagagatggattacggtgccgaggcaacagatcccctgtcccggatgttgaggatcccgcaaccgaggagcctggggagagcttttgtgacaaggtcatgagatggttccaggccatgctgcagcggctgcagacctggtggcacggggttctggcctgggtgaaggagaaggtggtggccctggtccatgcagtgcaggccctctggaaacagttccagagtttctgctgctctctgtcagagctcttcatgtcctctttccagtcctacggagccccacggggggacaaggaggagctgacaccccagaagtgctctgaaccccaatcctcaaaatgaagatactgacaccacctttgccctccccgtcaccgcgcacccaccctgacccctccctcagctgtcctgtgccccgccctctcccgcacactcagtccccctgcctggcgttcctgccgcagctctgacctggtgctgtcgccctggcatcttaataaaacctgcttatacttccctggcaggggagataccatgatcgcggaggtgggtttcccagggcaaggctgatctgttgccgtattagtccgttttcacacagctataaagaatgcctgagactgggtgatgtataaagaaaagaagtttaactga

SEQ ID NO: 143999 - DNA, 789 bp, Homo sapiens
  Payload ID: 8466
  Gene Symbol: IL32
  Gene Name: interleukin 32
  Uniprot ID: P24001
  ENST ID: ENST00000396887
  CDS Start-End: 202-597
ctgtcccgagtctggactttccctctgcccctccccactctcaggctggtggggtggggaaagcagcccattcctgggctcagagactcccaccccagctcagagggagcaggggcccagccagggacggaccctcattcctcccagggaccccagacctctgtctctctcgggccttggctccttgaacttttggccgccatgtgcttcccgaaggtcctctctgatgacatgaagaagctgaaggcccgaatgcaccaggccatagaaagattttatgataaaatgcaaaatgcagaatcaggacgtggacaggtgatgtcgagcctggcagagctggaggacgacttcaaagagggctacctggagacagtggcggcttattatgaggagcagcacccagagctcactcctctacttgaaaaagaaagagatggattacggtgccgaggcaacagatcccctgtcccggatgttgaggatcccgcaaccgaggagcctggggagagcttttgtgacaagtcctacggagccccacggggggacaaggaggagctgacaccccagaagtgctctgaaccccaatcctcaaaatgaagatactgacaccacctttgccctccccgtcaccgcgcacccaccctgacccctccctcagctgtcctgtgccccgccctctcccgcacactcagtccccctgcctggcgttcctgccgcagctctgacctggtgctgtcgccctggcatcttaataaaacctgcttatacttccctggcaggggagatacc

SEQ ID NO: 144000 - DNA, 1067 bp, Homo sapiens
  Payload ID: 8466
  Gene Symbol: IL32
  Gene Name: interleukin 32
  Uniprot ID: P24001
  ENST ID: ENST00000396890
  CDS Start-End: 78-782
aagactgcgtgcagaaggtgactgtctcagtggagctgggtcatctcaggccttggctccttgaacttttggccgccatgtgcttcccgaaggtcctctctgatgacatgaagaagctgaaggcccgaatggtaatgctcctccctacttctgctcaggggttgggggcctgggtctcagcgtgtgacactgaggacactgtgggacacctgggaccctggagggacaaggatccggccctttggtgccaactctgcctctcttcacagcaccaggccatagaaagattttatgataaaatgcaaaatgcagaatcaggacgtggacaggtgatgtcgagcctggcagagctggaggacgacttcaaagagggctacctggagacagtggcggcttattatgaggagcagcacccagagctcactcctctacttgaaaaagaaagagatggattacggtgccgaggcaacagatcccctgtcccggatgttgaggatcccgcaaccgaggagcctggggagagcttttgtgacaaggtcatgagatggttccaggccatgctgcagcggctgcagacctggtggcacggggttctggcctgggtgaaggagaaggtggtggccctggtccatgcagtgcaggccctctggaaacagttccagagtttctgctgctctctgtcagagctcttcatgtcctctttccagtcctacggagccccacggggggacaaggaggagctgacaccccagaagtgctctgaaccccaatcctcaaaatgaagatactgacaccacctttgccctccccgtcaccgcgcacccaccctgacccctccctcagctgtcctgtgccccgccctctcccgcacactcagtccccctgcctggcgttcctgccgcagctctgacctggtgctgtcgccctggcatcttaataaaacctgcttatacttccctggcaggggagataccatgatcgcggaggtgggtttcccagggcaaggctgatctgttgccgtattagtccgttttcacacagctataaagaatgcctgagactgggtg

SEQ ID NO: 144001 - DNA, 920 bp, Homo sapiens
  Payload ID: 8466
  Gene Symbol: IL32
  Gene Name: interleukin 32
  Uniprot ID: P24001
  ENST ID: ENST00000440815
  CDS Start-End: 158-724
ggtggggtggggaaagcagcccattcctgggctcagagactcccaccccagctcagagggagcaggggcccagccagggacggaccctcattcctcccagggaccccagacctctgtctctctcggcaggccttggctccttgaacttttggccgccatgtgcttcccgaaggtcctctctgatgacatgaagaagctgaaggcccgaatgcaccaggccatagaaagattttatgataaaatgcaaaatgcagaatcaggacgtggacaggtgatgtcgagcctggcagagctggaggacgacttcaaagagggctacctggagacagtggcggcttattatgaggagcagcacccagagctcactcctctacttgaaaaagaaagagatggattacggtgccgaggcaacagatcccctgtcccggatgttgaggatcccgcaaccgaggagcctggggagagcttttgtgacaaggtcatgagatggttccaggccatgctgcagcggctgcagacctggtggcacggggttctggcctgggtgaaggagaaggtggtggccctggtccatgcagtgcaggccctctggaaacagttccagagtttctgctgctctctgtcagagctcttcatgtcctctttccagtcctacggagccccacggggggacaaggaggagctgacaccccagaagtgctctgaaccccaatcctcaaaatgaagatactgacaccacctttgccctccccgtcaccgcgcacccaccctgacccctccctcagctgtcctgtgccccgccctctcccgcacactcagtccccctgcctggcgttcctgccgcagctctgacctggtgctgtcgccctggcatcttaataaaacctgcttatacttccctggcaggggagataccatga

SEQ ID NO: 144002 - DNA, 892 bp, Homo sapiens
  Payload ID: 8466
  Gene Symbol: IL32
  Gene Name: interleukin 32
  Uniprot ID: P24001
  ENST ID: ENST00000444393
  CDS Start-End: 130-696
cataaaaccagctgagtatttgtgccaggaagactgcgtgcagaaggtgactgtctcagtggagctgggtcatctcaggtggggagttggggtccccgaaggccttggctccttgaacttttggccgccatgtgcttcccgaaggtcctctctgatgacatgaagaagctgaaggcccgaatgcaccaggccatagaaagattttatgataaaatgcaaaatgcagaatcaggacgtggacaggtgatgtcgagcctggcagagctggaggacgacttcaaagagggctacctggagacagtggcggcttattatgaggagcagcacccagagctcactcctctacttgaaaaagaaagagatggattacggtgccgaggcaacagatcccctgtcccggatgttgaggatcccgcaaccgaggagcctggggagagcttttgtgacaaggtcatgagatggttccaggccatgctgcagcggctgcagacctggtggcacggggttctggcctgggtgaaggagaaggtggtggccctggtccatgcagtgcaggccctctggaaacagttccagagtttctgctgctctctgtcagagctcttcatgtcctctttccagtcctacggagccccacggggggacaaggaggagctgacaccccagaagtgctctgaaccccaatcctcaaaatgaagatactgacaccacctttgccctccccgtcaccgcgcacccaccctgacccctccctcagctgtcctgtgccccgccctctcccgcacactcagtccccctgcctggcgttcctgccgcagctctgacctggtgctgtcgccctggcatcttaataaaacctgcttatacttccctggcaggggagataccatga

SEQ ID NO: 144003 - DNA, 566 bp, Homo sapiens
  Payload ID: 8466
  Gene Symbol: IL32
  Gene Name: interleukin 32
  ENST ID: ENST00000525228
  CDS Start-End: 173-566
agactgcgtgcagaaggtgactgtctcagtggagctgggtcatctcaggtggggagttggggtccccgaaggtgaggaccctctggggaggagggtgcttctctgagacactttcttttcctcacacctgttcctcgccagcaggccttggctccttgaacttttggccgccatgtgcttcccgaaggtcctctctgatgacatgaagaagctgaaggcccgaatggacgacttcaaagagggctacctggagacagtggcggcttattatgaggagcagcacccagagctcactcctctacttgaaaaagaaagagatggattacggtgccgaggcaacagatcccctgtcccggatgttgaggatcccgcaaccgaggagcctggggagagcttttgtgacaaggtcatgagatggttccaggccatgctgcagcggctgcagacctggtggcacggggttctggcctgggtgaaggagaaggtggtggccctggtccatgcagtgcaggccctctggaaacagttccagagtttctgctgctctctgtcagagctcttcatgt

SEQ ID NO: 144004 - DNA, 1112 bp, Homo sapiens
  Payload ID: 8466
  Gene Symbol: IL32
  Gene Name: interleukin 32
  Uniprot ID: P24001
  ENST ID: ENST00000534507
  CDS Start-End: 212-916
ccccagccagctgtcccgagtctggactttccctctgcccctccccactctcaggctggtggggtggggaaagcagcccattcctgggctcagagactcccaccccagctcagagggagcaggggcccagccagggacggaccctcattcctcccagggaccccagacctctgtctctctcgggccttggctccttgaacttttggccgccatgtgcttcccgaaggtcctctctgatgacatgaagaagctgaaggcccgaatggtaatgctcctccctacttctgctcaggggttgggggcctgggtctcagcgtgtgacactgaggacactgtgggacacctgggaccctggagggacaaggatccggccctttggtgccaactctgcctctcttcacagcaccaggccatagaaagattttatgataaaatgcaaaatgcagaatcaggacgtggacaggtgatgtcgagcctggcagagctggaggacgacttcaaagagggctacctggagacagtggcggcttattatgaggagcagcacccagagctcactcctctacttgaaaaagaaagagatggattacggtgccgaggcaacagatcccctgtcccggatgttgaggatcccgcaaccgaggagcctggggagagcttttgtgacaaggtcatgagatggttccaggccatgctgcagcggctgcagacctggtggcacggggttctggcctgggtgaaggagaaggtggtggccctggtccatgcagtgcaggccctctggaaacagttccagagtttctgctgctctctgtcagagctcttcatgtcctctttccagtcctacggagccccacggggggacaaggaggagctgacaccccagaagtgctctgaaccccaatcctcaaaatgaagatactgacaccacctttgccctccccgtcaccgcgcacccaccctgacccctccctcagctgtcctgtgccccgccctctcccgcacactcagtccccctgcctggcgttcctgccgcagctctgacctggtgctgtcgccctggcatcttaataaaacctgcttatacttccctggcaggggagataccatga

SEQ ID NO: 144005 - DNA, 1272 bp, Homo sapiens
  Payload ID: 8466
  Gene Symbol: IL32
  Gene Name: interleukin 32
  Uniprot ID: P24001
  ENST ID: ENST00000525643
  CDS Start-End: 333-899
gcagcccattcctgggctcagagactcccaccccagctcagagggagcaggggcccagccagggacggaccctcattcctcccagggaccccagacctctgtctctctcgggtaagtctccatctctgtctgtctctgtctctgtctctgtctctgtctgtttttcacgcactcagcaaggcctcctgccctgagagaggctccgcccactaccccccactttccccataaaaccagctgagtatttgtgccaggaagactgcgtgcagaaggtgactgtctcagtggagctgggtcatctcaggccttggctccttgaacttttggccgccatgtgcttcccgaaggtcctctctgatgacatgaagaagctgaaggcccgaatgcaccaggccatagaaagattttatgataaaatgcaaaatgcagaatcaggacgtggacaggtgatgtcgagcctggcagagctggaggacgacttcaaagagggctacctggagacagtggcggcttattatgaggagcagcacccagagctcactcctctacttgaaaaagaaagagatggattacggtgccgaggcaacagatcccctgtcccggatgttgaggatcccgcaaccgaggagcctggggagagcttttgtgacaaggtcatgagatggttccaggccatgctgcagcggctgcagacctggtggcacggggttctggcctgggtgaaggagaaggtggtggccctggtccatgcagtgcaggccctctggaaacagttccagagtttctgctgctctctgtcagagctcttcatgtcctctttccagtcctacggagccccacggggggacaaggaggagctgacaccccagaagtgctctgaaccccaatcctcaaaatgaagatactgacaccacctttgccctccccgtcaccgcgcacccaccctgacccctccctcagctgtcctgtgccccgccctctcccgcacactcagtccccctgcctggcgttcctgccgcagctctgacctggtgctgtcgccctggcatcttaataaaacctgcttatacttccctggcaggggagataccatgatcgcggaggtgggtttcccagggcaaggctgatctgttgccgtattagtccgttttcacacagctataaagaatgcctgagactgggtgatgtataaagaaaagaagtttaactgactcacagttccacatggctggggaagcctgaggaagcttacaatcatgggggaaggcggaa

SEQ ID NO: 144006 - DNA, 950 bp, Homo sapiens
  Payload ID: 8466
  Gene Symbol: IL32
  Gene Name: interleukin 32
  Uniprot ID: P24001
  ENST ID: ENST00000528163
  CDS Start-End: 187-753
gagactcccaccccagctcagagggagcaggggcccagccagggacggaccctcattcctcccagggaccccagacctctgtctctctcggctgagtatttgtgccaggaagactgcgtgcagaaggtgactgtctcagtggagctgggtcatctcaggccttggctccttgaacttttggccgccatgtgcttcccgaaggtcctctctgatgacatgaagaagctgaaggcccgaatgcaccaggccatagaaagattttatgataaaatgcaaaatgcagaatcaggacgtggacaggtgatgtcgagcctggcagagctggaggacgacttcaaagagggctacctggagacagtggcggcttattatgaggagcagcacccagagctcactcctctacttgaaaaagaaagagatggattacggtgccgaggcaacagatcccctgtcccggatgttgaggatcccgcaaccgaggagcctggggagagcttttgtgacaaggtcatgagatggttccaggccatgctgcagcggctgcagacctggtggcacggggttctggcctgggtgaaggagaaggtggtggccctggtccatgcagtgcaggccctctggaaacagttccagagtttctgctgctctctgtcagagctcttcatgtcctctttccagtcctacggagccccacggggggacaaggaggagctgacaccccagaagtgctctgaaccccaatcctcaaaatgaagatactgacaccacctttgccctccccgtcaccgcgcacccaccctgacccctccctcagctgtcctgtgccccgccctctcccgcacactcagtccccctgcctggcgttcctgccgcagctctgacctggtgctgtcgccctggcatcttaataaaacctgcttatacttccctggcaggggagataccatgat

SEQ ID NO: 144007 - DNA, 814 bp, Homo sapiens
  Payload ID: 8466
  Gene Symbol: IL32
  Gene Name: interleukin 32
  Uniprot ID: P24001
  ENST ID: ENST00000533097
  CDS Start-End: 71-637
aaaccagctgagtatttgtgccaggaagactgcgtgcagaaggccttggctccttgaacttttggccgccatgtgcttcccgaaggtcctctctgatgacatgaagaagctgaaggcccgaatgcaccaggccatagaaagattttatgataaaatgcaaaatgcagaatcaggacgtggacaggtgatgtcgagcctggcagagctggaggacgacttcaaagagggctacctggagacagtggcggcttattatgaggagcagcacccagagctcactcctctacttgaaaaagaaagagatggattacggtgccgaggcaacagatcccctgtcccggatgttgaggatcccgcaaccgaggagcctggggagagcttttgtgacaaggtcatgagatggttccaggccatgctgcagcggctgcagacctggtggcacggggttctggcctgggtgaaggagaaggtggtggccctggtccatgcagtgcaggccctctggaaacagttccagagtttctgctgctctctgtcagagctcttcatgtcctctttccagtcctacggagccccacggggggacaaggaggagctgacaccccagaagtgctctgaaccccaatcctcaaaatgaagatactgacaccacctttgccctccccgtcaccgcgcacccaccctgacccctccctcagctgtcctgtgccccgccctctcccgcacactcagtccccctgcctggcgttcctgccgcagctctgacctggtgctgtcgccctggcatcttaataaaacctgcttatacttccct

SEQ ID NO: 144008 - DNA, 746 bp, Homo sapiens
  Payload ID: 8466
  Gene Symbol: IL32
  Gene Name: interleukin 32
  Uniprot ID: P24001
  ENST ID: ENST00000531965
  CDS Start-End: 189-725
ctgtcccgagtctggactttccctctgcccctccccactctcaggctggtggggtggggaaagcagcccattcctgggctcagagactcccaccccagctcagagggagcaggggcccagccagggacggaccctcattcctcccagggaccccagacctctgtctctctcgggtcctctctgatgacatgaagaagctgaaggcccgaatgcaccaggccatagaaagattttatgataaaatgcaaaatgcagaatcaggacgtggacaggtgatgtcgagcctggcagagctggaggacgacttcaaagagggctacctggagacagtggcggcttattatgaggagcagcacccagagctcactcctctacttgaaaaagaaagagatggattacggtgccgaggcaacagatcccctgtcccggatgttgaggatcccgcaaccgaggagcctggggagagcttttgtgacaaggtcatgagatggttccaggccatgctgcagcggctgcagacctggtggcacggggttctggcctgggtgaaggagaaggtggtggccctggtccatgcagtgcaggccctctggaaacagttccagagtttctgctgctctctgtcagagctcttcatgtcctctttccagtcctacggagccccacggggggacaaggaggagctgacaccccagaagtgctctgaaccccaatcctcaaaatgaagatactgacaccacctttgc

SEQ ID NO: 144009 - DNA, 774 bp, Homo sapiens
  Payload ID: 8466
  Gene Symbol: IL32
  Gene Name: interleukin 32
  Uniprot ID: P24001
  ENST ID: ENST00000530890
  CDS Start-End: 75-581
cataaaaccagctgagtatttgtgccaggaagactgcgtgcagaaggccttggctccttgaacttttggccgccatgtgcttcccgaaggtcctctctgatgacatgaagaagctgaaggcccgaatggtgatgtcgagcctggcagagctggaggacgacttcaaagagggctacctggagacagtggcggcttattatgaggagcagcacccagagctcactcctctacttgaaaaagaaagagatggattacggtgccgaggcaacagatcccctgtcccggatgttgaggatcccgcaaccgaggagcctggggagagcttttgtgacaaggtcatgagatggttccaggccatgctgcagcggctgcagacctggtggcacggggttctggcctgggtgaaggagaaggtggtggccctggtccatgcagtgcaggccctctggaaacagttccagagtttctgctgctctctgtcagagctcttcatgtcctctttccagtcctacggagccccacggggggacaaggaggagctgacaccccagaagtgctctgaaccccaatcctcaaaatgaagatactgacaccacctttgccctccccgtcaccgcgcacccaccctgacccctccctcagctgtcctgtgccccgccctctcccgcacactcagtccccctgcctggcgttcctgccgcagctctgacctggtgctgtcgccctggcatcttaataaaacctgcttatacttccctggcaggggagatacca

SEQ ID NO: 144010 - DNA, 997 bp, Homo sapiens
  Payload ID: 8466
  Gene Symbol: IL32
  Gene Name: interleukin 32
  ENST ID: ENST00000525377
  CDS Start-End: 99-764
gactgcgtgcagaaggtgactgtctcagtggagctgggtcatctcaggtggggagttggggtccccgaaggccttggctccttgaacttttggccgccatgtgcttcccgaaggtcctctctgatgacatgaagaagctgaaggcccgaatggtaatgctcctccctacttctgctcaggggttgggggcctgggtctcagcgtgtgacactgaggacactgtgggacacctgggaccctggagggacaaggatccggccctttggtgccaactctgcctctcttcacagcaccaggccatagaaagattttatgataaaatgcaaaatgcagaatcaggacgtggacaggtgatgtcgagcctggcagagctggaggacgacttcaaagagggctacctggagacagtggcggcttattatgaggagcagcacccagagctcactcctctacttgaaaaagaaagagatggattacggtgccgaggcaacagatcccctgtcccggatgttgaggatcccgcaaccgaggagcctggggagagcttttgtgacaaggtcatgagatggttccaggccatgctgcagcggctgcagacctggtggcacggggttctggcctgggtgaaggagaaggtggtggccctggtccatgcagtgcaggccctctggaaacagttccagagtttctgctgctctttgtcagagctcttcatgtcctctttccagtcctacggagccacacggggggcaaggaggagctgacaccccagaagtgctctgaaccccaatcctcaaaatgaagatactgacaccacctttgccctcccagtcaccgcgcacccaccctgacccctccctcagctgtcctgtgccccgccctctcccgcacactcagtccccctgcctggcattcctgccgcagctctgacctggcgctgtcgccctggcatcttaataaaacctgcttatacttccctggcaggggagataccatg

SEQ ID NO: 144011 - DNA, 674 bp, Homo sapiens
  Payload ID: 8466
  Gene Symbol: IL32
  Gene Name: interleukin 32
  Uniprot ID: P24001
  ENST ID: ENST00000530538
  CDS Start-End: 67-633
aaggtgactgtctcagtggagctgggtcatctcagcaggccttggctccttgaacttttggccgccatgtgcttcccgaaggtcctctctgatgacatgaagaagctgaaggcccgaatgcaccaggccatagaaagattttatgataaaatgcaaaatgcagaatcaggacgtggacaggtgatgtcgagcctggcagagctggaggacgacttcaaagagggctacctggagacagtggcggcttattatgaggagcagcacccagagctcactcctctacttgaaaaagaaagagatggattacggtgccgaggcaacagatcccctgtcccggatgttgaggatcccgcaaccgaggagcctggggagagcttttgtgacaaggtcatgagatggttccaggccatgctgcagcggctgcagacctggtggcacggggttctggcctgggtgaaggagaaggtggtggccctggtccatgcagtgcaggccctctggaaacagttccagagtttctgctgctctctgtcagagctcttcatgtcctctttccagtcctacggagccccacggggggacaaggaggagctgacaccccagaagtgctctgaaccccaatcctcaaaatgaagatactgacaccacctttgccctccccgtcaccgcgcacc

SEQ ID NO: 144012 - DNA, 672 bp, Homo sapiens
  Payload ID: 8466
  Gene Symbol: IL32
  Gene Name: interleukin 32
  ENST ID: ENST00000529699
  CDS Start-End: 166-672
actctcaggctggtggggtggggaaagcagcccattcctgggctcagagactcccaccccagctcagagggagcaggggcccagccagggacggaccctcattcctcccagggaccccagacctctgtctctctcgggccttggctccttgaacttttggccgccatgtgcttcccgaaggtcctctctgatgacatgaagaagctgaaggcccgaatgcaccaggccatagaaagattttatgataaaatgcaaaatgcagaatcaggacgtggacaggtgatgtcgagcctggcagagctggaggagctcactcctctacttgaaaaagaaagagatggattacggtgccgaggcaacagatcccctgtcccggatgttgaggatcccgcaaccgaggagcctggggagagcttttgtgacaaggtcatgagatggttccaggccatgctgcagcggctgcagacctggtggcacggggttctggcctgggtgaaggagaaggtggtggccctggtccatgcagtgcaggccctctggaaacagttccagagtttctgctgctctctgtcagagctcttcatgtcctctttccagtcctacggagccccacggggggacaaggaggagctgacaccccagaagtgctctgaaccccaatcctcaaaatga

SEQ ID NO: 144013 - DNA, 772 bp, Homo sapiens
  Payload ID: 8466
  Gene Symbol: IL32
  Gene Name: interleukin 32
  Uniprot ID: P24001
  ENST ID: ENST00000529550
  CDS Start-End: 193-759
ggggaaagcagcccattcctgggctcagagactcccaccccagctcagagggagcaggggcccagccagggacggaccctcattcctcccagggaccccagacctctgtctctctcggactgcgtgcagaaggtgactgtctcagtggagctgggtcatctcaggccttggctccttgaacttttggccgccatgtgcttcccgaaggtcctctctgatgacatgaagaagctgaaggcccgaatgcaccaggccatagaaagattttatgataaaatgcaaaatgcagaatcaggacgtggacaggtgatgtcgagcctggcagagctggaggacgacttcaaagagggctacctggagacagtggcggcttattatgaggagcagcacccagagctcactcctctacttgaaaaagaaagagatggattacggtgccgaggcaacagatcccctgtcccggatgttgaggatcccgcaaccgaggagcctggggagagcttttgtgacaaggtcatgagatggttccaggccatgctgcagcggctgcagacctggtggcacggggttctggcctgggtgaaggagaaggtggtggccctggtccatgcagtgcaggccctctggaaacagttccagagtttctgctgctctctgtcagagctcttcatgtcctctttccagtcctacggagccccacggggggacaaggaggagctgacaccccagaagtgctctgaaccccaatcctcaaaatgaagatactgacacc

SEQ ID NO: 144014 - DNA, 812 bp, Homo sapiens
  Payload ID: 8466
  Gene Symbol: IL32
  Gene Name: interleukin 32
  Uniprot ID: P24001
  ENST ID: ENST00000548652
  CDS Start-End: 77-616
agactgcgtgcagaaggtgactgtctcagtggagctgggtcatctcaggccttggctccttgaacttttggccgccatgtgcttcccgaaggtcctctctgatgacatgaagaagctgaaggcccgaatgcaccaggccatagaaagattttatgataaaatgcaaaatgcagaatcaggacgtggacaggacgacttcaaagagggctacctggagacagtggcggcttattatgaggagcagcacccagagctcactcctctacttgaaaaagaaagagatggattacggtgccgaggcaacagatcccctgtcccggatgttgaggatcccgcaaccgaggagcctggggagagcttttgtgacaaggtcatgagatggttccaggccatgctgcagcggctgcagacctggtggcacggggttctggcctgggtgaaggagaaggtggtggccctggtccatgcagtgcaggccctctggaaacagttccagagtttctgctgctctctgtcagagctcttcatgtcctctttccagtcctacggagccccacggggggacaaggaggagctgacaccccagaagtgctctgaaccccaatcctcaaaatgaagatactgacaccacctttgccctccccgtcaccgcgcacccaccctgacccctccctcagctgtcctgtgccccgccctctcccgcacactcagtccccctgcctggcgttcctgccgcagctctgacctggtgctgtcgccctggcatcttaataaaacctgcttatacttccctggcaggggagataccatga

SEQ ID NO: 144015 - DNA, 623 bp, Homo sapiens
  Payload ID: 8466
  Gene Symbol: IL32
  Gene Name: interleukin 32
  Uniprot ID: P24001
  ENST ID: ENST00000552356
  CDS Start-End: 63-569
ggtcatctcaggtggggagttggggtccccgaaggccttggctccttgaacttttggccgccatgtgcttcccgaaggtcctctctgatgacatgaagaagctgaaggcccgaatggtgatgtcgagcctggcagagctggaggacgacttcaaagagggctacctggagacagtggcggcttattatgaggagcagcacccagagctcactcctctacttgaaaaagaaagagatggattacggtgccgaggcaacagatcccctgtcccggatgttgaggatcccgcaaccgaggagcctggggagagcttttgtgacaaggtcatgagatggttccaggccatgctgcagcggctgcagacctggtggcacggggttctggcctgggtgaaggagaaggtggtggccctggtccatgcagtgcaggccctctggaaacagttccagagtttctgctgctctctgtcagagctcttcatgtcctctttccagtcctacggagccccacggggggacaaggaggagctgacaccccagaagtgctctgaaccccaatcctcaaaatgaagatactgacaccacctttgccctccccgtcaccgcgcacccaccctgacccct

SEQ ID NO: 144016 - DNA, 713 bp, Homo sapiens
  Payload ID: 8466
  Gene Symbol: IL32
  Gene Name: interleukin 32
  ENST ID: ENST00000552936
  CDS Start-End: 55-693
gtctcagtggagctgggtcatctcaggccttggctccttgaacttttggccgccatgtgcttcccgaaggggttgggggcctgggtctcagcgtgtgacactgaggacactgtgggacacctgggaccctggagggacaaggatccggccctttggtgccaactctgcctctcttcacagcaccaggccatagaaagattttatgataaaatgcaaaatgcagaatcaggacgtggacaggtgatgtcgagcctggcagagctggaggacgacttcaaagagggctacctggagacagtggcggcttattatgaggagcagcacccagagctcactcctctacttgaaaaagaaagagatggattacggtgccgaggcaacagatcccctgtcccggatgttgaggatcccgcaaccgaggagcctggggagagcttttgtgacaaggtcatgagatggttccaggccatgctgcagcggctgcagacctggtggcacggggttctggcctgggtgaaggagaaggtggtggccctggtccatgcagtgcaggccctctggaaacagttccagagtttctgctgctctctgtcagagctcttcatgtcctctttccagtcctacggagccccacggggggacaaggaggagctgacaccccagaagtgctctgaaccccaatcctcaaaatgaagatactgacaccacctttg

SEQ ID NO: 144017 - DNA, 733 bp, Homo sapiens
  Payload ID: 8466
  Gene Symbol: IL32
  Gene Name: interleukin 32
  Uniprot ID: P24001
  ENST ID: ENST00000551122
  CDS Start-End: 147-542
gaaagcagcccattcctgggctcagagactcccaccccagctcagagggagcaggggcccagccagggacggaccctcattcctcccagggaccccagacctctgtctctctcggcaggccttggctccttgaacttttggccgccatgtgcttcccgaaggtcctctctgatgacatgaagaagctgaaggcccgaatgcaccaggccatagaaagattttatgataaaatgcaaaatgcagaatcaggacgtggacaggtgatgtcgagcctggcagagctggaggacgacttcaaagagggctacctggagacagtggcggcttattatgaggagcagcacccagagctcactcctctacttgaaaaagaaagagatggattacggtgccgaggcaacagatcccctgtcccggatgttgaggatcccgcaaccgaggagcctggggagagcttttgtgacaagtcctacggagccccacggggggacaaggaggagctgacaccccagaagtgctctgaaccccaatcctcaaaatgaagatactgacaccacctttgccctccccgtcaccgcgcacccaccctgacccctccctcagctgtcctgtgccccgccctctcccgcacactcagtccccctgcctggcgttcctgccgcagctctgacctggtgctgtcgccctggcatcttaataaaacctgcttatacttccctggcaggggagatac

SEQ ID NO: 144018 - DNA, 654 bp, Homo sapiens
  Payload ID: 8466
  Gene Symbol: IL32
  Gene Name: interleukin 32
  Uniprot ID: P24001
  ENST ID: ENST00000549213
  CDS Start-End: 63-458
aggtgactgtctcagtggagctgggtcatctcaggccttggctccttgaacttttggccgccatgtgcttcccgaaggtcctctctgatgacatgaagaagctgaaggcccgaatgcaccaggccatagaaagattttatgataaaatgcaaaatgcagaatcaggacgtggacaggtgatgtcgagcctggcagagctggaggacgacttcaaagagggctacctggagacagtggcggcttattatgaggagcagcacccagagctcactcctctacttgaaaaagaaagagatggattacggtgccgaggcaacagatcccctgtcccggatgttgaggatcccgcaaccgaggagcctggggagagcttttgtgacaagtcctacggagccccacggggggacaaggaggagctgacaccccagaagtgctctgaaccccaatcctcaaaatgaagatactgacaccacctttgccctccccgtcaccgcgcacccaccctgacccctccctcagctgtcctgtgccccgccctctcccgcacactcagtccccctgcctggcgttcctgccgcagctctgacctggtgctgtcgccctggcatcttaataaaacctgcttatacttccctggcaggggagataccatga

SEQ ID NO: 144019 - DNA, 447 bp, Homo sapiens
  Payload ID: 8466
  Gene Symbol: IL32
  Gene Name: interleukin 32
  Uniprot ID: P24001
  ENST ID: ENST00000548246
  CDS Start-End: 1-447
atgtgcttcccgaaggtcctctctgatgacatgaagaagctgaaggcccgaatggtgatgtcgagcctggcagagctggaggagctcactcctctacttgaaaaagaaagagatggattacggtgccgaggcaacagatcccctgtcccggatgttgaggatcccgcaaccgaggagcctggggagagcttttgtgacaaggtcatgagatggttccaggccatgctgcagcggctgcagacctggtggcacggggttctggcctgggtgaaggagaaggtggtggccctggtccatgcagtgcaggccctctggaaacagttccagagtttctgctgctctctgtcagagctcttcatgtcctctttccagtcctacggagccccacggggggacaaggaggagctgacaccccagaagtgctctgaaccccaatcctcaaaatga

SEQ ID NO: 144020 - DNA, 810 bp, Homo sapiens
  Payload ID: 8466
  Gene Symbol: IL32
  Gene Name: interleukin 32
  ENST ID: ENST00000548807
  CDS Start-End: 135-810
ttcctgggctcagagactcccaccccagctcagagggagcaggggcccagccagggacggaccctcattcctcccagggaccccagacctctgtctctctcggcaggccttggctccttgaacttttggccgccatgtgcttcccgaaggtcctctctgatgacatgaagaagctgaaggcccgaatggtaatgctcctccctacttctgctcaggggttgggggcctgggtctcagcgtgtgacactgaggacactgtgggacacctgggaccctggagggacaaggatccggccctttggtgccaactctgcctctcttcacagcaccaggccatagaaagattttatgataaaatgcaaaatgcagaatcaggacgtggacaggtgatgtcgagcctggcagagctggaggacgacttcaaagagggctacctggagacagtggcggcttattatgaggagcagcacccagagctcactcctctacttgaaaaagaaagagatggattacggtgccgaggcaacagatcccctgtcccggatgttgaggatcccgcaaccgaggagcctggggagagcttttgtgacaaggtcatgagatggttccaggccatgctgcagcggctgcagacctggtggcacggggttctggcctgggtgaaggagaaggtggtggccctggtccatgcagtgcaggccctctggaaacagttccagagtttctgctgctctctgtcagagctcttcatgtcctctttccagtcctacggagccccacggggggacaaggaggagctgacaccccaga

SEQ ID NO: 144021 - DNA, 731 bp, Homo sapiens
  Payload ID: 8466
  Gene Symbol: IL32
  Gene Name: interleukin 32
  Uniprot ID: P24001
  ENST ID: ENST00000552664
  CDS Start-End: 80-646
tctcagtggagctgggtcatctcaggtggggagttggggtccccgaagcaggccttggctccttgaacttttggccgccatgtgcttcccgaaggtcctctctgatgacatgaagaagctgaaggcccgaatgcaccaggccatagaaagattttatgataaaatgcaaaatgcagaatcaggacgtggacaggtgatgtcgagcctggcagagctggaggacgacttcaaagagggctacctggagacagtggcggcttattatgaggagcagcacccagagctcactcctctacttgaaaaagaaagagatggattacggtgccgaggcaacagatcccctgtcccggatgttgaggatcccgcaaccgaggagcctggggagagcttttgtgacaaggtcatgagatggttccaggccatgctgcagcggctgcagacctggtggcacggggttctggcctgggtgaaggagaaggtggtggccctggtccatgcagtgcaggccctctggaaacagttccagagtttctgctgctctctgtcagagctcttcatgtcctctttccagtcctacggagccccacggggggacaaggaggagctgacaccccagaagtgctctgaaccccaatcctcaaaatgaagatactgacaccacctttgccctccccgtcaccgcgcacccaccctgacccctccctcagctgtcctgtgccccgccctctccc

SEQ ID NO: 144022 - DNA, 791 bp, Homo sapiens
  Payload ID: 8466
  Gene Symbol: IL32
  Gene Name: interleukin 32
  ENST ID: ENST00000551513
  CDS Start-End: 101-778
tgaggaccctctggggaggagggtgcttctctgagacactttcttttcctcacacctgttcctcgccagcaggccttggctccttgaacttttggccgccatgtgcttcccgaaggtcctctctgatgacatgaagaagctgaaggcccgaatggtaatgctcctccctacttctgctcaggggttgggggcctgggtctcagcgtgtgacactgaggacactgtgggacacctgggaccctggagggacaaggatccggccctttggtgccaactctgcctctcttcacagcaccaggccatagaaagattttatgataaaatgcaaaatgcagaatcaggacgtggacaggacgacttcaaagagggctacctggagacagtggcggcttattatgaggagcagcacccagagctcactcctctacttgaaaaagaaagagatggattacggtgccgaggcaacagatcccctgtcccggatgttgaggatcccgcaaccgaggagcctggggagagcttttgtgacaaggtcatgagatggttccaggccatgctgcagcggctgcagacctggtggcacggggttctggcctgggtgaaggagaaggtggtggccctggtccatgcagtgcaggccctctggaaacagttccagagtttctgctgctctctgtcagagctcttcatgtcctctttccagtcctacggagccccacggggggacaaggaggagctgacaccccagaagtgctctgaaccccaatcctcaaaatgaagatactgacacc

SEQ ID NO: 144023 - DNA, 1014 bp, Homo sapiens
  Payload ID: 8466
  Gene Symbol: IL32
  Gene Name: interleukin 32
  Uniprot ID: P24001
  ENST ID: ENST00000548476
  CDS Start-End: 151-855
gtctcagtggagctgggtcatctcaggtggggagttggggtccccgaaggtgaggaccctctggggaggagggtgcttctctgagacactttcttttcctcacacctgttcctcgccagcaggccttggctccttgaacttttggccgccatgtgcttcccgaaggtcctctctgatgacatgaagaagctgaaggcccgaatggtaatgctcctccctacttctgctcaggggttgggggcctgggtctcagcgtgtgacactgaggacactgtgggacacctgggaccctggagggacaaggatccggccctttggtgccaactctgcctctcttcacagcaccaggccatagaaagattttatgataaaatgcaaaatgcagaatcaggacgtggacaggtgatgtcgagcctggcagagctggaggacgacttcaaagagggctacctggagacagtggcggcttattatgaggagcagcacccagagctcactcctctacttgaaaaagaaagagatggattacggtgccgaggcaacagatcccctgtcccggatgttgaggatcccgcaaccgaggagcctggggagagcttttgtgacaaggtcatgagatggttccaggccatgctgcagcggctgcagacctggtggcacggggttctggcctgggtgaaggagaaggtggtggccctggtccatgcagtgcaggccctctggaaacagttccagagtttctgctgctctctgtcagagctcttcatgtcctctttccagtcctacggagccccacggggggacaaggaggagctgacaccccagaagtgctctgaaccccaatcctcaaaatgaagatactgacaccacctttgccctccccgtcaccgcgcacccaccctgacccctccctcagctgtcctgtgccccgccctctcccgcacactcagtccccctgcctggcgttcctgccgcagctctgacctggtgctgtcgccctggcatcttaataaa

SEQ ID NO: 144024 - DNA, 1198 bp, Homo sapiens
  Payload ID: 8466
  Gene Symbol: IL32
  Gene Name: interleukin 32
  Uniprot ID: P24001
  ENST ID: ENST00000526464
  CDS Start-End: 444-1010
ggtggggtggggaaagcagcccattcctgggctcagagactcccaccccagctcagagggagcaggggcccagccagggacggaccctcattcctcccagggaccccagacctctgtctctctcgggtaagtctccatctctgtctgtctctgtctctgtctctgtctctgtctgtttttcacgcactcagcaaggcctcctgccctgagagaggctccgcccactaccccccactttccccataaaaccagctgagtatttgtgccaggaagactgcgtgcagaaggtgactgtctcagtggagctgggtcatctcaggtggggagttggggtccccgaaggtgaggaccctctggggaggagggtgcttctctgagacactttcttttcctcacacctgttcctcgccagcaggccttggctccttgaacttttggccgccatgtgcttcccgaaggtcctctctgatgacatgaagaagctgaaggcccgaatgcaccaggccatagaaagattttatgataaaatgcaaaatgcagaatcaggacgtggacaggtgatgtcgagcctggcagagctggaggacgacttcaaagagggctacctggagacagtggcggcttattatgaggagcagcacccagagctcactcctctacttgaaaaagaaagagatggattacggtgccgaggcaacagatcccctgtcccggatgttgaggatcccgcaaccgaggagcctggggagagcttttgtgacaaggtcatgagatggttccaggccatgctgcagcggctgcagacctggtggcacggggttctggcctgggtgaaggagaaggtggtggccctggtccatgcagtgcaggccctctggaaacagttccagagtttctgctgctctctgtcagagctcttcatgtcctctttccagtcctacggagccccacggggggacaaggaggagctgacaccccagaagtgctctgaaccccaatcctcaaaatgaagatactgacaccacctttgccctccccgtcaccgcgcacccaccctgacccctccctcagctgtcctgtgccccgccctctcccgcacactcagtccccctgcctggcgttcctgccgcagctctgacctggtgctgtcgccctggcatcttaataaaacctgcttatacttccctggcaggggaga

SEQ ID NO: 144025 - DNA, 1033 bp, Homo sapiens
  Payload ID: 8466
  Gene Symbol: IL32
  Gene Name: interleukin 32
  ENST ID: ENST00000613483
  CDS Start-End: 215-721
ccccagccagctgtcccgagtctggactttccctctgcccctccccactctcaggctggtggggtggggaaagcagcccattcctgggctcagagactcccaccccagctcagagggagcaggggcccagccagggacggaccctcattcctcccagggaccccagacctctgtctctctcggcaggccttggctccttgaacttttggccgccatgtgcttcccgaaggtcctctctgatgacatgaagaagctgaaggcccgaatgcaccaggccatagaaagattttatgataaaatgcaaaatgcagaatcaggacgtggacaggtgatgtcgagcctggcagagctggaggagctcactcctctacttgaaaaagaaagagatggattacggtgccgaggcaacagatcccctgtcccggatgttgaggatcccgcaaccgaggagcctggggagagcttttgtgacaaggtcatgagatggttccaggccatgctgcagcggctgcagacctggtggcacggggttctggcctgggtgaaggagaaggtggtggccctggtccatgcagtgcaggccctctggaaacagttccagagtttctgctgctctctgtcagagctcttcatgtcctctttccagtcctacggagccccacggggggacaaggaggagctgacaccccagaagtgctctgaaccccaatcctcaaaatgaagatactgacaccacctttgccctccccgtcaccgcgcacccaccctgacccctccctcagctgtcctgtgccccgccctctcccgcacactcagtccccctgcctggcgttcctgccgcagctctgacctggtgctgtcgccctggcatcttaataaaacctgcttatacttccctggcaggggagataccatgatcgcggaggtgggtttcccagggcaaggctgatctgttgccgtattagtccgttttcacacagctataaagaatgcctgagactgggtgatgtataaagaaaagaagtttaactga

SEQ ID NO: 144026 - DNA, 2641 bp, Homo sapiens
  Payload ID: 8467
  Gene Symbol: IL33
  Gene Name: interleukin 33
  Uniprot ID: O95760
  ENST ID: ENST00000381434
  CDS Start-End: 14-826
agaatactgaaaaatgaagcctaaaatgaagtattcaaccaacaaaatttccacagcaaagtggaagaacacagcaagcaaagccttgtgtttcaagctgggaaaatcccaacagaaggccaaagaagtttgccccatgtactttatgaagctccgctctggccttatgataaaaaaggaggcctgttactttaggagagaaaccaccaaaaggccttcactgaaaacaggtagaaagcacaaaagacatctggtactcgctgcctgtcaacagcagtctactgtggagtgctttgcctttggtatatcaggggtccagaaatatactagagcacttcatgattcaagtatcacaggaatttcacctattacagagtatcttgcttctctaagcacatacaatgatcaatccattacttttgctttggaggatgaaagttatgagatatatgttgaagacttgaaaaaagatgaaaagaaagataaggtgttactgagttactatgagtctcaacacccctcaaatgaatcaggtgacggtgttgatggtaagatgttaatggtaaccctgagtcctacaaaagacttctggttgcatgccaacaacaaggaacactctgtggagctccataagtgtgaaaaaccactgccagaccaggccttctttgtccttcataatatgcactccaactgtgtttcatttgaatgcaagactgatcctggagtgtttataggtgtaaaggataatcatcttgctctgattaaagtagactcttctgagaatttgtgtactgaaaatatcttgtttaagctctctgaaacttagttgatggaaacctgtgagtcttgggttgagtacccaaatgctaccactggagaaggaatgagagataaagaaagagacaggtgacatctaagggaaatgaagagtgcttagcatgtgtggaatgttttccatattatgtataaaaatattttttctaatcctccagttattcttttatttccctctgtataactgcatcttcaatacaagtatcagtatattaaatagggtattggtaaagaaacggtcaacattctaaagagatacagtctgacctttacttttctctagtttcagtccagaaagaacttcatatttagagctaaggccactgaggaaagagccatagcttaagtctctatgtagacagggatccattttaaagagctacttagagaaataattttccacagttccaaacgataggctcaaacactagagctgctagtaaaaagaagaccagatgcttcacagaattatcattttttcaactggaataaaacaccaggtttgtttgtagatgtcttaggcaacactcagagcagatctcccttactgtcaggggatatggaacttcaaaggcccacatggcaagccaggtaacataaatgtgtgaaaaagtaaagataactaaaaaatttagaaaaataaatccagtatttgtaaagtgaataacttcatttctaattgtttaatttttaaaattctgatttttatatattgagtttaagcaaggcattcttacacgaggaagtgaagtaaattttagttcagacataaaatttcacttattaggaatatgtaacatgctaaaacttttttttttttaaagagtactgagtcacaacatgttttagagcatccaagtaccatataatccaactatcatggtaaggccagaaatcttctaacctaccagagcctagatgagacaccgaattaacattaaaatttcagtaactgactgtccctcatgtccatggcctaccatcccttctgaccctggcttccagggacctatgtcttttaatactcactgtcacattgggcaaagttgcttctaatccttatttcccatgtgcacaagtctttttgtattccagcttcctgataacactgcttactgtggaatattcatttgacatctgtctcttttcatttcttttaactaccatgcccttgatatatcttttgcacctgctgaacttcatttctgtatcacctgacctctggatgccaaaacgtttattctgctttgtctgttgtagaattttagataaagctattaatggcaatatttttttgctaaacgtttttgttttttactgtcactagggcaataaaatttatactcaaccatataataacattttttaactactaaaggagtagtttttattttaaagtcttagcaatttctattacaacttttcttagacttaacacttatgataaatgactaacatagtaacagaatctttatgaaatatgaccttttctgaaaatacatacttttacatttctactttattgagacctattagatgtaagtgctagtagaatataagataaaagaggctgagaattaccatacaagggtattacaactgtaaaacaatttatctttgtttcattgttctgtcaataattgttaccaaagagataaaaataaaagcagaatgtatatcatcccatctgaaaaacactaattattgacatgtgcatctgtacaataaacttaaaatgattattaaataatcaaatatatctactacattgtttatattattgaataaagtatattttccaaatgta

SEQ ID NO: 144027 - DNA, 2327 bp, Homo sapiens
  Payload ID: 8467
  Gene Symbol: IL33
  Gene Name: interleukin 33
  Uniprot ID: O95760
  ENST ID: ENST00000417746
  CDS Start-End: 79-513
agtctacagactcctccgaacacagagctgcagctcttcagggaagaaatcaaaacaagatcacaagaatactgaaaaatgaagcctaaaatgaagtattcaaccaacaaaatttccacagcaaagtggaagaacacagcaagcaaagccttgtgtttcaagctgggaaataaggtgttactgagttactatgagtctcaacacccctcaaatgaatcaggtgacggtgttgatggtaagatgttaatggtaaccctgagtcctacaaaagacttctggttgcatgccaacaacaaggaacactctgtggagctccataagtgtgaaaaaccactgccagaccaggccttctttgtccttcataatatgcactccaactgtgtttcatttgaatgcaagactgatcctggagtgtttataggtgtaaaggataatcatcttgctctgattaaagtagactcttctgagaatttgtgtactgaaaatatcttgtttaagctctctgaaacttagttgatggaaacctgtgagtcttgggttgagtacccaaatgctaccactggagaaggaatgagagataaagaaagagacaggtgacatctaagggaaatgaagagtgcttagcatgtgtggaatgttttccatattatgtataaaaatattttttctaatcctccagttattcttttatttccctctgtataactgcatcttcaatacaagtatcagtatattaaatagggtattggtaaagaaacggtcaacattctaaagagatacagtctgacctttacttttctctagtttcagtccagaaagaacttcatatttagagctaaggccactgaggaaagagccatagcttaagtctctatgtagacagggatccattttaaagagctacttagagaaataattttccacagttccaaacgataggctcaaacactagagctgctagtaaaaagaagaccagatgcttcacagaattatcattttttcaactggaataaaacaccaggtttgtttgtagatgtcttaggcaacactcagagcagatctcccttactgtcaggggatatggaacttcaaaggcccacatggcaagccaggtaacataaatgtgtgaaaaagtaaagataactaaaaaatttagaaaaataaatccagtatttgtaaagtgaataacttcatttctaattgtttaatttttaaaattctgatttttatatattgagtttaagcaaggcattcttacacgaggaagtgaagtaaattttagttcagacataaaatttcacttattaggaatatgtaacatgctaaaacttttttttttttaaagagtactgagtcacaacatgttttagagcatccaagtaccatataatccaactatcatggtaaggccagaaatcttctaacctaccagagcctagatgagacaccgaattaacattaaaatttcagtaactgactgtccctcatgtccatggcctaccatcccttctgaccctggcttccagggacctatgtcttttaatactcactgtcacattgggcaaagttgcttctaatccttatttcccatgtgcacaagtctttttgtattccagcttcctgataacactgcttactgtggaatattcatttgacatctgtctcttttcatttcttttaactaccatgcccttgatatatcttttgcacctgctgaacttcatttctgtatcacctgacctctggatgccaaaacgtttattctgctttgtctgttgtagaattttagataaagctattaatggcaatatttttttgctaaacgtttttgttttttactgtcactagggcaataaaatttatactcaaccatataataacattttttaactactaaaggagtagtttttattttaaagtcttagcaatttctattacaacttttcttagacttaacacttatgataaatgactaacatagtaacagaatctttatgaaatatgaccttttctgaaaatacatacttttacatttctactttattgagacctattagatgtaagtgctagtagaatataagataaaagaggctgagaattaccatacaagggtattacaactgtaaaacaatttatctttgtttcattgttctgtcaataattgttaccaaagagataaaaataaaagcagaatgtatatcatcccatctgaaaaacactaattattgacatgtgcatctgtacaataaacttaaaatgattattaaataatcaaatatatctactacattgtttatattattgaataaagtatattttccaaatgt

SEQ ID NO: 144028 - DNA, 2501 bp, Homo sapiens
  Payload ID: 8467
  Gene Symbol: IL33
  Gene Name: interleukin 33
  Uniprot ID: O95760
  ENST ID: ENST00000456383
  CDS Start-End: 1-687
atgaagcctaaaatgaagtattcaaccaacaaaatttccacagcaaagtggaagaacacagcaagcaaagccttgtgtttcaagctgggaaaatcccaacagaaggccaaagaagtttgccccatgtactttatgaagctccgctctggccttatgataaaaaaggaggcctgttactttaggagagaaaccaccaaaaggccttcactgaaaacaggtagaaagcacaaaagacatctggtactcgctgcctgtcaacagcagtctactgtggagtgctttgcctttggtatatcaggggtccagaaatatactagagcacttcatgattcaagtatcacagataaggtgttactgagttactatgagtctcaacacccctcaaatgaatcaggtgacggtgttgatggtaagatgttaatggtaaccctgagtcctacaaaagacttctggttgcatgccaacaacaaggaacactctgtggagctccataagtgtgaaaaaccactgccagaccaggccttctttgtccttcataatatgcactccaactgtgtttcatttgaatgcaagactgatcctggagtgtttataggtgtaaaggataatcatcttgctctgattaaagtagactcttctgagaatttgtgtactgaaaatatcttgtttaagctctctgaaacttagttgatggaaacctgtgagtcttgggttgagtacccaaatgctaccactggagaaggaatgagagataaagaaagagacaggtgacatctaagggaaatgaagagtgcttagcatgtgtggaatgttttccatattatgtataaaaatattttttctaatcctccagttattcttttatttccctctgtataactgcatcttcaatacaagtatcagtatattaaatagggtattggtaaagaaacggtcaacattctaaagagatacagtctgacctttacttttctctagtttcagtccagaaagaacttcatatttagagctaaggccactgaggaaagagccatagcttaagtctctatgtagacagggatccattttaaagagctacttagagaaataattttccacagttccaaacgataggctcaaacactagagctgctagtaaaaagaagaccagatgcttcacagaattatcattttttcaactggaataaaacaccaggtttgtttgtagatgtcttaggcaacactcagagcagatctcccttactgtcaggggatatggaacttcaaaggcccacatggcaagccaggtaacataaatgtgtgaaaaagtaaagataactaaaaaatttagaaaaataaatccagtatttgtaaagtgaataacttcatttctaattgtttaatttttaaaattctgatttttatatattgagtttaagcaaggcattcttacacgaggaagtgaagtaaattttagttcagacataaaatttcacttattaggaatatgtaacatgctaaaacttttttttttttaaagagtactgagtcacaacatgttttagagcatccaagtaccatataatccaactatcatggtaaggccagaaatcttctaacctaccagagcctagatgagacaccgaattaacattaaaatttcagtaactgactgtccctcatgtccatggcctaccatcccttctgaccctggcttccagggacctatgtcttttaatactcactgtcacattgggcaaagttgcttctaatccttatttcccatgtgcacaagtctttttgtattccagcttcctgataacactgcttactgtggaatattcatttgacatctgtctcttttcatttcttttaactaccatgcccttgatatatcttttgcacctgctgaacttcatttctgtatcacctgacctctggatgccaaaacgtttattctgctttgtctgttgtagaattttagataaagctattaatggcaatatttttttgctaaacgtttttgttttttactgtcactagggcaataaaatttatactcaaccatataataacattttttaactactaaaggagtagtttttattttaaagtcttagcaatttctattacaacttttcttagacttaacacttatgataaatgactaacatagtaacagaatctttatgaaatatgaccttttctgaaaatacatacttttacatttctactttattgagacctattagatgtaagtgctagtagaatataagataaaagaggctgagaattaccatacaagggtattacaactgtaaaacaatttatctttgtttcattgttctgtcaataattgttaccaaagagataaaaataaaagcagaatgtatatcatcccatctgaaaaacactaattattgacatgtgcatctgtacaataaacttaaaatgattattaaataatcaaatatatctactacattgtttatattattgaataaagtatattttccaaatgt

SEQ ID NO: 144029 - DNA, 757 bp, Homo sapiens
  Payload ID: 8467
  Gene Symbol: IL33
  Gene Name: interleukin 33
  Uniprot ID: O95760
  ENST ID: ENST00000611532
  CDS Start-End: 16-702
acagaatactgaaaaatgaagcctaaaatgaagtattcaaccaacaaaatttccacagcaaagtggaagaacacagcaagcaaagccttgtgtttcaagctgggaaaatcccaacagaaggccaaagaagtttgccccatgtactttatgaagctccgctctggccttatgataaaaaaggaggcctgttactttaggagagaaaccaccaaaaggccttcactgaaaacaggaatttcacctattacagagtatcttgcttctctaagcacatacaatgatcaatccattacttttgctttggaggatgaaagttatgagatatatgttgaagacttgaaaaaagatgaaaagaaagataaggtgttactgagttactatgagtctcaacacccctcaaatgaatcaggtgacggtgttgatggtaagatgttaatggtaaccctgagtcctacaaaagacttctggttgcatgccaacaacaaggaacactctgtggagctccataagtgtgaaaaaccactgccagaccaggccttctttgtccttcataatatgcactccaactgtgtttcatttgaatgcaagactgatcctggagtgtttataggtgtaaaggataatcatcttgctctgattaaagtagactcttctgagaatttgtgtactgaaaatatcttgtttaagctctctgaaacttagttgatggaaacctgtgagtcttgggttgagtacccaaatgctaccactggagaag

SEQ ID NO: 144030 - DNA, 1607 bp, Homo sapiens
  Payload ID: 8468
  Gene Symbol: IL34
  Gene Name: interleukin 34
  Uniprot ID: Q6ZMJ4
  ENST ID: ENST00000288098
  CDS Start-End: 384-1112
agcagctgcagtcggagaaatcagagaaagcgtcacccagccccagattccgaggggcctgccagggactctctcctcctgctccttggaaaggaagaccccgaaagacccccaagccaccggctcagacctgcttctgggctgccatgggacttgcggccaccgccccccggctgtcctccacgctgccgggcagataagggcagctgctgcccttggggcacctgctcactcccgcagcccagccactcctccagggccagcccttccctgactgagtgaccacctctgctgccccgaggccatgtaggccgtgcttaggcctctgtggacacactgctggggacggcgcctgagctctcagggggacgaggaacaccaccatgccccggggcttcacctggctgcgctatcttgggatcttccttggcgtggccttggggaatgagcctttggagatgtggcccttgacgcagaatgaggagtgcactgtcacgggttttctgcgggacaagctgcagtacaggagccgacttcagtacatgaaacactacttccccatcaactacaagatcagtgtgccttacgagggggtgttcagaatcgccaacgtcaccaggctgcagagggcccaggtgagcgagcgggagctgcggtatctgtgggtcttggtgagcctcagtgccactgagtcggtgcaggacgtgctgctcgagggccacccatcctggaagtacctgcaggaggtggagacgctgctgctgaatgtccagcagggcctcacggatgtggaggtcagccccaaggtggaatccgtgttgtccctcttgaatgccccagggccaaacctgaagctggtgcggcccaaagccctgctggacaactgcttccgggtcatggagctgctgtactgctcctgctgtaaacaaagctccgtcctaaactggcaggactgtgaggtgccaagtcctcagtcttgcagcccagagccctcattgcagtatgcggccacccagctgtaccctccgcccccgtggtcccccagctccccgcctcactccacgggctcggtgaggccggtcagggcacagggcgagggcctcttgccctgagcaccctggatggtgactgcggataggggcagccagaccagctcccacaggagttcaactgggtctgagacttcaaggggtggtggtgggagccccccttgggagaggacccctgggaagggtgtttttcctttgagggggattctgtgccacagcagggctcagcttcctgccttccatagctgtcatggcctcacctggagcggaggggacctggggacctgaaggtggatggggacacagctcctggcttctcctggtgctgccctcactgtccccccgcctaaagggggtactgagcctcctgtggcccgcagcagtgagggcacagctgtgggttgcaggggagacagccagcacggcgtggccattctatgaccccccagcctggcagactggggagctgggggcagagggcggtgccaagtgccacatcttgccatagtggatgctcttccagtttcttttttctattaaacaccccacttcctttgg

SEQ ID NO: 144031 - DNA, 1779 bp, Homo sapiens
  Payload ID: 8468
  Gene Symbol: IL34
  Gene Name: interleukin 34
  Uniprot ID: Q6ZMJ4
  ENST ID: ENST00000429149
  CDS Start-End: 556-1284
catcagacgggaagcctggactgtgggttgggggcagcctcagcctctccaacctggcacccactgcccgtggcccttaggcacctgcttggggtcctggagccccttaaggccaccagcaaatcctaggagaccgagtcttggcacgtgaacagagccagatttcacactgagcagctgcagtcggagaaatcagagaaagcgtcacccagccccagattccgaggggcctgccagggactctctcctcctgctccttggaaaggaagaccccgaaagacccccaagccaccggctcagacctgcttctgggctgccatgggacttgcggccaccgccccccggctgtcctccacgctgccgggcagataagggcagctgctgcccttggggcacctgctcactcccgcagcccagccactcctccagggccagcccttccctgactgagtgaccacctctgctgccccgaggccatgtaggccgtgcttaggcctctgtggacacactgctggggacggcgcctgagctctcagggggacgaggaacaccaccatgccccggggcttcacctggctgcgctatcttgggatcttccttggcgtggccttggggaatgagcctttggagatgtggcccttgacgcagaatgaggagtgcactgtcacgggttttctgcgggacaagctgcagtacaggagccgacttcagtacatgaaacactacttccccatcaactacaagatcagtgtgccttacgagggggtgttcagaatcgccaacgtcaccaggctgcagagggcccaggtgagcgagcgggagctgcggtatctgtgggtcttggtgagcctcagtgccactgagtcggtgcaggacgtgctgctcgagggccacccatcctggaagtacctgcaggaggtggagacgctgctgctgaatgtccagcagggcctcacggatgtggaggtcagccccaaggtggaatccgtgttgtccctcttgaatgccccagggccaaacctgaagctggtgcggcccaaagccctgctggacaactgcttccgggtcatggagctgctgtactgctcctgctgtaaacaaagctccgtcctaaactggcaggactgtgaggtgccaagtcctcagtcttgcagcccagagccctcattgcagtatgcggccacccagctgtaccctccgcccccgtggtcccccagctccccgcctcactccacgggctcggtgaggccggtcagggcacagggcgagggcctcttgccctgagcaccctggatggtgactgcggataggggcagccagaccagctcccacaggagttcaactgggtctgagacttcaaggggtggtggtgggagccccccttgggagaggacccctgggaagggtgtttttcctttgagggggattctgtgccacagcagggctcagcttcctgccttccatagctgtcatggcctcacctggagcggaggggacctggggacctgaaggtggatggggacacagctcctggcttctcctggtgctgccctcactgtccccccgcctaaagggggtactgagcctcctgtggcccgcagcagtgagggcacagctgtgggttgcaggggagacagccagcacggcgtggccattctatgaccccccagcctggcagactggggagctgggggcagagggcggtgccaagtgccacatcttgccatagtggatgctcttccagtttcttttttctattaaacaccccacttcctttgg

SEQ ID NO: 144032 - DNA, 703 bp, Homo sapiens
  Payload ID: 8468
  Gene Symbol: IL34
  Gene Name: interleukin 34
  ENST ID: ENST00000563721
  CDS Start-End: 542-703
cctggactgtgggttgggggcagcctcagcctctccaacctggcacccactgcccgtggcccttaggcacctgcttggggtcctggagccccttaaggccaccagcaaatcctaggagaccgagtcttggcacgtgaacagagccagatttcacactgagcagctgcagtcggagaaatcagagaaagcgtcacccagccccagattccgaggggcctgccagggactctctcctcctgctccttggaaaggaagaccccgaaagacccccaagccaccggctcagacctgcttctgggctgccatgggacttgcggccaccgccccccggctgtcctccacgctgccgggcagataagggcagctgctgcccttggggcacctgctcactcccgcagcccagccactcctccagggccagcccttccctgactgagtgaccacctctgctgccccgaggccatgtaggccgtgcttaggcctctgtggacacactgctggggacggcgcctgagctctcagggggacgaggaacaccaccatgccccggggcttcacctggctgcgctatcttgggatcttccttggcgtggccttggggaatgagcctttggagatgtggcccttgacgcagaatgaggagtgcactgtcacgggttttctgcgggacaagctgcagtacaggagccgacttcagtacatg

SEQ ID NO: 144033 - DNA, 1001 bp, Homo sapiens
  Payload ID: 8468
  Gene Symbol: IL34
  Gene Name: interleukin 34
  ENST ID: ENST00000566361
  CDS Start-End: 266-919
attttatcaagttgaaaccagaatccaggatgattcgatctcctgaatgccgggctggaaaacccagcaacgagctttgaaaacatatcacccggacaccaggggcagaggctgttctgggcgggaggttgtgcctgccccacggagcgacagaagcggggagaccagacgtcgaccctgaggcgtgcctcctggggggctccagtggccggcatgggatcttgggatcttccttggcgtggccttggggaatgagcctttggagatgtggcccttgacgcagaatgaggagtgcactgtcacgggttttctgcgggacaagctgcagtacaggagccgacttcagtacatgaaacactacttccccatcaactacaagatcagtgtgccttacgagggggtgttcagaatcgccaacgtcaccaggctgcagagggcccaggtgagcgagcgggagctgcggtatctgtgggtcttggtgagcctcagtgccactgagtcggtgcaggacgtgctgctcgagggccacccatcctggaagtacctgcaggaggtggagacgctgctgctgaatgtccagcagggcctcacggatgtggaggtcagccccaaggtggaatccgtgttgtccctcttgaatgccccagggccaaacctgaagctggtgcggcccaaagccctgctggacaactgcttccgggtcatggagctgctgtactgctcctgctgtaaacaaagctccgtcctaaactggcaggactgtgaggtgccaagtcctcagtcttgcagcccagagccctcattgcagtatgcggccacccagctgtaccctccgcccccgtggtcccccagctccccgcctcactccacgggctcggtgaggccggtcagggcacagggcgagggcctcttgccctgagcaccctggatggtgactgcggataggggcagccagaccagctcccacaggagttcaactgggtctgagacttcaaggggtg

SEQ ID NO: 144034 - DNA, 2672 bp, Homo sapiens
  Payload ID: 8469
  Gene Symbol: IL36RN
  Gene Name: interleukin 36 receptor antagonist
  Uniprot ID: Q9UBH0
  ENST ID: ENST00000346807
  CDS Start-End: 134-601
ggagagtcccacctctaacatctcctgtaggcctggcaatggcaggcaggaaagacagaggaaggaaggagggagaagggaaggagtgaaggaaggagtgaaaaaggggagtctacaccctgtggagctcaagatggtcctgagtggggcgctgtgcttccgaatgaaggactcggcattgaaggtgctttatctgcataataaccagcttctagctggagggctgcatgcagggaaggtcattaaaggtgaagagatcagcgtggtccccaatcggtggctggatgccagcctgtcccccgtcatcctgggtgtccagggtggaagccagtgcctgtcatgtggggtggggcaggagccgactctaacactagagccagtgaacatcatggagctctatcttggtgccaaggaatccaagagcttcaccttctaccggcgggacatggggctcacctccagcttcgagtcggctgcctacccgggctggttcctgtgcacggtgcctgaagccgatcagcctgtcagactcacccagcttcccgagaatggtggctggaatgcccccatcacagacttctacttccagcagtgtgactagggcaacgtgccccccagaactccctgggcagagccagctcgggtgaggggtgagtggaggagacccatggcggacaatcactctctctgctctcaggacccccacgtctgacttagtgggcacctgaccactttgtcttctggttcccagtttggataaattctgagatttggagctcagtccacggtcctcccccactggatggtgctactgctgtggaatcttgtaaaaaccatgtggggtaaactgggaataacatgaaaagatttctgtggaggtggggtgggggagtggtgggaatcattcctgcttaatggtaactgaccagtgttaccctgagccccgcaggccaacccatccccagttgagccttatagggtcagtagctctccacatgaagacctgtcactcaccactatgcaggagagggaggtggtcatagagtcagggatctatggcccttggcccagccccacctccttccctttaatcctgccactgtcatatgctacctttcctatctcttccctcatcatcttgttgtgggcatgaggaggtgctgatgtcagaagaaatggctcgagctcagaagataaaagataagtagggtatgctgatcctcttttaaaaacccaagatacaatcaaaatcccagatgctggtctctattcccatgaaaaagtgctcatgacatattgagaagacctacttacaaagtggcatatattgcaatttattttaattaaaagatacctatttatatatttctttatagaaaaaagtctggaagagtttacttcaattgtagcaatgtcagggtggtggcagtataggtgatttttcttttaattctgttaatttacctgtatttcctaatttttctacaatgaagatgaattccttgtataaaaataagaaaagaaattaatcttgaggtaagcagagtagacatcatctctgattgtcctcagcctccacttccccagagtaaattcaaattgaatcgagctctgctgctctggttggttgtagtagtgatcaggaaacagatctcagcaaagccactgaggaggaggctgtgctgagtttgtgtggctggaatctctgggtaaggaacttaaagaacaaaaatcatctggtaattctttcctagaaggatcacagcccctgggattccaaggcattggatccagtctctaagaaggctgctgtactggttgaattgtgtccccctcaaattcacatccttcttggaatctcagtctgtgagtttatttggagataaggtctctgcagatgtagttagttaagacaaggtcatgctggatgaaggtagacctaaattcaatatgactggtttccttgtatgaaaaggagaggacacagagacagaggagatgcggggaagactatgtaaagatgaaggcagagatcggagttttgcagccacaagctaagaaacaccaaggattgtggcaaccatcagaagcttggaagaggcaaagaagaattcttccctagaggctttagagggataacggctctgctgaaaccttaatctcagacttccagcctcctgaacgaagaaagaataaatttcggctgttttaagccaccaaggataattggttacagcagctctaggaaactaatacagctgctaaaatgatccctgtctcctcgtgtttacattctgtgtgtgtcccctcccacaatgtaccaaagttgtctttgtgaccaatagaatatggcagaagtgatggcatgccacttccaagattaggttataaaagacactgcagcttctacttgagccctctctctctgccacccaccgcccccaatctatcttggctcactcgctctgggggaagctagctgccatgctatgagcaggcctataaagagacttacgtggtaaaaaatgaagtctcctgcccacagccacattagtgaacctagaagcagagactctgtgagataatcgatgtttgttgttttaagttgctcagttttggtctaacttgttatgcagcaatagataaataatatgcagagaaagagaaacaaa

SEQ ID NO: 144035 - DNA, 2700 bp, Homo sapiens
  Payload ID: 8469
  Gene Symbol: IL36RN
  Gene Name: interleukin 36 receptor antagonist
  Uniprot ID: Q9UBH0
  ENST ID: ENST00000393200
  CDS Start-End: 162-629
cgctgggaatcctgctcctcctcaggtcctggcagtttcagggcccctccctaggccttacttaaaaggctgaggcatccttggaggaacaggcagactccacagctcccgccaggagaaaggaacattctgaggggagtctacaccctgtggagctcaagatggtcctgagtggggcgctgtgcttccgaatgaaggactcggcattgaaggtgctttatctgcataataaccagcttctagctggagggctgcatgcagggaaggtcattaaaggtgaagagatcagcgtggtccccaatcggtggctggatgccagcctgtcccccgtcatcctgggtgtccagggtggaagccagtgcctgtcatgtggggtggggcaggagccgactctaacactagagccagtgaacatcatggagctctatcttggtgccaaggaatccaagagcttcaccttctaccggcgggacatggggctcacctccagcttcgagtcggctgcctacccgggctggttcctgtgcacggtgcctgaagccgatcagcctgtcagactcacccagcttcccgagaatggtggctggaatgcccccatcacagacttctacttccagcagtgtgactagggcaacgtgccccccagaactccctgggcagagccagctcgggtgaggggtgagtggaggagacccatggcggacaatcactctctctgctctcaggacccccacgtctgacttagtgggcacctgaccactttgtcttctggttcccagtttggataaattctgagatttggagctcagtccacggtcctcccccactggatggtgctactgctgtggaatcttgtaaaaaccatgtggggtaaactgggaataacatgaaaagatttctgtggaggtggggtgggggagtggtgggaatcattcctgcttaatggtaactgaccagtgttaccctgagccccgcaggccaacccatccccagttgagccttatagggtcagtagctctccacatgaagacctgtcactcaccactatgcaggagagggaggtggtcatagagtcagggatctatggcccttggcccagccccacctccttccctttaatcctgccactgtcatatgctacctttcctatctcttccctcatcatcttgttgtgggcatgaggaggtgctgatgtcagaagaaatggctcgagctcagaagataaaagataagtagggtatgctgatcctcttttaaaaacccaagatacaatcaaaatcccagatgctggtctctattcccatgaaaaagtgctcatgacatattgagaagacctacttacaaagtggcatatattgcaatttattttaattaaaagatacctatttatatatttctttatagaaaaaagtctggaagagtttacttcaattgtagcaatgtcagggtggtggcagtataggtgatttttcttttaattctgttaatttacctgtatttcctaatttttctacaatgaagatgaattccttgtataaaaataagaaaagaaattaatcttgaggtaagcagagtagacatcatctctgattgtcctcagcctccacttccccagagtaaattcaaattgaatcgagctctgctgctctggttggttgtagtagtgatcaggaaacagatctcagcaaagccactgaggaggaggctgtgctgagtttgtgtggctggaatctctgggtaaggaacttaaagaacaaaaatcatctggtaattctttcctagaaggatcacagcccctgggattccaaggcattggatccagtctctaagaaggctgctgtactggttgaattgtgtccccctcaaattcacatccttcttggaatctcagtctgtgagtttatttggagataaggtctctgcagatgtagttagttaagacaaggtcatgctggatgaaggtagacctaaattcaatatgactggtttccttgtatgaaaaggagaggacacagagacagaggagatgcggggaagactatgtaaagatgaaggcagagatcggagttttgcagccacaagctaagaaacaccaaggattgtggcaaccatcagaagcttggaagaggcaaagaagaattcttccctagaggctttagagggataacggctctgctgaaaccttaatctcagacttccagcctcctgaacgaagaaagaataaatttcggctgttttaagccaccaaggataattggttacagcagctctaggaaactaatacagctgctaaaatgatccctgtctcctcgtgtttacattctgtgtgtgtcccctcccacaatgtaccaaagttgtctttgtgaccaatagaatatggcagaagtgatggcatgccacttccaagattaggttataaaagacactgcagcttctacttgagccctctctctctgccacccaccgcccccaatctatcttggctcactcgctctgggggaagctagctgccatgctatgagcaggcctataaagagacttacgtggtaaaaaatgaagtctcctgcccacagccacattagtgaacctagaagcagagactctgtgagataatcgatgtttgttgttttaagttgctcagttttggtctaacttgttatgcagcaatagataaataatatgcagagaaagagaaacaaa

SEQ ID NO: 144036 - DNA, 403 bp, Homo sapiens
  Payload ID: 8469
  Gene Symbol: IL36RN
  Gene Name: interleukin 36 receptor antagonist
  ENST ID: ENST00000437409
  CDS Start-End: 53-403
ttttctgttgtttattccaaaataggggagtctacaccctgtggagctcaagatggtcctgagtggggcgctgtgcttccgaatgaaggactcggcattgaaggtgctttatctgcataataaccagcttctagctggagggctgcatgcagggaaggtcattaaaggtgaagagatcagcgtggtccccaatcggtggctggatgccagcctgtcccccgtcatcctgggtgtccagggtggaagccagtgcctgtcatgtggggtggggcaggagccgactctaacactagagccagtgaacatcatggagctctatcttggtgccaaggaatccaagagcttcaccttctaccggcgggacatggggctcacctccagcttcgagtcggctgcctacccg

SEQ ID NO: 144037 - DNA, 675 bp, Homo sapiens
  Payload ID: 8469
  Gene Symbol: IL36RN
  Gene Name: interleukin 36 receptor antagonist
  ENST ID: ENST00000514072
  CDS Start-End: 1-158
acatggggctcacctccagcttcgagtcggctgcctacccgggctggttcctgtgcacggtgcctgaagccgatcagcctgtcagactcacccagcttcccgagaatggtggctggaatgcccccatcacagacttctacttccagcagtgtgactagggcaacgtgccccccagaactccctgggcagagccagctcgggtgaggggaatgaactccagtgtccccacccaaaccctggggaatgggagcagaagccagaggaggagcccatatctgagccccaggtattccacctgcacttcacctgttggaccagcttggtggttgagagtccactgaggcactggcaaggaggtggccaggacagacaaggctgcctctatggacctcacagctccagcccagattcagctgaagtcctcaggcaacaggcagcacagctcctaccccaggcctctcagggctgccaagaacatgagctccggatgctaggctgtgtttcagaccctgttcacactctctttgtccatgggcccagacacagtcttgtgctgctccctctgcttttgggtcctccatccatcctctctgcctagataaatctctcatctttcaataccctgctaagatgtcacctcctccaagaagcttttactgagttgagacaccccca

SEQ ID NO: 144038 - DNA, 888 bp, Homo sapiens
  Payload ID: 8470
  Gene Symbol: IL36A
  Gene Name: interleukin 36, alpha
  Uniprot ID: Q9UHA7
  ENST ID: ENST00000259211
  CDS Start-End: 412-888
aaaacccaagtgcagtagaagccattgttcataatggtagggatacagggtccttcgtaacagattatcagtgtggcctatgctggaaagtctggtgacctctgattttttttgcttccaggtctttggccttggcactctttgtcatattagagttcctgggtctaggcctgggcaggattcataggtgcagctgcttctgctggaggtagactgcatccaacaaagtaagggtgctgggtgagttctgggagtatagattctgactggggtcactgctgggctggccgccagtctttcatctgacccagggttaaactgtggcttgggactgactcaggtcctctcttggggtcggtctgcacataaaaggactcctatccttggcagttctgaaacaacaccaccacaatggaaaaagcattgaaaattgacacacctcagcaggggagcattcaggatatcaatcatcgggtgtgggttcttcaggaccagacgctcatagcagtcccgaggaaggaccgtatgtctccagtcactattgccttaatctcatgccgacatgtggagacccttgagaaagacagagggaaccccatctacctgggcctgaatggactcaatctctgcctgatgtgtgctaaagtcggggaccagcccacactgcagctgaaggaaaaggatataatggatttgtacaaccaacccgagcctgtgaagtcctttctcttctaccacagccagagtggcaggaactccaccttcgagtctgtggctttccctggctggttcatcgctgtcagctctgaaggaggctgtcctctcatccttacccaagaactggggaaagccaacactactgactttgggttaactatgctgttttaa

SEQ ID NO: 144039 - DNA, 1186 bp, Homo sapiens
  Payload ID: 8471
  Gene Symbol: IL36B
  Gene Name: interleukin 36, beta
  Uniprot ID: Q9NZH7
  ENST ID: ENST00000259213
  CDS Start-End: 109-603
cacgggttcctccccactctgtctttctcacctctccttcacttttcctagcctcctcaccaccatctgatctatcttgttctcttcacaaaaggctctgaagacatcatgaacccacaacgggaggcagcacccaaatcctatgctattcgtgattctcgacagatggtgtgggtcctgagtggaaattctttaatagcagctcctcttagccgcagcattaagcctgtcactcttcatttaatagcctgtagagacacagaattcagtgacaaggaaaagggtaatatggtttacctgggaatcaagggaaaagatctctgtctcttctgtgcagaaattcagggcaagcctactttgcagcttaagcttcagggctcccaagataacatagggaaggacacttgctggaaactagttggaattcacacatgcataaacctggatgtgagagagagctgcttcatgggaacccttgaccaatggggaataggagtgggtagaaagaagtggaagagttcctttcaacatcaccatctcaggaagaaggacaaagatttctcatccatgcggaccaacataggaatgccaggaaggatgtagaaataaggggaggaagattcccatctctacaatctttgagtgggtttgctatcaatgaaatgctacaaatggaataagttgcagaaatttttctcttttcttgggttctggagagtttgtaaaacaaggacactatgtatttttaaagagttggtaaatcttacctgtaaagctagagaaggtcggagtctttttaggagtagatttggactacataacctgtaaatgtgttttgtccagtccttagagtgttttttaaaaaattgtaaagtcaaggttttcatgaaaaatgggaagatcagacaacattgctcctgaattcccacagagcagcaagctactagagctcaatctgttatttcttttcctgatgtacaggggttaagtcctatggaagaaacagcagaattattcaaaattatttacataatgtgcaattattcactagagcatgaggagtgaaacgctctgtttagtatgtataacttaaaaggaacacatacaattaaaagtaattgaaagacatttcttcttaaaaattctataatcttacactggtaaaataaactagtttttcccatgt

SEQ ID NO: 144040 - DNA, 1052 bp, Homo sapiens
  Payload ID: 8471
  Gene Symbol: IL36B
  Gene Name: interleukin 36, beta
  Uniprot ID: Q9NZH7
  ENST ID: ENST00000327407
  CDS Start-End: 109-582
cacgggttcctccccactctgtctttctcacctctccttcacttttcctagcctcctcaccaccatctgatctatcttgttctcttcacaaaaggctctgaagacatcatgaacccacaacgggaggcagcacccaaatcctatgctattcgtgattctcgacagatggtgtgggtcctgagtggaaattctttaatagcagctcctcttagccgcagcattaagcctgtcactcttcatttaatagcctgtagagacacagaattcagtgacaaggaaaagggtaatatggtttacctgggaatcaagggaaaagatctctgtctcttctgtgcagaaattcagggcaagcctactttgcagcttaaggaaaaaaatatcatggacctgtatgtggagaagaaagcacagaagccctttctctttttccacaataaagaaggctccacttctgtctttcagtcagtctcttaccctggctggttcatagccacctccaccacatcaggacagcccatctttctcaccaaggagagaggcataactaataacactaacttctacttagattctgtggaataaatccagcctaggctgtgggtggctggttccaggatagagaatcaagctgtcagagtcatcttaacagatcattatgcgactgagttcactagcagttcagcccatccatagcttacctcattcttactatccaaaagccacctcctcctccaaacatccatttctgtaccaagaccctcactcgaatgtcactatcccaagatgaaacctaaaaatcactttccattctttcttgatcttaccccaccatccactcagctgccatgcccagtttagtcaaccccccaaatgctgcttcatgcaaccttccattcctattccttttgccaacccatgatgtagagatgtggattcatgacattttgttcatacaacttcttcaataaaacattataatatgtgccccaaagataaagctgaagaatgagatgaatgtgaaattaaaggtttgcatgtctttctaatcctaa

SEQ ID NO: 144041 - DNA, 1195 bp, Homo sapiens
  Payload ID: 8472
  Gene Symbol: IL36G
  Gene Name: interleukin 36, gamma
  Uniprot ID: Q9NZH8
  ENST ID: ENST00000259205
  CDS Start-End: 70-579
gagccacgattcagtcccctggactgtagataaagaccctttcttgccaggtgctgagacaaccacactatgagaggcactccaggagacgctgatggtggaggaagggccgtctatcaatcaatgtgtaaacctattactgggactattaatgatttgaatcagcaagtgtggacccttcagggtcagaaccttgtggcagttccacgaagtgacagtgtgaccccagtcactgttgctgttatcacatgcaagtatccagaggctcttgagcaaggcagaggggatcccatttatttgggaatccagaatccagaaatgtgtttgtattgtgagaaggttggagaacagcccacattgcagctaaaagagcagaagatcatggatctgtatggccaacccgagcccgtgaaacccttccttttctaccgtgccaagactggtaggacctccacccttgagtctgtggccttcccggactggttcattgcctcctccaagagagaccagcccatcattctgacttcagaacttgggaagtcatacaacactgcctttgaattaaatataaatgactgaactcagcctagaggtggcagcttggtctttgtcttaaagtttctggttcccaatgtgttttcgtctacattttcttagtgtcattttcacgctggtgctgagacaggggcaaggctgctgttatcatctcattttataatgaagaagaagcaattacttcatagcaactgaagaacaggatgtggcctcagaagcaggagagctgggtggtataaggctgtcctctcaagctggtgctgtgtaggccacaaggcatctgcatgagtgactttaagactcaaagaccaaacactgagctttcttctaggggtgggtatgaagatgcttcagagctcatgcgcgttacccacgatggcatgactagcacagagctgatctctgtttctgttttgctttattccctcttgggatgatatcatccagtctttatatgttgccaatatacctcattgtgtgtaatagaaccttcttagcattaagaccttgtaaacaaaaataattcttgtgttaagttaaatcatttttgtcctaattgtaatgtgtaatcttaaagttaaataaactttgtgtatttatataataataaagctaaaactgatataaaataaagaaagag

SEQ ID NO: 144042 - DNA, 989 bp, Homo sapiens
  Payload ID: 8472
  Gene Symbol: IL36G
  Gene Name: interleukin 36, gamma
  Uniprot ID: Q9NZH8
  ENST ID: ENST00000376489
  CDS Start-End: 80-484
gaagctgctggagccacgattcagtcccctggactgtagataaagaccctttcttgccaggtgctgagacaaccacactatgagaggcactccaggagacgctgatggtggaggaagggccgtctatcaatcaatcactgttgctgttatcacatgcaagtatccagaggctcttgagcaaggcagaggggatcccatttatttgggaatccagaatccagaaatgtgtttgtattgtgagaaggttggagaacagcccacattgcagctaaaagagcagaagatcatggatctgtatggccaacccgagcccgtgaaacccttccttttctaccgtgccaagactggtaggacctccacccttgagtctgtggccttcccggactggttcattgcctcctccaagagagaccagcccatcattctgacttcagaacttgggaagtcatacaacactgcctttgaattaaatataaatgactgaactcagcctagaggtggcagcttggtctttgtcttaaagtttctggttcccaatgtgttttcgtctacattttcttagtgtcattttcacgctggtgctgagacaggggcaaggctgctgttatcatctcattttataatgaagaagaagcaattacttcatagcaactgaagaacaggatgtggcctcagaagcaggagagctgggtggtataaggctgtcctctcaagctggtgctgtgtaggccacaaggcatctgcatgagtgactttaagactcaaagaccaaacactgagctttcttctaggggtgggtatgaagatgcttcagagctcatgcgcgttacccacgatggcatgactagcacagagctgatctctgtttctgttttgctttattccctcttgggatgatatcatccagtctttatatgttgccaatatacctcattgtgtgtaatagaaccttcttagcattaagaccttgtaaacaaaaataattcttg

SEQ ID NO: 144043 - DNA, 369 bp, Homo sapiens
  Payload ID: 8472
  Gene Symbol: IL36G
  Gene Name: interleukin 36, gamma
  ENST ID: ENST00000447128
  CDS Start-End: 255-369
tttgctttcttgtccagtcttgggagtgcctgaccacagcaggatcttctggtaggaggagctggttttctttcatgtcatacgtttctcatgccccacccaggaagctggagcctccttctctgctcatccagataaatgatccaggctccattagaacccatcactgaccttggaagctgctggagccacgattcagtcccctggactgtagataaagaccctttcttgccaggtgctgagacaaccacactatgagaggcactccaggagacgctgatggtggaggaagggccgtctatcaatcaatgtgtaaacctattactgggactattaatgatttgaatcagcaagtgtggacccttcagg

SEQ ID NO: 144044 - DNA, 772 bp, Homo sapiens
  Payload ID: 8473
  Gene Symbol: IL37
  Gene Name: interleukin 37
  Uniprot ID: Q9NZH6
  ENST ID: ENST00000263326
  CDS Start-End: 43-699
cttcattccattttctgttgagtaataaactcaacgttgaaaatgtcctttgtgggggagaactcaggagtgaaaatgggctctgaggactgggaaaaagatgaaccccagtgctgcttagaagacccggctggaagccccctggaaccaggcccaagcctccccaccatgaattttgttcacacaagtccaaaggtgaagaacttaaacccgaagaaattcagcattcatgaccaggatcacaaagtactggtcctggactctgggaatctcatagcagttccagataaaaactacatacgcccagagatcttctttgcattagcctcatccttgagctcagcctctgcggagaaaggaagtccgattctcctgggggtctctaaaggggagttttgtctctactgtgacaaggataaaggacaaagtcatccatcccttcagctgaagaaggagaaactgatgaagctggctgcccaaaaggaatcagcacgccggcccttcatcttttatagggctcaggtgggctcctggaacatgctggagtcggcggctcaccccggatggttcatctgcacctcctgcaattgtaatgagcctgttggggtgacagataaatttgagaacaggaaacacattgaattttcatttcaaccagtttgcaaagctgaaatgagccccagtgaggtcagcgattaggaaactgccccattgaacgccttcctcgctaatttgaactaattgtataaaaacaccaaacctgctcactaaa

SEQ ID NO: 144045 - DNA, 709 bp, Homo sapiens
  Payload ID: 8473
  Gene Symbol: IL37
  Gene Name: interleukin 37
  Uniprot ID: Q9NZH6
  ENST ID: ENST00000352179
  CDS Start-End: 43-636
cttcattccattttctgttgagtaataaactcaacgttgaaaatgtcctttgtgggggagaactcaggagtgaaaatgggctctgaggactgggaaaaagatgaaccccagtgctgcttagaaggtccaaaggtgaagaacttaaacccgaagaaattcagcattcatgaccaggatcacaaagtactggtcctggactctgggaatctcatagcagttccagataaaaactacatacgcccagagatcttctttgcattagcctcatccttgagctcagcctctgcggagaaaggaagtccgattctcctgggggtctctaaaggggagttttgtctctactgtgacaaggataaaggacaaagtcatccatcccttcagctgaagaaggagaaactgatgaagctggctgcccaaaaggaatcagcacgccggcccttcatcttttatagggctcaggtgggctcctggaacatgctggagtcggcggctcaccccggatggttcatctgcacctcctgcaattgtaatgagcctgttggggtgacagataaatttgagaacaggaaacacattgaattttcatttcaaccagtttgcaaagctgaaatgagccccagtgaggtcagcgattaggaaactgccccattgaacgccttcctcgctaatttgaactaattgtataaaaacaccaaacctgctcactaaa

SEQ ID NO: 144046 - DNA, 589 bp, Homo sapiens
  Payload ID: 8473
  Gene Symbol: IL37
  Gene Name: interleukin 37
  Uniprot ID: Q9NZH6
  ENST ID: ENST00000349806
  CDS Start-End: 43-516
cttcattccattttctgttgagtaataaactcaacgttgaaaatgtcctttgtgggggagaactcaggagtgaaaatgggctctgaggactgggaaaaagatgaaccccagtgctgcttagaagagatcttctttgcattagcctcatccttgagctcagcctctgcggagaaaggaagtccgattctcctgggggtctctaaaggggagttttgtctctactgtgacaaggataaaggacaaagtcatccatcccttcagctgaagaaggagaaactgatgaagctggctgcccaaaaggaatcagcacgccggcccttcatcttttatagggctcaggtgggctcctggaacatgctggagtcggcggctcaccccggatggttcatctgcacctcctgcaattgtaatgagcctgttggggtgacagataaatttgagaacaggaaacacattgaattttcatttcaaccagtttgcaaagctgaaatgagccccagtgaggtcagcgattaggaaactgccccattgaacgccttcctcgctaatttgaactaattgtataaaaacaccaaacctgctcactaaa

SEQ ID NO: 144047 - DNA, 652 bp, Homo sapiens
  Payload ID: 8473
  Gene Symbol: IL37
  Gene Name: interleukin 37
  Uniprot ID: Q9NZH6
  ENST ID: ENST00000353225
  CDS Start-End: 43-579
cttcattccattttctgttgagtaataaactcaacgttgaaaatgtcctttgtgggggagaactcaggagtgaaaatgggctctgaggactgggaaaaagatgaaccccagtgctgcttagaagacccggctggaagccccctggaaccaggcccaagcctccccaccatgaattttgttcacacaaagatcttctttgcattagcctcatccttgagctcagcctctgcggagaaaggaagtccgattctcctgggggtctctaaaggggagttttgtctctactgtgacaaggataaaggacaaagtcatccatcccttcagctgaagaaggagaaactgatgaagctggctgcccaaaaggaatcagcacgccggcccttcatcttttatagggctcaggtgggctcctggaacatgctggagtcggcggctcaccccggatggttcatctgcacctcctgcaattgtaatgagcctgttggggtgacagataaatttgagaacaggaaacacattgaattttcatttcaaccagtttgcaaagctgaaatgagccccagtgaggtcagcgattaggaaactgccccattgaacgccttcctcgctaatttgaactaattgtataaaaacaccaaacctgctcactaaa

SEQ ID NO: 144048 - DNA, 652 bp, Homo sapiens
  Payload ID: 8473
  Gene Symbol: IL37
  Gene Name: interleukin 37
  Uniprot ID: Q9NZH6
  ENST ID: ENST00000311328
  CDS Start-End: 1-579
atgtcaggctgtgataggagggaaacagaaaccaaaggaaagaacagctttaagaagcgcttaagaggtccaaaggtgaagaacttaaacccgaagaaattcagcattcatgaccaggatcacaaagtactggtcctggactctgggaatctcatagcagttccagataaaaactacatacgcccagagatcttctttgcattagcctcatccttgagctcagcctctgcggagaaaggaagtccgattctcctgggggtctctaaaggggagttttgtctctactgtgacaaggataaaggacaaagtcatccatcccttcagctgaagaaggagaaactgatgaagctggctgcccaaaaggaatcagcacgccggcccttcatcttttatagggctcaggtgggctcctggaacatgctggagtcggcggctcaccccggatggttcatctgcacctcctgcaattgtaatgagcctgttggggtgacagataaatttgagaacaggaaacacattgaattttcatttcaaccagtttgcaaagctgaaatgagccccagtgaggtcagcgattaggaaactgccccattgaacgccttcctcgctaatttgaactaattgtataaaaacaccaaacctgctcactaaa

SEQ ID NO: 144049 - DNA, 616 bp, Homo sapiens
  Payload ID: 8474
  Gene Symbol: IL4
  Gene Name: interleukin 4
  Uniprot ID: P05112
  ENST ID: ENST00000231449
  CDS Start-End: 66-527
tgcatcgttagcttctcctgataaactaattgcctcacattgtcactgcaaatcgacacctattaatgggtctcacctcccaactgcttccccctctgttcttcctgctagcatgtgccggcaactttgtccacggacacaagtgcgatatcaccttacaggagatcatcaaaactttgaacagcctcacagagcagaagactctgtgcaccgagttgaccgtaacagacatctttgctgcctccaagaacacaactgagaaggaaaccttctgcagggctgcgactgtgctccggcagttctacagccaccatgagaaggacactcgctgcctgggtgcgactgcacagcagttccacaggcacaagcagctgatccgattcctgaaacggctcgacaggaacctctggggcctggcgggcttgaattcctgtcctgtgaaggaagccaaccagagtacgttggaaaacttcttggaaaggctaaagacgatcatgagagagaaatattcaaagtgttcgagctgaatattttaatttatgagtttttgatagctttattttttaagtatttatatatttataactcatcataaaataaagtatatatagaatct

SEQ ID NO: 144050 - DNA, 414 bp, Homo sapiens
  Payload ID: 8474
  Gene Symbol: IL4
  Gene Name: interleukin 4
  Uniprot ID: P05112
  ENST ID: ENST00000350025
  CDS Start-End: 1-414
atgggtctcacctcccaactgcttccccctctgttcttcctgctagcatgtgccggcaactttgtccacggacacaagtgcgatatcaccttacaggagatcatcaaaactttgaacagcctcacagagcagaagaacacaactgagaaggaaaccttctgcagggctgcgactgtgctccggcagttctacagccaccatgagaaggacactcgctgcctgggtgcgactgcacagcagttccacaggcacaagcagctgatccgattcctgaaacggctcgacaggaacctctggggcctggcgggcttgaattcctgtcctgtgaaggaagccaaccagagtacgttggaaaacttcttggaaaggctaaagacgatcatgagagagaaatattcaaagtgttcgagctga

SEQ ID NO: 144051 - DNA, 717 bp, Homo sapiens
  Payload ID: 8474
  Gene Symbol: IL4
  Gene Name: interleukin 4
  ENST ID: ENST00000622422
  CDS Start-End: 66-476
tgcatcgttagcttctcctgataaactaattgcctcacattgtcactgcaaatcgacacctattaatgggtctcacctcccaactgcttccccctctgttcttcctgctagcatgtgccggcaactttgtccacggacacaagtgcgatatcaccttacaggagatcatcaaaactttgaacagcctcacagagcagaagactctgtgcaccgagttgaccgtaacagacatctttgctgcctccaagcagcatgcatgtctgcccacctccagacacacaggcaccatctgccgccccccatcagcccgtgtcccttccacctcgactcgcctacaaagcccagagagaacacaactgagaaggaaaccttctgcagggctgcgactgtgctccggcagttctacagccaccatgagaaggacactcgctgcctgggtgcgactgcacagcagttccacaggcacaagcagctgatccgattcctgaaacggctcgacaggaacctctggggcctggcgggcttgaattcctgtcctgtgaaggaagccaaccagagtacgttggaaaacttcttggaaaggctaaagacgatcatgagagagaaatattcaaagtgttcgagctgaatattttaatttatgagtttttgatagctttattttttaagtatttatatatttataactcatcataaaataaagtatatatagaatct

SEQ ID NO: 144052 - DNA, 2349 bp, Homo sapiens
  Payload ID: 8475
  Gene Symbol: IL4I1
  Gene Name: interleukin 4 induced 1
  Uniprot ID: Q96RQ9
  ENST ID: ENST00000341114
  CDS Start-End: 564-2333
ggcccaccgtactacttctgcgcctgcgcgaccgtgattccccgctcgcgactccccaccccccagggctccctaaagagggccacgagctgcgaaagggcgggaaaggcagttggagaagaggtaagcggttactcactccatggctgcagcaaggagaggcggcggcggcctcggctgaagaaagaaggtgggagcggagagcgcaggcgtgaaacccaccttgtcccatccacatcaggacatcccagctggagttcaaccttcatcccttctgtggcagttaggagactgaatcaaggtccagagaaggtggaggaatcctgatactgagcggaagaaaatacacagatgtgcttccttcccagtcctgacaaatggcctttccttaagttcctcattaattcatatgaagacaacacatttggtgactaaatttggaatcagaggcttttaaagcctcccagctgctctgaccccaatatcaggaacttggcatctctgatctaacaagggcaccactaacaaggacaaagccaccatcattcaccttgattccgcacatgcccaacgatgacttctgtcctgggctaaccataaaggccatgggtgctgagagagccccccagaggcagccatgcaccctgcacctcctcgtcctcgtccccatcctcctcagcctggtggcctcccaggactggaaggctgaacgcagccaagaccccttcgagaaatgcatgcaggatcctgactatgagcagctgctcaaggtggtgacctgggggctcaatcggaccctgaagccccagagggtgattgtggttggcgctggtgtggccgggctggtggccgccaaggtgctcagcgatgctggacacaaggtcaccatcctggaggcagataacaggatcgggggccgcatcttcacctaccgggaccagaacacgggctggattggggagctgggagccatgcgcatgcccagctctcacaggatcctccacaagctctgccagggcctggggctcaacctgaccaagttcacccagtacgacaagaacacgtggacggaggtgcacgaagtgaagctgcgcaactatgtggtggagaaggtgcccgagaagctgggctacgccttgcgtccccaggaaaagggccactcgcccgaagacatctaccagatggctctcaaccaggccctcaaagacctcaaggcactgggctgcagaaaggcgatgaagaagtttgaaaggcacacgctcttggaatatcttctcggggaggggaacctgagccggccggccgtgcagcttctgggagacgtgatgtccgaggatggcttcttctatctcagcttcgccgaggccctccgggcccacagctgcctcagcgacagactccagtacagccgcatcgtgggtggctgggacctgctgccgcgcgcgctgctgagctcgctgtccgggcttgtgctgttgaacgcgcccgtggtggcgatgacccagggaccgcacgatgtgcacgtgcagatcgagacctctcccccggcgcggaatctgaaggtgctgaaggccgacgtggtgctgctgacggcgagcggaccggcggtgaagcgcatcaccttctcgccgccgctgccccgccacatgcaggaggcgctgcggaggctgcactacgtgccggccaccaaggtgttcctaagcttccgcaggcccttctggcgcgaggagcacattgaaggcggccactcaaacaccgatcgcccgtcgcgcatgattttctacccgccgccgcgcgagggcgcgctgctgctggcctcgtacacgtggtcggacgcggcggcagcgttcgccggcttgagccgggaagaggcgttgcgcttggcgctcgacgacgtggcggcattgcacgggcctgtcgtgcgccagctctgggacggcaccggcgtcgtcaagcgttgggcggaggaccagcacagccagggtggctttgtggtacagccgccggcgctctggcaaaccgaaaaggatgactggacggtcccttatggccgcatctactttgccggcgagcacaccgcctacccgcacggctgggtggagacggcggtcaagtcggcgctgcgcgccgccatcaagatcaacagccggaaggggcctgcatcggacacggccagccccgaggggcacgcatctgacatggaggggcaggggcatgtgcatggggtggccagcagcccctcgcatgacctggcaaaggaagaaggcagccaccctccagtccaaggccagttatctctccaaaacacgacccacacgaggacctcgcattaaagtattttcggaaaaa

SEQ ID NO: 144053 - DNA, 1863 bp, Homo sapiens
  Payload ID: 8475
  Gene Symbol: IL4I1
  Gene Name: interleukin 4 induced 1
  Uniprot ID: Q96RQ9
  ENST ID: ENST00000391826
  CDS Start-End: 144-1847
gtttcccaaaaggaggggtgggcggggctctgccagtttaaggggagagaaagggccacagcagagacagtggagggcagtggagaggaccgcgctgtcctgctgtcaccaagagctggagacaccatctcccaccgagagtcatggccccattggccctgcacctcctcgtcctcgtccccatcctcctcagcctggtggcctcccaggactggaaggctgaacgcagccaagaccccttcgagaaatgcatgcaggatcctgactatgagcagctgctcaaggtggtgacctgggggctcaatcggaccctgaagccccagagggtgattgtggttggcgctggtgtggccgggctggtggccgccaaggtgctcagcgatgctggacacaaggtcaccatcctggaggcagataacaggatcgggggccgcatcttcacctaccgggaccagaacacgggctggattggggagctgggagccatgcgcatgcccagctctcacaggatcctccacaagctctgccagggcctggggctcaacctgaccaagttcacccagtacgacaagaacacgtggacggaggtgcacgaagtgaagctgcgcaactatgtggtggagaaggtgcccgagaagctgggctacgccttgcgtccccaggaaaagggccactcgcccgaagacatctaccagatggctctcaaccaggccctcaaagacctcaaggcactgggctgcagaaaggcgatgaagaagtttgaaaggcacacgctcttggaatatcttctcggggaggggaacctgagccggccggccgtgcagcttctgggagacgtgatgtccgaggatggcttcttctatctcagcttcgccgaggccctccgggcccacagctgcctcagcgacagactccagtacagccgcatcgtgggtggctgggacctgctgccgcgcgcgctgctgagctcgctgtccgggcttgtgctgttgaacgcgcccgtggtggcgatgacccagggaccgcacgatgtgcacgtgcagatcgagacctctcccccggcgcggaatctgaaggtgctgaaggccgacgtggtgctgctgacggcgagcggaccggcggtgaagcgcatcaccttctcgccgccgctgccccgccacatgcaggaggcgctgcggaggctgcactacgtgccggccaccaaggtgttcctaagcttccgcaggcccttctggcgcgaggagcacattgaaggcggccactcaaacaccgatcgcccgtcgcgcatgattttctacccgccgccgcgcgagggcgcgctgctgctggcctcgtacacgtggtcggacgcggcggcagcgttcgccggcttgagccgggaagaggcgttgcgcttggcgctcgacgacgtggcggcattgcacgggcctgtcgtgcgccagctctgggacggcaccggcgtcgtcaagcgttgggcggaggaccagcacagccagggtggctttgtggtacagccgccggcgctctggcaaaccgaaaaggatgactggacggtcccttatggccgcatctactttgccggcgagcacaccgcctacccgcacggctgggtggagacggcggtcaagtcggcgctgcgcgccgccatcaagatcaacagccggaaggggcctgcatcggacacggccagccccgaggggcacgcatctgacatggaggggcaggggcatgtgcatggggtggccagcagcccctcgcatgacctggcaaaggaagaaggcagccaccctccagtccaaggccagttatctctccaaaacacgacccacacgaggacctcgcattaaagtattttcggaaaaa

SEQ ID NO: 144054 - DNA, 2261 bp, Homo sapiens
  Payload ID: 8475
  Gene Symbol: IL4I1
  Gene Name: interleukin 4 induced 1
  ENST ID: ENST00000601717
  CDS Start-End: 441-689
gtaagcggttactcactccatggctgcagcaaggagaggcggcggcggcctcggctgaagaaagaaggtgggagcggagagcgcaggcgtgaaacccaccttgtcccatccacatcaggacatcccagctggagttcaaccttcatcccttctgtggcagttaggagactgaatcaaggtccagagaaggtggaggaatcctgatactgagcggaagaaaatacacagatgtgcttccttcccagtcctgacaaatggcctttccttaagttcctcattaattcatatgaagacaacacatttggtgactaaatttggaatcagaggcttttaaagcctcccagctgctctgaccccaatatcaggaacttggcatctctgatctaacaagggcaccactaacaaggacaaagccaccatcattcaccttgattccgcacatgcccaacgatgacttctgtcctgggctaaccataaaggccatgggtgctgagagagccccccagaggcagccatgcaacaccatctcccaccgagagtcatggccccattggccctgcacctcctcgtcctcgtccccatcctcctcagcctggtggcctcccaggactggaaggctgaacgcagccaagaccccttcgagaaatgcatgcaggatcctgactatgagcagctgctcaaggtggtgacctgggggctcaatcggaccctgaagccccagagggtgattgtggttggcgctggtgtggccgggctggtggccgccaaggtgctcagcgatgctggacacaaggtcaccatcctggaggcagataacaggatcgggggccgcatcttcacctaccgggaccagaacacgggctggattggggagctgggagccatgcgcatgcccagctctcacaggatcctccacaagctctgccagggcctggggctcaacctgaccaagttcacccagtacgacaagaacacgtggacggaggtgcacgaagtgaagctgcgcaactatgtggtggagaaggtgcccgagaagctgggctacgccttgcgtccccaggaaaagggccactcgcccgaagacatctaccagatggctctcaaccaggccctcaaagacctcaaggcactgggctgcagaaaggcgatgaagaagtttgaaaggcacacgctcttggaatatcttctcggggaggggaacctgagccggccggccgtgcagcttctgggagacgtgatgtccgaggatggcttcttctatctcagcttcgccgaggccctccgggcccacagctgcctcagcgacagactccagtacagccgcatcgtgggtggctgggacctgctgccgcgcgcgctgctgagctcgctgtccgggcttgtgctgttgaacgcgcccgtggtggcgatgacccagggaccgcacgatgtgcacgtgcagatcgagacctctcccccggcgcggaatctgaaggtgctgaaggccgacgtggtgctgctgacggcgagcggaccggcggtgaagcgcatcaccttctcgccgccgctgccccgccacatgcaggaggcgctgcggaggctgcactacgtgccggccaccaaggtgttcctaagcttccgcaggcccttctggcgcgaggagcacattgaaggcggccactcaaacaccgatcgcccgtcgcgcatgattttctacccgccgccgcgcgagggcgcgctgctgctggcctcgtacacgtggtcggacgcggcggcagcgttcgccggcttgagccgggaagaggcgttgcgcttggcgctcgacgacgtggcggcattgcacgggcctgtcgtgcgccagctctgggacggcaccggcgtcgtcaagcgttgggcggaggaccagcacagccagggtggctttgtggtacagccgccggcgctctggcaaaccgaaaaggatgactggacggtcccttatggccgcatctactttgccggcgagcacaccgcctacccgcacggctgggtggagacggcggtcaagtcggcgctgcgcgccgccatcaagatcaacagccggaaggggcctgcatcggacacggccagccccgaggggcacgcatctgacatggaggggcaggggcatgtgcatggggtggccagcagcccctcgcatgacctggcaaaggaagaaggcagccaccctccagtccaaggccagttatctctccaaaacacgacccacacgaggacctcgcattaaagtattttcggaaaaa

SEQ ID NO: 144055 - DNA, 651 bp, Homo sapiens
  Payload ID: 8475
  Gene Symbol: IL4I1
  Gene Name: interleukin 4 induced 1
  ENST ID: ENST00000597295
  CDS Start-End: 439-651
gctcgcgactccccaccccccagggctccctaaagagggccacgagctgcgaaagggcgggaaaggcagttggagaagaggtaagcggttactcactccatggctgcagcaaggagaggcggcggcggcctcggctgaagaaagaaggtgggagcggagagcgcaggcgtgaaacccaccttgtcccatccacatcaggacatcccagctggagttcaaccttcatcccttctgtggcagttaggagactgaatcaaggtccagagaaggtggaggaatcctgatactgagcggaagaaaatacacagatgtgcttccttcccagtcctgacaaatggcctttccttaagttcctcattaattcatatgaagacaacacatttggtgactaaatttggaatcagaggcttttaaagacaccatctcccaccgagagtcatggccccattggccctgcacctcctcgtcctcgtccccatcctcctcagcctggtggcctcccaggactggaaggctgaacgcagccaagaccccttcgagaaatgcatgcaggatcctgactatgagcagctgctcaaggtggtgacctgggggctcaatcggaccctgaagccccagagggtgattgtggttggcgctggtgtggccggg

SEQ ID NO: 144056 - DNA, 506 bp, Homo sapiens
  Payload ID: 8475
  Gene Symbol: IL4I1
  Gene Name: interleukin 4 induced 1
  ENST ID: ENST00000593956
  CDS Start-End: 57-506
gaccgcgctgtcctgctgtcaccaagagctggagacaccatctcccaccgagagtcatggccccattggccctgcacctcctcgtcctcgtccccatcctcctcagcctggtggcctcccaggactggaaggctgaacgcagccaagaccccttcgagaaatgcatgcaggatcctgactatgagcagctgctcaaggtcaccatcctggaggcagataacaggatcgggggccgcatcttcacctaccgggaccagaacacgggctggattggggagctgggagccatgcgcatgcccagctctcacaggatcctccacaagctctgccagggcctggggctcaacctgaccaagttcacccagtacgacaagaacacgtggacggaggtgcacgaagtgaagctgcgcaactatgtggtggagaaggtgcccgagaagctgggctacgccttgcgtccccaggaaaagggccactcgcccgaagacatctaccagatggctctc

SEQ ID NO: 144057 - DNA, 747 bp, Homo sapiens
  Payload ID: 8475
  Gene Symbol: IL4I1
  Gene Name: interleukin 4 induced 1
  ENST ID: ENST00000596022
  CDS Start-End: 430-747
gctcgcgactccccaccccccagggctccctaaagagggccacgagctgcgaaagggcgggaaaggcagttggagaagagaaacccaccttgtcccatccacatcaggacatcccagctggagttcaaccttcatcccttctgtggcagttaggagactgaatcaaggtccagagaaggtggaggaatcctgatactgagcggaagaaaatacacagatgtgcttccttcccagtcctgacaaatggcctttccttaagttcctcattaattcatatgaagacaacacatttggtgactaaatttggaatcagaggcttttaaagcctcccagctgctctgaccccaatatcaggaacttggcatctctgatctaacaagggcaccactaacaaggacaaagccaccatcattcaccttgattccgcacatgcccaacgatgacttctgtcctgggctaaccataaaggccatgggtgctgagagagccccccagaggcagccatgcaccctgcacctcctcgtcctcgtccccatcctcctcagcctggtggcctcccaggactggaaggctgaacgcagccaagaccccttcgagaaatgcatgcaggatcctgactatgagcagctgctcaaggtggtgacctgggggctcaatcggaccctgaagccccagagggtgattgtggttggcgctggtgtggccgggctggtggccgccaaggtgctcagcgatgctggacacaag

SEQ ID NO: 144058 - DNA, 2407 bp, Homo sapiens
  Payload ID: 8475
  Gene Symbol: IL4I1
  Gene Name: interleukin 4 induced 1
  Uniprot ID: Q96RQ9
  ENST ID: ENST00000595948
  CDS Start-End: 622-2391
ggcccaccgtactacttctgcgcctgcgcgaccgtgattccccgctcgcgactccccaccccccagggctccctaaagagggccacgagctgcgaaagggcgggaaaggcagttggagaagaggtaagcggttactcactccatggctgcagcaaggagaggcggcggcggcctcggctgaagaaagaaggtgggagcggagagcgcaggcgtgaaacccaccttgtcccatccacatcaggacatcccagctggagttcaaccttcatcccttctgtggcagttaggagactgaatcaaggtccagagaaggtggaggaatcctgatactgagcggaagaaaatacacagatgtgcttccttcccagtcctgacaaatggcctttccttaagttcctcattaattcatatgaagacaacacatttggtgactaaatttggaatcagaggcttttaaagatgtttgaaagtttccataataaaacacttctgagaaagggggacctgcctttcacagcctcccagctgctctgaccccaatatcaggaacttggcatctctgatctaacaagggcaccactaacaaggacaaagccaccatcattcaccttgattccgcacatgcccaacgatgacttctgtcctgggctaaccataaaggccatgggtgctgagagagccccccagaggcagccatgcaccctgcacctcctcgtcctcgtccccatcctcctcagcctggtggcctcccaggactggaaggctgaacgcagccaagaccccttcgagaaatgcatgcaggatcctgactatgagcagctgctcaaggtggtgacctgggggctcaatcggaccctgaagccccagagggtgattgtggttggcgctggtgtggccgggctggtggccgccaaggtgctcagcgatgctggacacaaggtcaccatcctggaggcagataacaggatcgggggccgcatcttcacctaccgggaccagaacacgggctggattggggagctgggagccatgcgcatgcccagctctcacaggatcctccacaagctctgccagggcctggggctcaacctgaccaagttcacccagtacgacaagaacacgtggacggaggtgcacgaagtgaagctgcgcaactatgtggtggagaaggtgcccgagaagctgggctacgccttgcgtccccaggaaaagggccactcgcccgaagacatctaccagatggctctcaaccaggccctcaaagacctcaaggcactgggctgcagaaaggcgatgaagaagtttgaaaggcacacgctcttggaatatcttctcggggaggggaacctgagccggccggccgtgcagcttctgggagacgtgatgtccgaggatggcttcttctatctcagcttcgccgaggccctccgggcccacagctgcctcagcgacagactccagtacagccgcatcgtgggtggctgggacctgctgccgcgcgcgctgctgagctcgctgtccgggcttgtgctgttgaacgcgcccgtggtggcgatgacccagggaccgcacgatgtgcacgtgcagatcgagacctctcccccggcgcggaatctgaaggtgctgaaggccgacgtggtgctgctgacggcgagcggaccggcggtgaagcgcatcaccttctcgccgccgctgccccgccacatgcaggaggcgctgcggaggctgcactacgtgccggccaccaaggtgttcctaagcttccgcaggcccttctggcgcgaggagcacattgaaggcggccactcaaacaccgatcgcccgtcgcgcatgattttctacccgccgccgcgcgagggcgcgctgctgctggcctcgtacacgtggtcggacgcggcggcagcgttcgccggcttgagccgggaagaggcgttgcgcttggcgctcgacgacgtggcggcattgcacgggcctgtcgtgcgccagctctgggacggcaccggcgtcgtcaagcgttgggcggaggaccagcacagccagggtggctttgtggtacagccgccggcgctctggcaaaccgaaaaggatgactggacggtcccttatggccgcatctactttgccggcgagcacaccgcctacccgcacggctgggtggagacggcggtcaagtcggcgctgcgcgccgccatcaagatcaacagccggaaggggcctgcatcggacacggccagccccgaggggcacgcatctgacatggaggggcaggggcatgtgcatggggtggccagcagcccctcgcatgacctggcaaaggaagaaggcagccaccctccagtccaaggccagttatctctccaaaacacgacccacacgaggacctcgcattaaagtattttcggaaaaa

SEQ ID NO: 144059 - DNA, 714 bp, Homo sapiens
  Payload ID: 8475
  Gene Symbol: IL4I1
  Gene Name: interleukin 4 induced 1
  ENST ID: ENST00000596011
  CDS Start-End: 618-714
gcgactccccaccccccagggctccctaaagagggccacgagctgcgaaagggcgggaaaggcagttggagaagaggtaagcggttactcactccatggctgcagcaaggagaggcggcggcggcctcggctgaagaaagaaggtgggagcggagagcgcaggcgtgaaacccaccttgtcccatccacatcaggacatcccagctggagttcaaccttcatcccttctgtggcagttaggagactgaatcaaggtccagagaaggtggaggaatcctgatactgagcggaagaaaatacacagatgtgcttccttcccagtcctgacaaatggcctttccttaagttcctcattaattcatatgaagacaacacatttggtgactaaatttggaatcagaggcttttaaagcctcccagctgctctgaccccaatatcaggaacttggcatctctgatctaacaagggcaccactaacaaggacaaagccaccatcattcaccttgattccgcacatgcccaacgatgacttctgtcctgggctaaccataaaggccatgggtgctgagagagccccccagaggcagccatgcaacaccatctcccaccgagagtcatggccccattggccctgcacctcctcgtcctcgtccccatcctcctcagcctggtggcctcccaggactggaaggctgaacgcagccaagacccct

SEQ ID NO: 144060 - DNA, 3380 bp, Homo sapiens
  Payload ID: 8476
  Gene Symbol: IL4R
  Gene Name: interleukin 4 receptor
  Uniprot ID: P24394
  ENST ID: ENST00000170630
  CDS Start-End: 1-2433
atgcagaaggatgccagaagagaagggaacatgaaggtcttgcaggagcccacctgcgtctccgactacatgagcatctctacttgcgagtggaagatgaatggtcccaccaattgcagcaccgagctccgcctgttgtaccagctggtttttctgctctccgaagcccacacgtgtatccctgagaacaacggaggcgcggggtgcgtgtgccacctgctcatggatgacgtggtcagtgcggataactatacactggacctgtgggctgggcagcagctgctgtggaagggctccttcaagcccagcgagcatgtgaaacccagggccccaggaaacctgacagttcacaccaatgtctccgacactctgctgctgacctggagcaacccgtatccccctgacaattacctgtataatcatctcacctatgcagtcaacatttggagtgaaaacgacccggcagatttcagaatctataacgtgacctacctagaaccctccctccgcatcgcagccagcaccctgaagtctgggatttcctacagggcacgggtgagggcctgggctcagtgctataacaccacctggagtgagtggagccccagcaccaagtggcacaactcctacagggagcccttcgagcagcacctcctgctgggcgtcagcgtttcctgcattgtcatcctggccgtctgcctgttgtgctatgtcagcatcaccaagattaagaaagaatggtgggatcagattcccaacccagcccgcagccgcctcgtggctataataatccaggatgctcaggggtcacagtgggagaagcggtcccgaggccaggaaccagccaagtgcccacactggaagaattgtcttaccaagctcttgccctgttttctggagcacaacatgaaaagggatgaagatcctcacaaggctgccaaagagatgcctttccagggctctggaaaatcagcatggtgcccagtggagatcagcaagacagtcctctggccagagagcatcagcgtggtgcgatgtgtggagttgtttgaggccccggtggagtgtgaggaggaggaggaggtagaggaagaaaaagggagcttctgtgcatcgcctgagagcagcagggatgacttccaggagggaagggagggcattgtggcccggctaacagagagcctgttcctggacctgctcggagaggagaatgggggcttttgccagcaggacatgggggagtcatgccttcttccaccttcgggaagtacgagtgctcacatgccctgggatgagttcccaagtgcagggcccaaggaggcacctccctggggcaaggagcagcctctccacctggagccaagtcctcctgccagcccgacccagagtccagacaacctgacttgcacagagacgcccctcgtcatcgcaggcaaccctgcttaccgcagcttcagcaactccctgagccagtcaccgtgtcccagagagctgggtccagacccactgctggccagacacctggaggaagtagaacccgagatgccctgtgtcccccagctctctgagccaaccactgtgccccaacctgagccagaaacctgggagcagatcctccgccgaaatgtcctccagcatggggcagctgcagcccccgtctcggcccccaccagtggctatcaggagtttgtacatgcggtggagcagggtggcacccaggccagtgcggtggtgggcttgggtcccccaggagaggctggttacaaggccttctcaagcctgcttgccagcagtgctgtgtccccagagaaatgtgggtttggggctagcagtggggaagaggggtataagcctttccaagacctcattcctggctgccctggggaccctgccccagtccctgtccccttgttcacctttggactggacagggagccacctcgcagtccgcagagctcacatctcccaagcagctccccagagcacctgggtctggagccgggggaaaaggtagaggacatgccaaagcccccacttccccaggagcaggccacagacccccttgtggacagcctgggcagtggcattgtctactcagcccttacctgccacctgtgcggccacctgaaacagtgtcatggccaggaggatggtggccagacccctgtcatggccagtccttgctgtggctgctgctgtggagacaggtcctcgccccctacaacccccctgagggccccagacccctctccaggtggggttccactggaggccagtctgtgtccggcctccctggcaccctcgggcatctcagagaagagtaaatcctcatcatccttccatcctgcccctggcaatgctcagagctcaagccagacccccaaaatcgtgaactttgtctccgtgggacccacatacatgagggtctcttaggtgcatgtcctcttgttgctgagtctgcagatgaggactagggcttatccatgcctgggaaatgccacctcctggaaggcagccaggctggcagatttccaaaagacttgaagaaccatggtatgaaggtgattggccccactgacgttggcctaacactgggctgcagagactggaccccgcccagcattgggctgggctcgccacatcccatgagagtagagggcactgggtcgccgtgccccacggcaggcccctgcaggaaaactgaggcccttgggcacctcgacttgtgaacgagttgttggctgctccctccacagcttctgcagcagactgtccctgttgtaactgcccaaggcatgttttgcccaccagatcatggcccacgtggaggcccacctgcctctgtctcactgaactagaagccgagcctagaaactaacacagccatcaagggaatgacttgggcggccttgggaaatcgatgagaaattgaacttcagggagggtggtcattgcctagaggtgctcattcatttaacagagcttccttaggttgatgctggaggcagaatcccggctgtcaaggggtgttcagttaaggggagcaacagaggacatgaaaaattgctatgactaaagcagggacaatttgctgccaaacacccatgcccagctgtatggctgggggctcctcgtatgcatggaacccccagaataaatatgctcagccaccctgtgggccgggcaatccagacagcaggcataaggcaccagttaccctgcatgttggcccagacctcaggtgctagggaaggcgggaaccttgggttgagtaatgctcgtctgtgtgttttagtttcatcacctgttatctgtgtttgctgaggagagtggaacagaaggggtggagttttgtataaataaagtttctttgtctcttt

SEQ ID NO: 144061 - DNA, 3685 bp, Homo sapiens
  Payload ID: 8476
  Gene Symbol: IL4R
  Gene Name: interleukin 4 receptor
  Uniprot ID: P24394
  ENST ID: ENST00000395762
  CDS Start-End: 260-2737
ctccgcgcccaggaaagccccgcgcggcgcgggccagggaagggccacccaggggtcccccacttcccgcttgggcgcccggacggcgaatggagcaggggcgcgcagataattaaagatttacacacagctggaagaaatcatagagaagccgggcgtggtggctcatgcctataatcccagcacttttggaggctgaggcgggcagatcacttgagatcaggagttcgagaccagcctggtgccttggcatctcccaatggggtggctttgctctgggctcctgttccctgtgagctgcctggtcctgctgcaggtggcaagctctgggaacatgaaggtcttgcaggagcccacctgcgtctccgactacatgagcatctctacttgcgagtggaagatgaatggtcccaccaattgcagcaccgagctccgcctgttgtaccagctggtttttctgctctccgaagcccacacgtgtatccctgagaacaacggaggcgcggggtgcgtgtgccacctgctcatggatgacgtggtcagtgcggataactatacactggacctgtgggctgggcagcagctgctgtggaagggctccttcaagcccagcgagcatgtgaaacccagggccccaggaaacctgacagttcacaccaatgtctccgacactctgctgctgacctggagcaacccgtatccccctgacaattacctgtataatcatctcacctatgcagtcaacatttggagtgaaaacgacccggcagatttcagaatctataacgtgacctacctagaaccctccctccgcatcgcagccagcaccctgaagtctgggatttcctacagggcacgggtgagggcctgggctcagtgctataacaccacctggagtgagtggagccccagcaccaagtggcacaactcctacagggagcccttcgagcagcacctcctgctgggcgtcagcgtttcctgcattgtcatcctggccgtctgcctgttgtgctatgtcagcatcaccaagattaagaaagaatggtgggatcagattcccaacccagcccgcagccgcctcgtggctataataatccaggatgctcaggggtcacagtgggagaagcggtcccgaggccaggaaccagccaagtgcccacactggaagaattgtcttaccaagctcttgccctgttttctggagcacaacatgaaaagggatgaagatcctcacaaggctgccaaagagatgcctttccagggctctggaaaatcagcatggtgcccagtggagatcagcaagacagtcctctggccagagagcatcagcgtggtgcgatgtgtggagttgtttgaggccccggtggagtgtgaggaggaggaggaggtagaggaagaaaaagggagcttctgtgcatcgcctgagagcagcagggatgacttccaggagggaagggagggcattgtggcccggctaacagagagcctgttcctggacctgctcggagaggagaatgggggcttttgccagcaggacatgggggagtcatgccttcttccaccttcgggaagtacgagtgctcacatgccctgggatgagttcccaagtgcagggcccaaggaggcacctccctggggcaaggagcagcctctccacctggagccaagtcctcctgccagcccgacccagagtccagacaacctgacttgcacagagacgcccctcgtcatcgcaggcaaccctgcttaccgcagcttcagcaactccctgagccagtcaccgtgtcccagagagctgggtccagacccactgctggccagacacctggaggaagtagaacccgagatgccctgtgtcccccagctctctgagccaaccactgtgccccaacctgagccagaaacctgggagcagatcctccgccgaaatgtcctccagcatggggcagctgcagcccccgtctcggcccccaccagtggctatcaggagtttgtacatgcggtggagcagggtggcacccaggccagtgcggtggtgggcttgggtcccccaggagaggctggttacaaggccttctcaagcctgcttgccagcagtgctgtgtccccagagaaatgtgggtttggggctagcagtggggaagaggggtataagcctttccaagacctcattcctggctgccctggggaccctgccccagtccctgtccccttgttcacctttggactggacagggagccacctcgcagtccgcagagctcacatctcccaagcagctccccagagcacctgggtctggagccgggggaaaaggtagaggacatgccaaagcccccacttccccaggagcaggccacagacccccttgtggacagcctgggcagtggcattgtctactcagcccttacctgccacctgtgcggccacctgaaacagtgtcatggccaggaggatggtggccagacccctgtcatggccagtccttgctgtggctgctgctgtggagacaggtcctcgccccctacaacccccctgagggccccagacccctctccaggtggggttccactggaggccagtctgtgtccggcctccctggcaccctcgggcatctcagagaagagtaaatcctcatcatccttccatcctgcccctggcaatgctcagagctcaagccagacccccaaaatcgtgaactttgtctccgtgggacccacatacatgagggtctcttaggtgcatgtcctcttgttgctgagtctgcagatgaggactagggcttatccatgcctgggaaatgccacctcctggaaggcagccaggctggcagatttccaaaagacttgaagaaccatggtatgaaggtgattggccccactgacgttggcctaacactgggctgcagagactggaccccgcccagcattgggctgggctcgccacatcccatgagagtagagggcactgggtcgccgtgccccacggcaggcccctgcaggaaaactgaggcccttgggcacctcgacttgtgaacgagttgttggctgctccctccacagcttctgcagcagactgtccctgttgtaactgcccaaggcatgttttgcccaccagatcatggcccacgtggaggcccacctgcctctgtctcactgaactagaagccgagcctagaaactaacacagccatcaagggaatgacttgggcggccttgggaaatcgatgagaaattgaacttcagggagggtggtcattgcctagaggtgctcattcatttaacagagcttccttaggttgatgctggaggcagaatcccggctgtcaaggggtgttcagttaaggggagcaacagaggacatgaaaaattgctatgactaaagcagggacaatttgctgccaaacacccatgcccagctgtatggctgggggctcctcgtatgcatggaacccccagaataaatatgctcagccaccctgtgggccgggcaatccagacagcaggcataaggcaccagttaccctgcatgttggcccagacctcaggtgctagggaaggcgggaaccttgggttgagtaatgctcgtctgtgtgttttagtttcatcacctgttatctgtgtttgctgaggagagtggaacagaaggggtggagttttgtataaataaagtttctttgtctcttta

SEQ ID NO: 144062 - DNA, 3539 bp, Homo sapiens
  Payload ID: 8476
  Gene Symbol: IL4R
  Gene Name: interleukin 4 receptor
  Uniprot ID: P24394
  ENST ID: ENST00000543915
  CDS Start-End: 114-2591
aaagccccgcgcggcgcgggccagggaagggccacccaggggtcccccacttcccgcttgggcgcccggacggcgaatggagcaggggcgcgcaggtgccttggcatctcccaatggggtggctttgctctgggctcctgttccctgtgagctgcctggtcctgctgcaggtggcaagctctgggaacatgaaggtcttgcaggagcccacctgcgtctccgactacatgagcatctctacttgcgagtggaagatgaatggtcccaccaattgcagcaccgagctccgcctgttgtaccagctggtttttctgctctccgaagcccacacgtgtatccctgagaacaacggaggcgcggggtgcgtgtgccacctgctcatggatgacgtggtcagtgcggataactatacactggacctgtgggctgggcagcagctgctgtggaagggctccttcaagcccagcgagcatgtgaaacccagggccccaggaaacctgacagttcacaccaatgtctccgacactctgctgctgacctggagcaacccgtatccccctgacaattacctgtataatcatctcacctatgcagtcaacatttggagtgaaaacgacccggcagatttcagaatctataacgtgacctacctagaaccctccctccgcatcgcagccagcaccctgaagtctgggatttcctacagggcacgggtgagggcctgggctcagtgctataacaccacctggagtgagtggagccccagcaccaagtggcacaactcctacagggagcccttcgagcagcacctcctgctgggcgtcagcgtttcctgcattgtcatcctggccgtctgcctgttgtgctatgtcagcatcaccaagattaagaaagaatggtgggatcagattcccaacccagcccgcagccgcctcgtggctataataatccaggatgctcaggggtcacagtgggagaagcggtcccgaggccaggaaccagccaagtgcccacactggaagaattgtcttaccaagctcttgccctgttttctggagcacaacatgaaaagggatgaagatcctcacaaggctgccaaagagatgcctttccagggctctggaaaatcagcatggtgcccagtggagatcagcaagacagtcctctggccagagagcatcagcgtggtgcgatgtgtggagttgtttgaggccccggtggagtgtgaggaggaggaggaggtagaggaagaaaaagggagcttctgtgcatcgcctgagagcagcagggatgacttccaggagggaagggagggcattgtggcccggctaacagagagcctgttcctggacctgctcggagaggagaatgggggcttttgccagcaggacatgggggagtcatgccttcttccaccttcgggaagtacgagtgctcacatgccctgggatgagttcccaagtgcagggcccaaggaggcacctccctggggcaaggagcagcctctccacctggagccaagtcctcctgccagcccgacccagagtccagacaacctgacttgcacagagacgcccctcgtcatcgcaggcaaccctgcttaccgcagcttcagcaactccctgagccagtcaccgtgtcccagagagctgggtccagacccactgctggccagacacctggaggaagtagaacccgagatgccctgtgtcccccagctctctgagccaaccactgtgccccaacctgagccagaaacctgggagcagatcctccgccgaaatgtcctccagcatggggcagctgcagcccccgtctcggcccccaccagtggctatcaggagtttgtacatgcggtggagcagggtggcacccaggccagtgcggtggtgggcttgggtcccccaggagaggctggttacaaggccttctcaagcctgcttgccagcagtgctgtgtccccagagaaatgtgggtttggggctagcagtggggaagaggggtataagcctttccaagacctcattcctggctgccctggggaccctgccccagtccctgtccccttgttcacctttggactggacagggagccacctcgcagtccgcagagctcacatctcccaagcagctccccagagcacctgggtctggagccgggggaaaaggtagaggacatgccaaagcccccacttccccaggagcaggccacagacccccttgtggacagcctgggcagtggcattgtctactcagcccttacctgccacctgtgcggccacctgaaacagtgtcatggccaggaggatggtggccagacccctgtcatggccagtccttgctgtggctgctgctgtggagacaggtcctcgccccctacaacccccctgagggccccagacccctctccaggtggggttccactggaggccagtctgtgtccggcctccctggcaccctcgggcatctcagagaagagtaaatcctcatcatccttccatcctgcccctggcaatgctcagagctcaagccagacccccaaaatcgtgaactttgtctccgtgggacccacatacatgagggtctcttaggtgcatgtcctcttgttgctgagtctgcagatgaggactagggcttatccatgcctgggaaatgccacctcctggaaggcagccaggctggcagatttccaaaagacttgaagaaccatggtatgaaggtgattggccccactgacgttggcctaacactgggctgcagagactggaccccgcccagcattgggctgggctcgccacatcccatgagagtagagggcactgggtcgccgtgccccacggcaggcccctgcaggaaaactgaggcccttgggcacctcgacttgtgaacgagttgttggctgctccctccacagcttctgcagcagactgtccctgttgtaactgcccaaggcatgttttgcccaccagatcatggcccacgtggaggcccacctgcctctgtctcactgaactagaagccgagcctagaaactaacacagccatcaagggaatgacttgggcggccttgggaaatcgatgagaaattgaacttcagggagggtggtcattgcctagaggtgctcattcatttaacagagcttccttaggttgatgctggaggcagaatcccggctgtcaaggggtgttcagttaaggggagcaacagaggacatgaaaaattgctatgactaaagcagggacaatttgctgccaaacacccatgcccagctgtatggctgggggctcctcgtatgcatggaacccccagaataaatatgctcagccaccctgtgggccgggcaatccagacagcaggcataaggcaccagttaccctgcatgttggcccagacctcaggtgctagggaaggcgggaaccttgggttgagtaatgctcgtctgtgtgttttagtttcatcacctgttatctgtgtttgctgaggagagtggaacagaaggggtggagttttgtataaataaagtttctttgtctcttta

SEQ ID NO: 144063 - DNA, 594 bp, Homo sapiens
  Payload ID: 8476
  Gene Symbol: IL4R
  Gene Name: interleukin 4 receptor
  ENST ID: ENST00000563926
  CDS Start-End: 247-447
aaagccccgcgcggcgcgggccagggaagggccacccaggggtcccccacttcccgcttgggcgcccggacggcgaatggagcaggggcgcgcagataattaaagatttacacacagctggaagaaatcatagagaagccgggcgtggtggctcatgcctataatcccagcacttttggaggctgaggcgggcagatcacttgagatcaggagttcgagaccagcctggtgccttggcatctcccaatggggtggctttgctctgggctcctgttccctgtgagctgcctggtcctgctgcaggtggcaagctctggactcttcaggatgccgtgtggagaaaggaagagggtggaagccaggaggtctggagggaggtctggagtggaggagatgagaggctccggatccctctgggaggtagatttgaggacagattggaattgaggtgaaagacagagaaagagaagtggccaggatgactccaagatttctgacctaaactactgggaaggacgcggttgtcatttctgaaatgcagaaggatgccagaagagaagggaacatgaaggtcttgcaggagcccacctgcgt

SEQ ID NO: 144064 - DNA, 379 bp, Homo sapiens
  Payload ID: 8476
  Gene Symbol: IL4R
  Gene Name: interleukin 4 receptor
  ENST ID: ENST00000561742
  CDS Start-End: 349-379
aaagccccgcgcggcgcgggccagggaagggccacccaggggtcccccacttcccgcttgggcgcccggacggcgaatggagcaggggcgcgcagataattaaagatttacacacagctggaagaaatcatagagaagccgggcgtggtggctcatgcctataatcccagcacttttggaggctgaggcgggcagatcacttgagatcaggagttcgagaccagcctgggaagcctcttctcccactgcatctgtgatctctcctgaaatgtagcacccacacatccctgagaagctagctgcggcacgtgtgtgtgcacatgggcatgcgtgccttggcatctcccaatggggtggctttgctctgggctcctgttcc

SEQ ID NO: 144065 - DNA, 529 bp, Homo sapiens
  Payload ID: 8476
  Gene Symbol: IL4R
  Gene Name: interleukin 4 receptor
  ENST ID: ENST00000566117
  CDS Start-End: 169-529
gcagagttctccgctgggcgtgacctcgggctacggcgtgggaggaagcgcgcggcaagacacccagcgaggtgctggggtcgcccccaggagaggacggcggctcggactgtccggcggcggcggcggggacagcgacaggggcgcgaggtgccttggcatctcccaatggggtggctttgctctgggctcctgttccctgtgagctgcctggtcctgctgcaggtggcaagctctgggaacatgaaggtcttgcaggagcccacctgcgtctccgactacatgagcatctctacttgcgagtggaagatgaatggtcccaccaattgcagcaccgagctccgcctgttgtaccagctggtttttctgctctccgaagcccacacgtgtatccctgagaacaacggaggcgcggggtgcgtgtgccacctgctcatggatgacgtggtcagtgcggataactatacactggacctgtgggctgggcagcagctgctgtggaagggctccttcaagcccagcgagcatg

SEQ ID NO: 144066 - DNA, 2900 bp, Homo sapiens
  Payload ID: 8476
  Gene Symbol: IL4R
  Gene Name: interleukin 4 receptor
  ENST ID: ENST00000568746
  CDS Start-End: 106-306
gcgcggcgcgggccagggaagggccacccaggggtcccccacttcccgcttgggcgcccggacggcgaatggagcaggggcgcgcaggtgccttggcatctcccaatggggtggctttgctctgggctcctgttccctgtgagctgcctggtcctgctgcaggtggcaagctctggactcttcaggatgccgtgtggagaaaggaagagggtggaagccaggaggtctggagggaggtctggagtggaggagatgagaggctccggatccctctgggaggtagatttgaggacagattggaattgaggtgaaagacagagaaagagaagtggccaggatgactccaagatttctgacctaaactactgggaaggacgcggttgtcatttctgaaatgcagaaggatgccagaagagaagggaacatgaaggtcttgcaggagcccacctgcgtctccgactacatgagcatctctacttgcgagtggaagatgaatggtcccaccaattgcagcaccgagctccgcctgttgtaccagctggtttttctgctctccgaagcccacacgtgtatccctgagaacaacggaggcgcggggtgcgtgtgccacctgctcatggatgacgtggtcagtgcggataactatacactggacctgtgggctgggcagcagctgctgtggaagggctccttcaagcccagcgagcatgtgaaacccagggccccaggaaacctgacagttcacaccaatgtctccgacactctgctgctgacctggagcaacccgtatccccctgacaattacctgtataatcatctcacctatgcagtcaacatttggagtgaaaacgacccggcagatttcagaatctataacgtgacctacctagaaccctccctccgcatcgcagccagcaccctgaagtctgggatttcctacagggcacgggtgagggcctgggctcagtgctataacaccacctggagtgagtggagccccagcaccaagtggcacaactcctacagggagcccttcgagcagcacctcctgctgggcgtcagcgtttcctgcattgtcatcctggccgtctgcctgttgtgctatgtcagcatcaccaagattaagaaagaatggtgggatcagattcccaacccagcccgcagccgcctcgtggctataataatccaggatgctcaggggtcacagtgggagaagcggtcccgaggccaggaaccagccaagtgcccacactggaagaattgtcttaccaagctcttgccctgttttctggagcacaacatgaaaagggatgaagatcctcacaaggctgccaaagagatgcctttccagggctctggaaaatcagcatggtgcccagtggagatcagcaagacagtcctctggccagagagcatcagcgtggtgcgatgtgtggagttgtttgaggccccggtggagtgtgaggaggaggaggaggtagaggaagaaaaagggagcttctgtgcatcgcctgagagcagcagggatgacttccaggagggaagggagggcattgtggcccggctaacagagagcctgttcctggacctgctcggagaggagaatgggggcttttgccagcaggacatgggggagtcatgccttcttccaccttcgggaagtacgagtgctcacatgccctgggatgagttcccaagtgcagggcccaaggaggcacctccctggggcaaggagcagcctctccacctggagccaagtcctcctgccagcccgacccagagtccagacaacctgacttgcacagagacgcccctcgtcatcgcaggcaaccctgcttaccgcagcttcagcaactccctgagccagtcaccgtgtcccagagagctgggtccagacccactgctggccagacacctggaggaagtagaacccgagatgccctgtgtcccccagctctctgagccaaccactgtgccccaacctgagccagaaacctgggagcagatcctccgccgaaatgtcctccagcatggggcagctgcagcccccgtctcggcccccaccagtggctatcaggagtttgtacatgcggtggagcagggtggcacccaggccagtgcggtggtgggcttgggtcccccaggagaggctggttacaaggccttctcaagcctgcttgccagcagtgctgtgtccccagagaaatgtgggtttggggctagcagtggggaagaggggtataagcctttccaagacctcattcctggctgccctggggaccctgccccagtccctgtccccttgttcacctttggactggacagggagccacctcgcagtccgcagagctcacatctcccaagcagctccccagagcacctgggtctggagccgggggaaaaggtagaggacatgccaaagcccccacttccccaggagcaggccacagacccccttgtggacagcctgggcagtggcattgtctactcagcccttacctgccacctgtgcggccacctgaaacagtgtcatggccaggaggatggtggccagacccctgtcatggccagtccttgctgtggctgctgctgtggagacaggtcctcgccccctacaacccccctgagggccccagacccctctccaggtggggttccactggaggccagtctgtgtccggcctccctggcaccctcgggcatctcagagaagagtaaatcctcatcatccttccatcctgcccctggcaatgctcagagctcaagccagacccccaaaatcgtgaactttgtctccgtgggacccacatacatgagggtctcttaggtgcatgtcctcttgttgctgagtctgcagatgaggactagggcttatccatgcctgggaaatgccacctcct

SEQ ID NO: 144067 - DNA, 688 bp, Homo sapiens
  Payload ID: 8476
  Gene Symbol: IL4R
  Gene Name: interleukin 4 receptor
  ENST ID: ENST00000566318
  CDS Start-End: 102-476
ggcgcgggccagggaagggccacccaggggtcccccacttcccgcttgggcgcccggacggcgaatggagcaggggcgcgcaggtgccttggcatctcccaatggggtggctttgctctgggctcctgttccctgtgagctgcctggtcctgctgcaggtggcaagctctgggaacatgaaggtcttgcaggagcccacctgcgtctccgactacatgagcatctctacttgcgagtggaagatgaatggtcccaccaattgcagcaccgagctccgcctgttgtaccagctggtttttctgctctccgaagcccacacgtgtatccctgagaacaacggaggcgcggggtgcgtgtgccacctgctcatggatgacgtggtcagtgcggataactatacactggacctgtgggctgggcagcagctgctgtggaagggctccttcaagcccagcgagcatgttcagaatctataacgtgacctacctagaaccctccctccgcatcgcagccagcaccctgaagtctgggatttcctacagggcacgggtgagggcctgggctcagtgctataacaccacctggagtgagtggagccccagcaccaagtggcacaactcctacagggagcccttcgagcagcacctcctgctgggcgtcagcgtttcctgcattgtcatcctggccg

SEQ ID NO: 144068 - DNA, 531 bp, Homo sapiens
  Payload ID: 8476
  Gene Symbol: IL4R
  Gene Name: interleukin 4 receptor
  ENST ID: ENST00000562968
  CDS Start-End: 1-148
gtgcgtgtgccacctgctcatggatgacgtggtcagtgcggataactatacactggacctgtgggctgggcagcagctgctgtggaagggctccttcaagcccagcgagcatgtcctcccacctttgaaacggagctggtcgcagtagaccaccaagcccccttcagcccagctgtttccacccctgaacttaagtgcccaggaaggcgtattgagatgaggtgtgcttgctggaaggcatgcctgctgctgattgaaaaccgaactgggaacattccttccattctgtgtccactggtcagctgctgcggctttggatggtcttgaccgtggaaggctgaccttcttctggtacccggagtccctgcaggaatcccccttgagcttgctgggctgtggtgacaggagtttaaaacatgcgttgtattccagtgatgcatgatatgacatgcatcacaggaataaaaacctgaggtctcatggatatgattgcttcaaaggagaccaagttttaaaacagatgaatcaaaa

SEQ ID NO: 144069 - DNA, 541 bp, Homo sapiens
  Payload ID: 8476
  Gene Symbol: IL4R
  Gene Name: interleukin 4 receptor
  ENST ID: ENST00000563002
  CDS Start-End: 181-541
cggacggcgaatggagcaggggcgcgcaggtgcccccacaggcctcctcacctcttctcgtttgcttaagaaatctgaggtctgcgctaaagccagcctgggtgctgtaacctctcggccgaggatggtgcccagctgggcttgcatctggagttggaggaagtgccttggcatctcccaatggggtggctttgctctgggctcctgttccctgtgagctgcctggtcctgctgcaggtggcaagctctgggaacatgaaggtcttgcaggagcccacctgcgtctccgactacatgagcatctctacttgcgagtggaagatgaatggtcccaccaattgcagcaccgagctccgcctgttgtaccagctggtttttctgctctccgaagcccacacgtgtatccctgagaacaacggaggcgcggggtgcgtgtgccacctgctcatggatgacgtggtcagtgcggataactatacactggacctgtgggctgggcagcagctgctgtggaagggctccttcaagcccagcgagcatg

SEQ ID NO: 144070 - DNA, 518 bp, Homo sapiens
  Payload ID: 8476
  Gene Symbol: IL4R
  Gene Name: interleukin 4 receptor
  ENST ID: ENST00000562142
  CDS Start-End: 328-518
aggaaagccccgcgcggcgcgggccagggaagggccacccaggggtcccccacttcccgcttgggcgcccggacggcgaatggagcaggggcgcgcaggtaggatccggggcccgcgcgcggatcgggttgcgaaggtatcgcccgggcacgccggctgagggcgttcgggaagggctcggccgccggcggggaccacggggaccaccccgactccgagcggggcccgagcccgcgactctcggtgcgcgcggagcagcgcccggttccgtccttgccgccgaacggcagcggaggcgcgaggcccggggtgccttggcatctcccaatggggtggctttgctctgggctcctgttccctgtgagctgcctggtcctgctgcaggtggcaagctctgggaacatgaaggtcttgcaggagcccacctgcgtctccgactacatgagcatctctacttgcgagtggaagatgaatggtcccaccaattgcagcaccgagctccgcctgttgtaccagct

SEQ ID NO: 144071 - DNA, 424 bp, Homo sapiens
  Payload ID: 8476
  Gene Symbol: IL4R
  Gene Name: interleukin 4 receptor
  ENST ID: ENST00000565352
  CDS Start-End: 1-402
cccagcaccaagtggcacaactcctacagggagcccttcgagcagcacctcctgctgggcgtcagcgtttcctgcattgtcatcctggccgtctgcctgttgtgctatgtcagcatcaccaagattaagaaagaatggtgggatcagattcccaacccagcccgcagccgcctcgtggctataataatccaggatgctcaggggtcacagtgggagaagcggtcccgaggcccttgggcacctcgacttgtgaacgagttgttggctgctccctccacagcttctgcagcagactgtccctgttgtaactgcccaaggcatgttttgcccaccagatcatggcccacgtggaggcccacctgcctctgtctcactgaactagaagccgagcctagaaactaacacagccatcaagggaatgact

SEQ ID NO: 144072 - DNA, 579 bp, Homo sapiens
  Payload ID: 8476
  Gene Symbol: IL4R
  Gene Name: interleukin 4 receptor
  ENST ID: ENST00000565179
  CDS Start-End: 1-579
ataacgtgacctacctagaaccctccctccgcatcgcagccagcaccctgaagtctgggatttcctacagggcacgggtgagggcctgggctcagtgctataacaccacctggagtgagtggagccccagcaccaagtggcacaactcctacagggagcccttcgagcagcacctcctgctgggcgtcagcgtttcctgcattgtcatcctggccgtctgcctgttgtgctatgtcagcatcaccaagattaagaaagaatggtgggatcagattcccaacccagcccgcagccgcctcgtggctataataatccaggatgctcaggggtcacagtgggagaagcggtcccgaggccaggaaccagccaagtgcccccttcaagggacggcaggaggaggggtgttctggaaacgtggactgctggccaagccccctgagtttcactggtgtgtcagacactggaagaattgtcttaccaagctcttgccctgttttctggagcacaacatgaaaagggatgaagatcctcacaaggctgccaaagagatgcctttccagggctctggaaaatcagcat

SEQ ID NO: 144073 - DNA, 201 bp, Homo sapiens
  Payload ID: 8476
  Gene Symbol: IL4R
  Gene Name: interleukin 4 receptor
  ENST ID: ENST00000628578
  CDS Start-End: 1-201
atggggtggctttgctctgggctcctgttccctgtgagctgcctggtcctgctgcaggtggcaagctctggactcttcaggatgccgtgtggagaaaggaagagggtggaagccaggaggtctggagggaggtctggagtggaggagatgagaggctccggatccctctgggaggtagatttgaggacagattggaattga

SEQ ID NO: 144074 - DNA, 816 bp, Homo sapiens
  Payload ID: 8477
  Gene Symbol: IL5
  Gene Name: interleukin 5
  Uniprot ID: P05113
  ENST ID: ENST00000231454
  CDS Start-End: 45-449
atgcactttctttgccaaaggcaaacgcagaacgtttcagagccatgaggatgcttctgcatttgagtttgctagctcttggagctgcctacgtgtatgccatccccacagaaattcccacaagtgcattggtgaaagagaccttggcactgctttctactcatcgaactctgctgatagccaatgagactctgaggattcctgttcctgtacataaaaatcaccaactgtgcactgaagaaatctttcagggaataggcacactggagagtcaaactgtgcaagggggtactgtggaaagactattcaaaaacttgtccttaataaagaaatacattgacggccaaaaaaaaaagtgtggagaagaaagacggagagtaaaccaattcctagactacctgcaagagtttcttggtgtaatgaacaccgagtggataatagaaagttgagactaaactggtttgttgcagccaaagattttggaggagaaggacattttactgcagtgagaatgagggccaagaaagagtcaggccttaattttcagtataatttaacttcagagggaaagtaaatatttcaggcatactgacactttgccagaaagcataaaattcttaaaatatatttcagatatcagaatcattgaagtattttcctccaggcaaaattgatatacttttttcttatttaacttaacattctgtaaaatgtctgttaacttaatagtatttatgaaatggttaagaatttggtaaattagtatttatttaatgttatgttgtgttctaataaaacaaaaatagacaactgttc

SEQ ID NO: 144075 - DNA, 276 bp, Homo sapiens
  Payload ID: 8477
  Gene Symbol: IL5
  Gene Name: interleukin 5
  ENST ID: ENST00000450655
  CDS Start-End: 124-276
gggcagcggacttccggatctttgctggggatgggcagcctggagaggcactgacttttggaaggggagaccaagacctgtgacggatggcgcttcccaaagcttgatcctgggactcctggaatgggggtagtggtggggtggattggagacccaggaagcgggactctgaggattcctgttcctgtacataaaaatcaccaactgtgcactgaagaaatctttcagggaataggcacactggagagtcaaactgtgcaagggggtactgtggaa

SEQ ID NO: 144076 - DNA, 2001 bp, Homo sapiens
  Payload ID: 8478
  Gene Symbol: IL5RA
  Gene Name: interleukin 5 receptor, alpha
  Uniprot ID: Q01344
  ENST ID: ENST00000256452
  CDS Start-End: 251-1513
ccgctgcttctcatcgcatggccaccgcatttctcaggccaggcacattgagcattggtcctgtgcctgacgctatgctagatgctggggttgcagccacgagcatagacacgacagacacggtcctcgccatcttctgttgagtactggtcggaacaagaggatcgtctgtagacaggctacagattgttttagattgaagtttcctgtcatgttcactcatctttaaatcctcatagtgaaaaaggatatgatcatcgtggcgcatgtattactcatccttttgggggccactgagatactgcaagctgacttacttcctgatgaaaagatttcacttctcccacctgtcaatttcaccattaaagttactggtttggctcaagttcttttacaatggaaaccaaatcctgatcaagagcaaaggaatgttaatctagaatatcaagtgaaaataaacgctccaaaagaagatgactatgaaaccagaatcactgaaagcaaatgtgtaaccatcctccacaaaggcttttcagcaagtgtgcggaccatcctgcagaacgaccactcactactggccagcagctgggcttctgctgaacttcatgccccaccagggtctcctggaacctcaattgtgaatttaacttgcaccacaaacactacagaagacaattattcacgtttaaggtcataccaagtttcccttcactgcacctggcttgttggcacagatgcccctgaggacacgcagtattttctctactataggtatggctcttggactgaagaatgccaagaatacagcaaagacacactggggagaaatatcgcatgctggtttcccaggacttttatcctcagcaaagggcgtgactggcttgcggtgcttgttaacggctccagcaagcactctgctatcaggccctttgatcagctgtttgcccttcacgccattgatcaaataaatcctccactgaatgtcacagcagagattgaaggaactcgtctctctatccaatgggagaaaccagtgtctgcttttccaatccattgctttgattatgaagtaaaaatacacaatacaaggaatggatatttgcagatagaaaaattgatgaccaatgcattcatctcaataattgatgatctttctaagtacgatgttcaagtgagagcagcagtgagctccatgtgcagagaggcagggctctggagtgagtggagccaacctatttatgtgggaaatgatgaacacaagcccttgagagagtggtttgtcattgtgattatggcaaccatctgcttcatcttgttaattctctcgcttatctgtaaaatatgtcatttatggatcaagttgtttccaccaattccagcaccaaaaagtaatatcaaagatctctttgtaaccactaactatgagaaagctgggtccagtgagacggaaattgaagtcatctgttatatagagaagcctggagttgagaccctggaggattctgtgttttgactgtcactttggcatcctctgatgaactcacacatgcctcagtgcctcagtgaaaagaacagggatgctggctcttggctaagaggtgttcagaatttaggcaacactcaatttacctgcgaagcaatacacccagacacaccagtcttgtatctcttaaaagtatggatgcttcatccaaatcgcctcacctacagcagggaagttgactcatccaagcattttgccatgttttttctccccatgccgtacagggtagcacctcctcacctgccaatctttgcaatttgcttgactcacctcagacttttcattcacaacagacagcttttaaggctaacgtccagctgtatttacttctggctgtgcccgtttggctgtttaagctgccaattgtagcactcagctaccatctgaggaagaaagcattttgcatcagcctggagtgaaccatgaacttggattcaagactgtcttttctatagcaa

SEQ ID NO: 144077 - DNA, 1328 bp, Homo sapiens
  Payload ID: 8478
  Gene Symbol: IL5RA
  Gene Name: interleukin 5 receptor, alpha
  Uniprot ID: Q01344
  ENST ID: ENST00000311981
  CDS Start-End: 251-1258
ccgctgcttctcatcgcatggccaccgcatttctcaggccaggcacattgagcattggtcctgtgcctgacgctatgctagatgctggggttgcagccacgagcatagacacgacagacacggtcctcgccatcttctgttgagtactggtcggaacaagaggatcgtctgtagacaggctacagattgttttagattgaagtttcctgtcatgttcactcatctttaaatcctcatagtgaaaaaggatatgatcatcgtggcgcatgtattactcatccttttgggggccactgagatactgcaagctgacttacttcctgatgaaaagatttcacttctcccacctgtcaatttcaccattaaagttactggtttggctcaagttcttttacaatggaaaccaaatcctgatcaagagcaaaggaatgttaatctagaatatcaagtgaaaataaacgctccaaaagaagatgactatgaaaccagaatcactgaaagcaaatgtgtaaccatcctccacaaaggcttttcagcaagtgtgcggaccatcctgcagaacgaccactcactactggccagcagctgggcttctgctgaacttcatgccccaccagggtctcctggaacctcaattgtgaatttaacttgcaccacaaacactacagaagacaattattcacgtttaaggtcataccaagtttcccttcactgcacctggcttgttggcacagatgcccctgaggacacgcagtattttctctactataggtatggctcttggactgaagaatgccaagaatacagcaaagacacactggggagaaatatcgcatgctggtttcccaggacttttatcctcagcaaagggcgtgactggcttgcggtgcttgttaacggctccagcaagcactctgctatcaggccctttgatcagctgtttgcccttcacgccattgatcaaataaatcctccactgaatgtcacagcagagattgaaggaactcgtctctctatccaatgggagaaaccagtgtctgcttttccaatccattgctttgattatgaagtaaaaatacacaatacaaggaatggatatttgcagatagaaaaattgatgaccaatgcattcatctcaataattgatgatctttctaagtacgatgttcaagtgagagcagcagtgagctccatgtgcagagaggcagggctctggagtgagtggagccaacctatttatgtggggttctcaagataaaggagataacatccagctttcctgccccacaccgtatctgaaataaaaacaacagcagggatagcagatt

SEQ ID NO: 144078 - DNA, 1828 bp, Homo sapiens
  Payload ID: 8478
  Gene Symbol: IL5RA
  Gene Name: interleukin 5 receptor, alpha
  Uniprot ID: Q01344
  ENST ID: ENST00000383846
  CDS Start-End: 549-1556
agtacccacggaaaacttgtttaccttgtcaccatgagtaaaagttaattcccactcctgaagagagcaaaccaactctgaaagagagtgaaaatgcagacaagacagttatcagataatggctatctggacgagagattctttcgtttgacagcagtttggttgttgggagttccagttcagctcctgcacagttgctctgtacaaatcctcctccatatttgcttagagaaaacgtgttgccatcccatcatgaaggaagctgcctgagagtttttaaccattacagccgtgatgatgaaagagtgaagaaccgcctctaagttaaaaagtgcacccagagataaggttcgttctcaatgccctgccgctgcttctcatcgcatggccaccgcatttctcaggccaggcacattgagcattggtcctgtgcctgacgctatgctagatgctggggttgcagccacgagcatagacacgacagacacggtcctcgccatcttctgttgagtactggtcggaacaagaggatcgtctgtagacaggatatgatcatcgtggcgcatgtattactcatccttttgggggccactgagatactgcaagctgacttacttcctgatgaaaagatttcacttctcccacctgtcaatttcaccattaaagttactggtttggctcaagttcttttacaatggaaaccaaatcctgatcaagagcaaaggaatgttaatctagaatatcaagtgaaaataaacgctccaaaagaagatgactatgaaaccagaatcactgaaagcaaatgtgtaaccatcctccacaaaggcttttcagcaagtgtgcggaccatcctgcagaacgaccactcactactggccagcagctgggcttctgctgaacttcatgccccaccagggtctcctggaacctcaattgtgaatttaacttgcaccacaaacactacagaagacaattattcacgtttaaggtcataccaagtttcccttcactgcacctggcttgttggcacagatgcccctgaggacacgcagtattttctctactataggtatggctcttggactgaagaatgccaagaatacagcaaagacacactggggagaaatatcgcatgctggtttcccaggacttttatcctcagcaaagggcgtgactggcttgcggtgcttgttaacggctccagcaagcactctgctatcaggccctttgatcagctgtttgcccttcacgccattgatcaaataaatcctccactgaatgtcacagcagagattgaaggaactcgtctctctatccaatgggagaaaccagtgtctgcttttccaatccattgctttgattatgaagtaaaaatacacaatacaaggaatggatatttgcagatagaaaaattgatgaccaatgcattcatctcaataattgatgatctttctaagtacgatgttcaagtgagagcagcagtgagctccatgtgcagagaggcagggctctggagtgagtggagccaacctatttatgtggggttctcaagataaaggagataacatccagctttcctgccccacaccgtatctgaaataaaaacaacagcagggatagcagattacatgtgttttttaatttttatttattttgccaagcactatgctaaatacataatcttagtcctatcaaaaaacttgtttggaaagtttaggtaattggcttaactctgttctgcatggccaacaagtggcagggatggggctctaaccccagattaactgactctagcacttgatctctggacactctggcatggtgggac

SEQ ID NO: 144079 - DNA, 5521 bp, Homo sapiens
  Payload ID: 8478
  Gene Symbol: IL5RA
  Gene Name: interleukin 5 receptor, alpha
  ENST ID: ENST00000418488
  CDS Start-End: 645-1622
aaacaaaacagaaatgcaacgctttagagtacccacggaaaacttgtttaccttgtcaccatgagtaaaagttaattcccactcctgaagagagcaaaccaactctgaaagagagtgaaaatgcagacaagacagttatcagataatggctatctggacgagagattctttcgtttgacagcagtttggttgttgggagttccagttcagctcctgcacagttgctctgtacaaatcctcctccatatttgcttagagaaaacgtgttgccatcccatcatgaaggaagctgcctgagagtttttaaccattacagccgtgatgatgaaagagtgaagaaccgcctctaagttaaaaagtgcacccagagataaggttcgttctcaatgccctgccgctgcttctcatcgcatggccaccgcatttctcaggccaggcacattgagcattggtcctgtgcctgacgctatgctagatgctggggttgcagccacgagcatagacacgacagacacggtcctcgccatcttctgttgagtactggtcggaacaagaggatcgtctgtagacaggctacagattgttttagattgaagtttcctgtcatgttcactcatctttaaatcctcatagtgaaaaaggatatgatcatcgtggcgcatgtattactcatccttttgggggccactgagatactgcaagctgacttacttcctgatgaaaagatttcacttctcccacctgtcaatttcaccattaaagttactggtttggctcaagttcttttacaatggaaaccaaatcctgatcaagagcaaaggaatgttaatctagaatatcaagtgaaaataaacgctccaaaagaagatgactatgaaaccagaatcactgaaagcaaatgtgtaaccatcctccacaaaggcttttcagcaagtgtgcggaccatcctgcagaacgaccactcactactggccagcagctgggcttctgctgaacttcatgccccaccagggtctcctggaacctcaattgtgaatttaacttgcaccacaaacactacagaagacaattattcacgtttaaggtcataccaagtttcccttcactgcacctggcttgttggcacagatgcccctgaggacacgcagtattttctctactataggtatggctcttggactgaagaatgccaagaatacagcaaagacacactggggagaaatatcgcatgctggtttcccaggacttttatcctcagcaaagggcgtgactggcttgcggtgcttgttaacggctccagcaagcactctgctatcaggccctttgatcagctgtttgcccttcacgccattggaaatgatgaacacaagcccttgagagagtggtttgtcattgtgattatggcaaccatctgcttcatcttgttaattctctcgcttatctgtaaaatatgtcatttatggatcaagttgtttccaccaattccagcaccaaaaagtaatatcaaagatctctttgtaaccactaactatgagaaagctgggtccagtgagacggaaattgaagtcatctgttatatagagaagcctggagttgagaccctggaggattctgtgttttgactgtcactttggcatcctctgatgaactcacacatgcctcagtgcctcagtgaaaagaacagggatgctggctcttggctaagaggtgttcagaatttaggcaacactcaatttacctgcgaagcaatacacccagacacaccagtcttgtatctcttaaaagtatggatgcttcatccaaatcgcctcacctacagcagggaagttgactcatccaagcattttgccatgttttttctccccatgccgtacagggtagcacctcctcacctgccaatctttgcaatttgcttgactcacctcagacttttcattcacaacagacagcttttaaggctaacgtccagctgtatttacttctggctgtgcccgtttggctgtttaagctgccaattgtagcactcagctaccatctgaggaagaaagcattttgcatcagcctggagtgaaccatgaacttggattcaagactgtcttttctatagcaagtgagagccacaaattcctcacccccctacattctagaatgatctttttctaggtagattgtgtatgtgtgtgtatgagagagagagagagagagagagagagagaaattatctcaagctccagaggcctgatccaggatacatcatttgaaaccaactaatttaaaagcataatagagctaatatatcaccccatatcaaaagagacgacagattttgttcaaatattatattcttgaaggaagccttaatattctggaaatgtgctgaggaagtcattgagcataattcaatcatgaaagggaccactgaatcaagaatgaactttctgaagagatgtttgctgccaaagacttcagaacaacttgttggtcaagtaatgccagatcaatcctagtctctcaagtttggaaaagtttctacaaggccattccatcaaatatcccaatatacacagaaattcttcttcctaacatcttcatatatgagtctgcatccagattggaggcctttgtggtgggtggtggactgcaggtggaaccaagcacaggtgtgccctgggcagaggtgggcaagaggaaggaacccaaacagtgctgattccacatggcccttggtcaagaagctgaaggcctagaaaggaggtaacagtgcccagaatccccacctggcacactctttaaatgctttctggaggtgttttagtcagttttgatccatcggtggggacacactgactaccatatatttccaggtttgtttgttttcttaactaacctgtaattatccactgtaactagcagagggttgaaccctgggtaataggcacagaaacatcttgaatcttgacaagcctgcactgtcttatagtaatctgtattactgtcccattttatagttgcagttactaaggttcagagaagttgataggaaatggcatagtgaggagttgaataccaggctcaggtaaaagtgaccccagaaatgtgcagaggagtgtcagggaaagctgaggcctgcttaggggtgtggctgagaaggcaacacccatggaggtgctgcaatagttggcaaaatgtttaaaatgtttggtcactcaaatgattcataatctcaaacctgtttttgtttttttttttttttttttttgtggggtgggtggtggagacagtcttgttctgtctcccaggctagagtgtagtgatgtgatcttagctcactacaacctccctgtcctgggctcaagccatcctcctccctcaccctcccaagtagctgggactacaggtgcataacaccattcccagctcttttttgtatttttttttgtaaagctggggttttgccatgctgtctaggttcatctcgaactcctgggctcaagcgatacaccggcctcagccttccaaagtactgggattacaggcatgaaccaccattcctggccaggaaactgtatttgtaatgaacaccttaggtcagaatcagaggcgcctggagggctccttaagacacagaggagtgggctccattcttagagtctctaactgaataggtctgggtgaggtctgaaaagctgcgtttctaacaagttctcaggtgatgctcatgctgctggtctccaggacacactcggagaactgctgctccaggagagtcttatgaataccaaaatttgaaaatcagccgctgaaggaagatgtgacagaaaagtcctgtccccagaaaactgtccttttggggcggcttggagcaccctgtctgatctctttcaaaccacaacccagacagttggcattgtggaaactgcctctgcttaggaggcaggaacagaagcagggagctccccctccacaaatgtggccagctcttcagtgcttggtgtggtgcccacttcagactcctccctccactcagcagccatagatcacctgggctctgtggagctccttgccacacttccctgagctggtaccgttatctggcccttggtatatgtgtttcaggagcaacacaaagtagcccattggcctccttggtggattgggaactccttcctcccttcttgccctgtgcaactcatagtcattctttgggaacccgtaaccatcatcacttcctccatgaagccttcaaaagcagagttggttgatcccgcctctggattctcattctgggcctcatacccgtgttagagctactgcattgtagaatataccattaacagctgggaggcctcccctctagactgcggcttccaggaggatggagcttgtgtgaaatacgtctttttatctgcagtgtctaggacagtatctgacttaagaaaatataaatgtttcttaaaccctctgtcagccctgatacggcaccttgtatataggttagactgaacagtatttggcagagatcctcaaggcctacaataatgacagggggaggaagctgggtatctaatgagaatgcggttagttagaagcaaccaggagacacatgtgcctaacaactgggctactgcaacctggatgtttttgctgccaaagtgtctaaatggttatgtataaattgctgtgtaagaggcatttcagaagtggctcactgtgagtggtctatactgttctcaccagccttgtcatagcaagtcaaagagtttgaaattcacttaacagtaaacaccatcagcagcaggttgatgtaaggtaaagtcatgatattggctcccatctcttgccatctctcactaggacgagtgtagagagtcacttttctcctagagcctccacagccacgggatcagaacaaacatgcttttccaagatatccgttccaatagggatttttagcccaatttctttccttggcatttggaattcactgcgtgcagcatgggggagtgctggggagactggagggtgaaggtcacatttgccaacagcccgaccacctgagcctcattgaaatgcctcagacctcaagctattcatgcaggctggggaagaatccacgtgggcaaagaacatcctgattaaaaatccaaacgttttcatggtgagacttctatgtgtcaggaccatctgctggtggaattaagaagcctgaggtgctaatttgttaaagaaaaagtagatatctggaagtgagaacagagaactgaaaacaatctctgatggcacaagtaaaggtgaaaaacctaattagaataggacttggtgctagcctaaggactgtagctattcctgcttctacatccttcaaattgagtaccagggtgcaaattttttcaaaaccattccttcctttggaattttgtattgtactataagacaatcatgcttatctcctgttttgtaggtaatagatgtgaatataaatatgtttcagaatgagaaatattaaacataaatgacagtg

SEQ ID NO: 144080 - DNA, 2252 bp, Homo sapiens
  Payload ID: 8478
  Gene Symbol: IL5RA
  Gene Name: interleukin 5 receptor, alpha
  Uniprot ID: Q01344
  ENST ID: ENST00000438560
  CDS Start-End: 576-1712
aaacaaaacagaaatgcaacgctttagagtacccacggaaaacttgtttaccttgtcaccatgagtaaaagttaattcccactcctgaagagagcaaaccaactctgaaagagagtgaaaatgcagacaagacagttatcagataatggctatctggacgagagattctttcgtttgacagcagtttggttgttgggagttccagttcagctcctgcacagttgctctgtacaaatcctcctccatatttgcttagagaaaacgtgttgccatcccatcatgaaggaagctgcctgagagtttttaaccattacagccgtgatgatgaaagagtgaagaaccgcctctaagttaaaaagtgcacccagagataaggttcgttctcaatgccctgccgctgcttctcatcgcatggccaccgcatttctcaggccaggcacattgagcattggtcctgtgcctgacgctatgctagatgctggggttgcagccacgagcatagacacgacagacacggtcctcgccatcttctgttgagtactggtcggaacaagaggatcgtctgtagacaggatatgatcatcgtggcgcatgtattactcatccttttgggggccactgagatactgcaagctgacttacttcctgatgaaaagatttcacttctcccacctgtcaatttcaccattaaagttactggtttggctcaagttcttttacaatggaaaccaaatcctgatcaagagcaaaggaatgttaatctagaatatcaagtgaaaataaacgctccaaaagaagatgactatgaaaccagaatcactgaaagcaaatgtgtaaccatcctccacaaaggcttttcagcaagtgtgcggaccatcctgcagaacgaccactcactactggccagcagctgggcttctgctgaacttcatgccccaccagggtctcctggaacctcaattgtgaatttaacttgcaccacaaacactacagaagacaattattcacgtttaaggtcataccaagtttcccttcactgcacctggcttgttggcacagatgcccctgaggacacgcagtattttctctactataggtatggctcttggactgaagaatgccaagaatacagcaaagacacactggggagaaatatcgcatgctggtttcccaggacttttatcctcagcaaagggcgtgactggcttgcggtgcttgttaacggctccagcaagcactctgctatcaggccctttgatcagctgtttgcccttcacgccattgatcaaataaatcctccactgaatgtcacagcagagattgaaggaactcgtctctctatccaatgggagaaaccagtgtctgcttttccaatccattgctttgattatgaagtaaaaatacacaatacaaggaatggatatttgcagatagaaaaattgatgaccaatgcattcatctcaataattgatgatctttctaagtacgatgttcaagtgagagcagcagtgagctccatgtgcagagaggcagggctctggagtgagtggagccaacctatttatgtgggaaatgatgaacacaagcccttgagagagtggtttgtcattgtgattatggcaaccatctgcttcatcttgttaattctctcgcttatctgtaaaataaagctgggtccagtgagacggaaattgaagtcatctgttatatagagaagcctggagttgagaccctggaggattctgtgttttgactgtcactttggcatcctctgatgaactcacacatgcctcagtgcctcagtgaaaagaacagggatgctggctcttggctaagaggtgttcagaatttaggcaacactcaatttacctgcgaagcaatacacccagacacaccagtcttgtatctcttaaaagtatggatgcttcatccaaatcgcctcacctacagcagggaagttgactcatccaagcattttgccatgttttttctccccatgccgtacagggtagcacctcctcacctgccaatctttgcaatttgcttgactcacctcagacttttcattcacaacagacagcttttaaggctaacgtccagctgtatttacttctggctgtgcccgtttggctgtttaagctgccaattgtagcactcagctaccatctgaggaagaaagcattttgcatcagcctggagtgaaccatgaacttggattcaagactgtcttttctatagcaagtgagagccac

SEQ ID NO: 144081 - DNA, 839 bp, Homo sapiens
  Payload ID: 8478
  Gene Symbol: IL5RA
  Gene Name: interleukin 5 receptor, alpha
  ENST ID: ENST00000427088
  CDS Start-End: 513-839
cagaaatgcaacgctttagagtacccacggaaaacttgtttaccttgtcaccatgagtaaaagttaattcccactcctgaagagagcaaaccaactctgaaagagagtgaaaatgcagacaagacagttatcagataatggctatctggacgagagattctttcgtttgacagcagtttggttgttgggagttccagttcagctcctgcacagttgctctgtacaaatcctcctccatatttgcttagagaaaacgtgttgccatcccatcatgaaggaagctgcctgagagtttttaaccattacagccgtgatgatgaaagagtgaagaaccgcctctaagttaaaaagtgcacccagagataagggccaggcacattgagcattggtcctgtgcctgacgctatgctagatgctggggttgcagccacgagcatagacacgacagacacggtcctcgccatcttctgttgagtactggtcggaacaagaggatcgtctgtagacaggatatgatcatcgtggcgcatgtattactcatccttttgggggccactgagatactgcaagctgacttacttcctgatgaaaagatttcacttctcccacctgtcaatttcaccattaaagttactggtttggctcaagttcttttacaatggaaaccaaatcctgatcaagagcaaaggaatgttaatctagaatatcaagtgaaaataaacgctccaaaagaagatgactatgaaaccagaatcactgaaagcaaatgtgtaaccatcctccacaaaggcttttcagcaagtgtgcggaccatcctgcagaacgaccactcactactg

SEQ ID NO: 144082 - DNA, 1389 bp, Homo sapiens
  Payload ID: 8478
  Gene Symbol: IL5RA
  Gene Name: interleukin 5 receptor, alpha
  Uniprot ID: Q01344
  ENST ID: ENST00000456302
  CDS Start-End: 185-1186
ctgccgctgcttctcatcgcatggccaccgcatttctcaggccaggcacattgagcattggtcctgtgcctgacgctatgctagatgctggggttgcagccacgagcatagacacgacagacacggtcctcgccatcttctgttgagtactggtcggaacaagaggatcgtctgtagacaggatatgatcatcgtggcgcatgtattactcatccttttgggggccactgagatactgcaagctgacttacttcctgatgaaaagatttcacttctcccacctgtcaatttcaccattaaagttactggtttggctcaagttcttttacaatggaaaccaaatcctgatcaagagcaaaggaatgttaatctagaatatcaagtgaaaataaacgctccaaaagaagatgactatgaaaccagaatcactgaaagcaaatgtgtaaccatcctccacaaaggcttttcagcaagtgtgcggaccatcctgcagaacgaccactcactactggccagcagctgggcttctgctgaacttcatgccccaccagggtctcctggaacctcaattgtgaatttaacttgcaccacaaacactacagaagacaattattcacgtttaaggtcataccaagtttcccttcactgcacctggcttgttggcacagatgcccctgaggacacgcagtattttctctactataggtatggctcttggactgaagaatgccaagaatacagcaaagacacactggggagaaatatcgcatgctggtttcccaggacttttatcctcagcaaagggcgtgactggcttgcggtgcttgttaacggctccagcaagcactctgctatcaggccctttgatcagctgtttgcccttcacgccattgatcaaataaatcctccactgaatgtcacagcagagattgaaggaactcgtctctctatccaatgggagaaaccagtgtctgcttttccaatccattgctttgattatgaagtaaaaatacacaatacaaggaatggatatttgcagatagaaaaattgatgaccaatgcattcatctcaataattgatgatctttctaagtacgatgttcaagtgagagcagcagtgagctccatgtgcagagaggcagggctctggagtgagtggagccaacctatttatgtgggtaagtagcttatgtttattttacattggcagccttccttgtgatcaaaaaaggtaatcccagaaacgtacccgttcactcgtgggtcttaaaatggtttcatatctctattgtgactaattttctctcggtctactgccttttcaatcaggaatagatttgccatgaagccagtgaagtttttaagtgtctaggcttctcattagcgcca

SEQ ID NO: 144083 - DNA, 788 bp, Homo sapiens
  Payload ID: 8478
  Gene Symbol: IL5RA
  Gene Name: interleukin 5 receptor, alpha
  ENST ID: ENST00000445701
  CDS Start-End: 200-788
tttgcaaaacgagactgttaataaaacctaccccagggtaggacggactgttcgggccaggcacattgagcattggtcctgtgcctgacgctatgctagatgctggggttgcagccacgagcatagacacgacagacacggtcctcgccatcttctgttgagtactggtcggaacaagaggatcgtctgtagacaggatatgatcatcgtggcgcatgtattactcatccttttgggggccactgagatactgcaagctgacttacttcctgatgaaaagatttcacttctcccacctgtcaatttcaccattaaagttactggtttggctcaagttcttttacaatggaaaccaaatcctgatcaagagcaaaggaatgttaatctagaatatcaagtgaaaataaacgctccaaaagaagatgactatgaaaccagaatcactgaaagcaaatgtgtaaccatcctccacaaaggcttttcagcaagtgtgcggaccatcctgcagaacgaccactcactactggccagcagctgggcttctgctgaacttcatgccccaccagggtctcctggaacctcaattgtgaatttaacttgcaccacaaacactacagaagacaattattcacgtttaaggtcataccaagtttcccttcactgcacctggcttgttggcacagatgcccctgaggacacgcagtattttctctactataggtatggctcttggactgaagaatgccaagaatacagcaaagacacactggggagaaatatcgcatgct

SEQ ID NO: 144084 - DNA, 1664 bp, Homo sapiens
  Payload ID: 8478
  Gene Symbol: IL5RA
  Gene Name: interleukin 5 receptor, alpha
  Uniprot ID: Q01344
  ENST ID: ENST00000430514
  CDS Start-End: 251-1252
ccgctgcttctcatcgcatggccaccgcatttctcaggccaggcacattgagcattggtcctgtgcctgacgctatgctagatgctggggttgcagccacgagcatagacacgacagacacggtcctcgccatcttctgttgagtactggtcggaacaagaggatcgtctgtagacaggctacagattgttttagattgaagtttcctgtcatgttcactcatctttaaatcctcatagtgaaaaaggatatgatcatcgtggcgcatgtattactcatccttttgggggccactgagatactgcaagctgacttacttcctgatgaaaagatttcacttctcccacctgtcaatttcaccattaaagttactggtttggctcaagttcttttacaatggaaaccaaatcctgatcaagagcaaaggaatgttaatctagaatatcaagtgaaaataaacgctccaaaagaagatgactatgaaaccagaatcactgaaagcaaatgtgtaaccatcctccacaaaggcttttcagcaagtgtgcggaccatcctgcagaacgaccactcactactggccagcagctgggcttctgctgaacttcatgccccaccagggtctcctggaacctcaattgtgaatttaacttgcaccacaaacactacagaagacaattattcacgtttaaggtcataccaagtttcccttcactgcacctggcttgttggcacagatgcccctgaggacacgcagtattttctctactataggtatggctcttggactgaagaatgccaagaatacagcaaagacacactggggagaaatatcgcatgctggtttcccaggacttttatcctcagcaaagggcgtgactggcttgcggtgcttgttaacggctccagcaagcactctgctatcaggccctttgatcagctgtttgcccttcacgccattgatcaaataaatcctccactgaatgtcacagcagagattgaaggaactcgtctctctatccaatgggagaaaccagtgtctgcttttccaatccattgctttgattatgaagtaaaaatacacaatacaaggaatggatatttgcagatagaaaaattgatgaccaatgcattcatctcaataattgatgatctttctaagtacgatgttcaagtgagagcagcagtgagctccatgtgcagagaggcagggctctggagtgagtggagccaacctatttatgtgggtaagtagcttatgtttattttacattggcagccttccttgtgatcaaaaaaggtaatcccagaaacgtacccgttcactcgtgggtcttaaaatggtttcatatctctattgtgactaattttctctcggtctactgccttttcaatcaggaatagatttgccatgaagccagtgaagtttttaagtgtctaggcttctcattagcgccaactctcctagacctggtgcctgttttttttccaagttttgtttctacttctatccattttttaaattaaactttttattttgaaataattatcacactcacaagctgtgggaagaaataatagagatcctgtgtctctttcatccagttttcctcaagggtaacatcttacaaaactatagtacaatagtggaatagaatattggtgtt

SEQ ID NO: 144085 - DNA, 2514 bp, Homo sapiens
  Payload ID: 8478
  Gene Symbol: IL5RA
  Gene Name: interleukin 5 receptor, alpha
  Uniprot ID: Q01344
  ENST ID: ENST00000446632
  CDS Start-End: 576-1838
aaacaaaacagaaatgcaacgctttagagtacccacggaaaacttgtttaccttgtcaccatgagtaaaagttaattcccactcctgaagagagcaaaccaactctgaaagagagtgaaaatgcagacaagacagttatcagataatggctatctggacgagagattctttcgtttgacagcagtttggttgttgggagttccagttcagctcctgcacagttgctctgtacaaatcctcctccatatttgcttagagaaaacgtgttgccatcccatcatgaaggaagctgcctgagagtttttaaccattacagccgtgatgatgaaagagtgaagaaccgcctctaagttaaaaagtgcacccagagataaggttcgttctcaatgccctgccgctgcttctcatcgcatggccaccgcatttctcaggccaggcacattgagcattggtcctgtgcctgacgctatgctagatgctggggttgcagccacgagcatagacacgacagacacggtcctcgccatcttctgttgagtactggtcggaacaagaggatcgtctgtagacaggatatgatcatcgtggcgcatgtattactcatccttttgggggccactgagatactgcaagctgacttacttcctgatgaaaagatttcacttctcccacctgtcaatttcaccattaaagttactggtttggctcaagttcttttacaatggaaaccaaatcctgatcaagagcaaaggaatgttaatctagaatatcaagtgaaaataaacgctccaaaagaagatgactatgaaaccagaatcactgaaagcaaatgtgtaaccatcctccacaaaggcttttcagcaagtgtgcggaccatcctgcagaacgaccactcactactggccagcagctgggcttctgctgaacttcatgccccaccagggtctcctggaacctcaattgtgaatttaacttgcaccacaaacactacagaagacaattattcacgtttaaggtcataccaagtttcccttcactgcacctggcttgttggcacagatgcccctgaggacacgcagtattttctctactataggtatggctcttggactgaagaatgccaagaatacagcaaagacacactggggagaaatatcgcatgctggtttcccaggacttttatcctcagcaaagggcgtgactggcttgcggtgcttgttaacggctccagcaagcactctgctatcaggccctttgatcagctgtttgcccttcacgccattgatcaaataaatcctccactgaatgtcacagcagagattgaaggaactcgtctctctatccaatgggagaaaccagtgtctgcttttccaatccattgctttgattatgaagtaaaaatacacaatacaaggaatggatatttgcagatagaaaaattgatgaccaatgcattcatctcaataattgatgatctttctaagtacgatgttcaagtgagagcagcagtgagctccatgtgcagagaggcagggctctggagtgagtggagccaacctatttatgtgggaaatgatgaacacaagcccttgagagagtggtttgtcattgtgattatggcaaccatctgcttcatcttgttaattctctcgcttatctgtaaaatatgtcatttatggatcaagttgtttccaccaattccagcaccaaaaagtaatatcaaagatctctttgtaaccactaactatgagaaagctgggtccagtgagacggaaattgaagtcatctgttatatagagaagcctggagttgagaccctggaggattctgtgttttgactgtcactttggcatcctctgatgaactcacacatgcctcagtgcctcagtgaaaagaacagggatgctggctcttggctaagaggtgttcagaatttaggcaacactcaatttacctgcgaagcaatacacccagacacaccagtcttgtatctcttaaaagtatggatgcttcatccaaatcgcctcacctacagcagggaagttgactcatccaagcattttgccatgttttttctccccatgccgtacagggtagcacctcctcacctgccaatctttgcaatttgcttgactcacctcagacttttcattcacaacagacagcttttaaggctaacgtccagctgtatttacttctggctgtgcccgtttggctgtttaagctgccaattgtagcactcagctaccatctgaggaagaaagcattttgcatcagcctggagtgaaccatgaacttggattcaagactgtcttttctatagcaagtgagagccacaaattcctcacccccctacattctagaatgatctttttctaggtagattgtgtatgtgtgtgtatgagagagagagagagagagagagagagagaaattatctcaagctccagaggcctgatccaggatacatcatttgaaaccaactaatttaaaagcataatagagctaatatat

SEQ ID NO: 144086 - DNA, 1182 bp, Homo sapiens
  Payload ID: 8479
  Gene Symbol: IL6
  Gene Name: interleukin 6
  Uniprot ID: P05231
  ENST ID: ENST00000258743
  CDS Start-End: 117-755
aatattagagtctcaacccccaataaatataggactggagatgtctgaggctcattctgccctcgagcccaccgggaacgaaagagaagctctatctcccctccaggagcccagctatgaactccttctccacaagcgccttcggtccagttgccttctccctggggctgctcctggtgttgcctgctgccttccctgccccagtacccccaggagaagattccaaagatgtagccgccccacacagacagccactcacctcttcagaacgaattgacaaacaaattcggtacatcctcgacggcatctcagccctgagaaaggagacatgtaacaagagtaacatgtgtgaaagcagcaaagaggcactggcagaaaacaacctgaaccttccaaagatggctgaaaaagatggatgcttccaatctggattcaatgaggagacttgcctggtgaaaatcatcactggtcttttggagtttgaggtatacctagagtacctccagaacagatttgagagtagtgaggaacaagccagagctgtgcagatgagtacaaaagtcctgatccagttcctgcagaaaaaggcaaagaatctagatgcaataaccacccctgacccaaccacaaatgccagcctgctgacgaagctgcaggcacagaaccagtggctgcaggacatgacaactcatctcattctgcgcagctttaaggagttcctgcagtccagcctgagggctcttcggcaaatgtagcatgggcacctcagattgttgttgttaatgggcattccttcttctggtcagaaacctgtccactgggcacagaacttatgttgttctctatggagaactaaaagtatgagcgttaggacactattttaattatttttaatttattaatatttaaatatgtgaagctgagttaatttatgtaagtcatatttatatttttaagaagtaccacttgaaacattttatgtattagttttgaaataataatggaaagtggctatgcagtttgaatatcctttgtttcagagccagatcatttcttggaaagtgtaggcttacctcaaataaatggctaacttatacatatttttaaagaaatatttatattgtatttatataatgtataaatggtttttataccaataaatggcattttaaaaaattcagc

SEQ ID NO: 144087 - DNA, 765 bp, Homo sapiens
  Payload ID: 8479
  Gene Symbol: IL6
  Gene Name: interleukin 6
  ENST ID: ENST00000401630
  CDS Start-End: 40-609
acgaaagagaagctctatctcccctccaggagcccagctatgaactccttctccacaatacccccaggagaagattccaaagatgtagccgccccacacagacagccactcacctcttcagaacgaattgacaaacaaattcggtacatcctcgacggcatctcagccctgagaaaggagacatgtaacaagagtaacatgtgtgaaagcagcaaagaggcactggcagaaaacaacctgaaccttccaaagatggctgaaaaagatggatgcttccaatctggattcaatgaggagacttgcctggtgaaaatcatcactggtcttttggagtttgaggtatacctagagtacctccagaacagatttgagagtagtgaggaacaagccagagctgtgcagatgagtacaaaagtcctgatccagttcctgcagaaaaaggcaaagaatctagatgcaataaccacccctgacccaaccacaaatgccagcctgctgacgaagctgcaggcacagaaccagtggctgcaggacatgacaactcatctcattctgcgcagctttaaggagttcctgcagtccagcctgagggctcttcggcaaatgtagcatgggcacctcagattgttgttgttaatgggcattccttcttctggtcagaaacctgtccactgggcacagaacttatgttgttctctatggagaactaaaagtatgagcgttaggacactattttaattatttttaatttattaatatttaaat

SEQ ID NO: 144088 - DNA, 926 bp, Homo sapiens
  Payload ID: 8479
  Gene Symbol: IL6
  Gene Name: interleukin 6
  ENST ID: ENST00000407492
  CDS Start-End: 87-497
cccaccgggaacgaaagagaagctctatctcccctccaggagcccagctatgaactccttctccacaaacatgtaacaagagtaacatgtgtgaaagcagcaaagaggcactggcagaaaacaacctgaaccttccaaagatggctgaaaaagatggatgcttccaatctggattcaatgaggagacttgcctggtgaaaatcatcactggtcttttggagtttgaggtatacctagagtacctccagaacagatttgagagtagtgaggaacaagccagagctgtgcagatgagtacaaaagtcctgatccagttcctgcagaaaaaggcaaagaatctagatgcaataaccacccctgacccaaccacaaatgccagcctgctgacgaagctgcaggcacagaaccagtggctgcaggacatgacaactcatctcattctgcgcagctttaaggagttcctgcagtccagcctgagggctcttcggcaaatgtagcatgggcacctcagattgttgttgttaatgggcattccttcttctggtcagaaacctgtccactgggcacagaacttatgttgttctctatggagaactaaaagtatgagcgttaggacactattttaattatttttaatttattaatatttaaatatgtgaagctgagttaatttatgtaagtcatatttatatttttaagaagtaccacttgaaacattttatgtattagttttgaaataataatggaaagtggctatgcagtttgaatatcctttgtttcagagccagatcatttcttggaaagtgtaggcttacctcaaataaatggctaacttatacatatttttaaagaaatatttatattgtatttatataatgtataaatggtttttataccaataaatggcattttaaaaaattcagcaa

SEQ ID NO: 144089 - DNA, 649 bp, Homo sapiens
  Payload ID: 8479
  Gene Symbol: IL6
  Gene Name: interleukin 6
  ENST ID: ENST00000406575
  CDS Start-End: 24-620
atctcccctccaggagcccagctatgaactccttctccacaagcgccttcggtccagttgccttctccctggggctgctcctggtgttgcctgctgccttccctgccccagtacccccaggagaagattccaaagatgtagccgccccacacagacagccactcacctcttcagaacgaattgacaaacaaattcggtacatcctcgacggcatctcagccctgagaaaggagacatgtaacaagagtaacatgtgtgaaagcagcaaagaggcactggcagaaaacaacctgaaccttccaaagatggctgaaaaagatggatgcttccaatctggattcaatgaggagacttgcctggtgaaaatcatcactggtcttttggagtttgaggtatacctagagtacctccagaacagatttgagagtagtgaggaacaagccagagctgtgcagatgagtacaaaagtcctgatccagttcctgcagaaaaaggtgggtgtgtcctcattccctcaacttggtgtgggggaagacaggctcaaagacagtgtcctggacaactcagggatgcaatgccacttccaaaagagaaggctacacgtaaacaaaagagtctgagaaatagtttctgattgttattgttaaat

SEQ ID NO: 144090 - DNA, 1527 bp, Homo sapiens
  Payload ID: 8479
  Gene Symbol: IL6
  Gene Name: interleukin 6
  Uniprot ID: P05231
  ENST ID: ENST00000404625
  CDS Start-End: 460-1098
aggtaacaccatgtttggtaaataagtgttttggtgttgtgcaagggtctggtttcagcctgaagccatctcagagctgtctgggtctctggagactggagggacaacctagtctagagcccatttgcatgagaccaaggatcctcctgcaagagacaccatcctgagggaagagggcttctgaaccagcttgacccaataagaaattcttgggtgccgacgcggaagcagattcagagcctagagccgtgcctgcgtccgtagtttccttctagcttcttttgatttcaaatcaagacttacagggagagggagcgataaacacaaactctgcaagatgccacaaggtcctcctttgacatccccaacaaagaggactggagatgtctgaggctcattctgccctcgagcccaccgggaacgaaagagaagctctatctcccctccaggagcccagctatgaactccttctccacaagcgccttcggtccagttgccttctccctggggctgctcctggtgttgcctgctgccttccctgccccagtacccccaggagaagattccaaagatgtagccgccccacacagacagccactcacctcttcagaacgaattgacaaacaaattcggtacatcctcgacggcatctcagccctgagaaaggagacatgtaacaagagtaacatgtgtgaaagcagcaaagaggcactggcagaaaacaacctgaaccttccaaagatggctgaaaaagatggatgcttccaatctggattcaatgaggagacttgcctggtgaaaatcatcactggtcttttggagtttgaggtatacctagagtacctccagaacagatttgagagtagtgaggaacaagccagagctgtgcagatgagtacaaaagtcctgatccagttcctgcagaaaaaggcaaagaatctagatgcaataaccacccctgacccaaccacaaatgccagcctgctgacgaagctgcaggcacagaaccagtggctgcaggacatgacaactcatctcattctgcgcagctttaaggagttcctgcagtccagcctgagggctcttcggcaaatgtagcatgggcacctcagattgttgttgttaatgggcattccttcttctggtcagaaacctgtccactgggcacagaacttatgttgttctctatggagaactaaaagtatgagcgttaggacactattttaattatttttaatttattaatatttaaatatgtgaagctgagttaatttatgtaagtcatatttatatttttaagaagtaccacttgaaacattttatgtattagttttgaaataataatggaaagtggctatgcagtttgaatatcctttgtttcagagccagatcatttcttggaaagtgtaggcttacctcaaataaatggctaacttatacatatttttaaagaaatatttatattgtatttatataatgtataaatggtttttataccaataaatggcattttaaaaaattcagcaa

SEQ ID NO: 144091 - DNA, 539 bp, Homo sapiens
  Payload ID: 8479
  Gene Symbol: IL6
  Gene Name: interleukin 6
  ENST ID: ENST00000401651
  CDS Start-End: 154-522
aatattagagtctcaacccccaataaatataggactggagatgtctgaggctcattctgccctcgagcccaccgggaacgaaagagaagctctatctcccctccaggagcccagctatgaactccttctccacaaacatgtaacaagagtaacatgtgtgaaagcagcaaagaggcactggcagaaaacaacctgaaccttccaaagatggctgaaaaagatggatgcttccaatctggattcaatgaggagacttgcctggtgaaaatcatcactggtcttttggagtttgaggtatacctagagtacctccagaacagatttgagagtagtgaggaacaagccagagctgtgcagatgagtacaaaagtcctgatccagttcctgcagaaaaaggtgggtgtgtcctcattccctcaacttggtgtgggggaagacaggctcaaagacagtgtcctggacaactcagggatgcaatgccacttccaaaagagaaggctacacgtaaacaaaagagtctgagaaatagtttctgattg

SEQ ID NO: 144092 - DNA, 574 bp, Homo sapiens
  Payload ID: 8479
  Gene Symbol: IL6
  Gene Name: interleukin 6
  ENST ID: ENST00000426291
  CDS Start-End: 117-574
aatattagagtctcaacccccaataaatataggactggagatgtctgaggctcattctgccctcgagcccaccgggaacgaaagagaagctctatctcccctccaggagcccagctatgaactccttctccacaagcgccttcggtccagttgccttctccctggggctgctcctggtgttgcctgctgccttccctgccccagtacccccaggagaagattccaaagatgtagccgccccacacagacagccactcacctcttcagaacgaattgacaaacaaattcggtacatcctcgacggcatctcagccctgagaaaggagacatgtaacaagagtaacatgtgtgaaagcagcaaagaggcactggcagaaaacaacctgaaccttccaaagatggctgaaaaagatggatgcttccaatctggattcaatgaggagacttgcctggtgaaaatcatcactggtcttttggagtttgaggtatacctagagtacctccagaacagatttgagagtagtgaggaacaagccagagctgtgcagatgagtacaaaagtcctgatccagtt

SEQ ID NO: 144093 - DNA, 3217 bp, Homo sapiens
  Payload ID: 8480
  Gene Symbol: IL6R
  Gene Name: interleukin 6 receptor
  Uniprot ID: P08887
  ENST ID: ENST00000344086
  CDS Start-End: 408-1505
ggcgctgtggcaggaagccaccccctcggtcggccggtgcgcggggctgttgcgccatccgctccggctttcgtaaccgcaccctgggacggcccagagacgctccagcgcgagttcctcaaatgttttcctgcgttgccaggaccgtccgccgctctgagtcatgtgcgagtgggaagtcgcactgacactgagccgggccagagggagaggagccgagcgcggcgcggggccgagggactcgcagtgtgtgtagagagccgggctcctgcggatgggggctgcccccggggcctgagcccgcctgcccgcccaccgccccgccccgcccctgccacccctgccgcccggttcccattagcctgtccgcctctgcgggaccatggagtggtagccgaggaggaagcatgctggccgtcggctgcgcgctgctggctgccctgctggccgcgccgggagcggcgctggccccaaggcgctgccctgcgcaggaggtggcgagaggcgtgctgaccagtctgccaggagacagcgtgactctgacctgcccgggggtagagccggaagacaatgccactgttcactgggtgctcaggaagccggctgcaggctcccaccccagcagatgggctggcatgggaaggaggctgctgctgaggtcggtgcagctccacgactctggaaactattcatgctaccgggccggccgcccagctgggactgtgcacttgctggtggatgttccccccgaggagccccagctctcctgcttccggaagagccccctcagcaatgttgtttgtgagtggggtcctcggagcaccccatccctgacgacaaaggctgtgctcttggtgaggaagtttcagaacagtccggccgaagacttccaggagccgtgccagtattcccaggagtcccagaagttctcctgccagttagcagtcccggagggagacagctctttctacatagtgtccatgtgcgtcgccagtagtgtcgggagcaagttcagcaaaactcaaacctttcagggttgtggaatcttgcagcctgatccgcctgccaacatcacagtcactgccgtggccagaaacccccgctggctcagtgtcacctggcaagacccccactcctggaactcatctttctacagactacggtttgagctcagatatcgggctgaacggtcaaagacattcacaacatggatggtcaaggacctccagcatcactgtgtcatccacgacgcctggagcggcctgaggcacgtggtgcagcttcgtgcccaggaggagttcgggcaaggcgagtggagcgagtggagcccggaggccatgggcacgccttggacagaatccaggagtcctccagctgagaacgaggtgtccacccccatgcaggcacttactactaataaagacgatgataatattctcttcagagattctgcaaatgcgacaagcctcccaggttcaagaagacgtggaagctgcgggctctgaaggaaggcaagacaagcatgcatccgccgtactctttggggcagctggtcccggagaggcctcgacccaccccagtgcttgttcctctcatctccccaccggtgtcccccagcagcctggggtctgacaatacctcgagccacaaccgaccagatgccagggacccacggagcccttatgacatcagcaatacagactacttcttccccagatagctggctgggtggcaccagcagcctggaccctgtggatgataaaacacaaacgggctcagcaaaagatgcttctcactgccatgccagcttatctcaggggtgtgcggcctttggcttcacggaagagccttgcggaaggttctacgccaggggaaaatcagcctgctccagctgttcagctggttgaggtttcaaacctccctttccaaatgcccagcttaaaggggctagagtgaacttgggccactgtgaagagaaccatatcaagactctttggacactcacacggacactcaaaagctgggcaggttggtgggggcctcggtgtggagaagcggctggcagcccacccctcaacacctctgcacaagctgcaccctcaggcaggtgggatggatttccagccaaagcctcctccagccgccatgctcctggcccactgcatcgtttcatcttccaactcaaactcttaaaacccaagtgccttagcaaattctgtttttctaggcctggggacggcttttacttaaaccgccaaggctgggggaagaagctctctcctccctttcttccctacagttgaaaaacagctgagggtgagtgggtgaataatacagtatctcagggcctggtcgttttcaacagaattataattagttcctcattagcattttgctaaatgtgaatgatgatcctaggcatttgctgaatacagaggcaactgcattggctttgggttgcaggacctcaggtgagaagcagaggaaggagaggagaggggcacagggtctctaccatcccctgtagagtgggagctgagtgggggatcacagcctctgaaaaccaatgttctctcttctccacctcccacaaaggagagctagcagcagggagggcttctgccatttctgagatcaaaacggttttactgcagctttgtttgttgtcagctgaacctgggtaactagggaagataatattaaggaagacaatgtgaaaagaaaaatgagcctggcaagaatgtgtttaaacttggtttttaaaaaactgctgactgttttctcttgagagggtggaatatccaatattcgctgtgtcagcatagaagtaacttacttaggtgtgggggaagcaccataactttgtttagcccaaaaccaagtcaagtgaaaaaggaggaagagaaaaaatattttcctgccaggcatggtggcccacgcacttcgggaggtcgaggcaggaggatcacttgagtccagaagtttgagatcagcctgggcaatgtgataaaaccccatctctacaaaaagcataaaaattagccaagtgtggtagagtgtgcctgaagtcccagatacttggggggctgaggtgggaggatctcttgagcctgggaggtcaaggctgcagtgagccgagattgcaccactgcactccagcctgggtgacagagcaagtgagaccctgtctcaaaaaaagaaaaagaaaaagaaaaaa

SEQ ID NO: 144094 - DNA, 5914 bp, Homo sapiens
  Payload ID: 8480
  Gene Symbol: IL6R
  Gene Name: interleukin 6 receptor
  Uniprot ID: P08887
  ENST ID: ENST00000368485
  CDS Start-End: 438-1844
ggcggtcccctgttctccccgctcaggtgcggcgctgtggcaggaagccaccccctcggtcggccggtgcgcggggctgttgcgccatccgctccggctttcgtaaccgcaccctgggacggcccagagacgctccagcgcgagttcctcaaatgttttcctgcgttgccaggaccgtccgccgctctgagtcatgtgcgagtgggaagtcgcactgacactgagccgggccagagggagaggagccgagcgcggcgcggggccgagggactcgcagtgtgtgtagagagccgggctcctgcggatgggggctgcccccggggcctgagcccgcctgcccgcccaccgccccgccccgcccctgccacccctgccgcccggttcccattagcctgtccgcctctgcgggaccatggagtggtagccgaggaggaagcatgctggccgtcggctgcgcgctgctggctgccctgctggccgcgccgggagcggcgctggccccaaggcgctgccctgcgcaggaggtggcgagaggcgtgctgaccagtctgccaggagacagcgtgactctgacctgcccgggggtagagccggaagacaatgccactgttcactgggtgctcaggaagccggctgcaggctcccaccccagcagatgggctggcatgggaaggaggctgctgctgaggtcggtgcagctccacgactctggaaactattcatgctaccgggccggccgcccagctgggactgtgcacttgctggtggatgttccccccgaggagccccagctctcctgcttccggaagagccccctcagcaatgttgtttgtgagtggggtcctcggagcaccccatccctgacgacaaaggctgtgctcttggtgaggaagtttcagaacagtccggccgaagacttccaggagccgtgccagtattcccaggagtcccagaagttctcctgccagttagcagtcccggagggagacagctctttctacatagtgtccatgtgcgtcgccagtagtgtcgggagcaagttcagcaaaactcaaacctttcagggttgtggaatcttgcagcctgatccgcctgccaacatcacagtcactgccgtggccagaaacccccgctggctcagtgtcacctggcaagacccccactcctggaactcatctttctacagactacggtttgagctcagatatcgggctgaacggtcaaagacattcacaacatggatggtcaaggacctccagcatcactgtgtcatccacgacgcctggagcggcctgaggcacgtggtgcagcttcgtgcccaggaggagttcgggcaaggcgagtggagcgagtggagcccggaggccatgggcacgccttggacagaatccaggagtcctccagctgagaacgaggtgtccacccccatgcaggcacttactactaataaagacgatgataatattctcttcagagattctgcaaatgcgacaagcctcccagtgcaagattcttcttcagtaccactgcccacattcctggttgctggagggagcctggccttcggaacgctcctctgcattgccattgttctgaggttcaagaagacgtggaagctgcgggctctgaaggaaggcaagacaagcatgcatccgccgtactctttggggcagctggtcccggagaggcctcgacccaccccagtgcttgttcctctcatctccccaccggtgtcccccagcagcctggggtctgacaatacctcgagccacaaccgaccagatgccagggacccacggagcccttatgacatcagcaatacagactacttcttccccagatagctggctgggtggcaccagcagcctggaccctgtggatgataaaacacaaacgggctcagcaaaagatgcttctcactgccatgccagcttatctcaggggtgtgcggcctttggcttcacggaagagccttgcggaaggttctacgccaggggaaaatcagcctgctccagctgttcagctggttgaggtttcaaacctccctttccaaatgcccagcttaaaggggctagagtgaacttgggccactgtgaagagaaccatatcaagactctttggacactcacacggacactcaaaagctgggcaggttggtgggggcctcggtgtggagaagcggctggcagcccacccctcaacacctctgcacaagctgcaccctcaggcaggtgggatggatttccagccaaagcctcctccagccgccatgctcctggcccactgcatcgtttcatcttccaactcaaactcttaaaacccaagtgccttagcaaattctgtttttctaggcctggggacggcttttacttaaaccgccaaggctgggggaagaagctctctcctccctttcttccctacagttgaaaaacagctgagggtgagtgggtgaataatacagtatctcagggcctggtcgttttcaacagaattataattagttcctcattagcattttgctaaatgtgaatgatgatcctaggcatttgctgaatacagaggcaactgcattggctttgggttgcaggacctcaggtgagaagcagaggaaggagaggagaggggcacagggtctctaccatcccctgtagagtgggagctgagtgggggatcacagcctctgaaaaccaatgttctctcttctccacctcccacaaaggagagctagcagcagggagggcttctgccatttctgagatcaaaacggttttactgcagctttgtttgttgtcagctgaacctgggtaactagggaagataatattaaggaagacaatgtgaaaagaaaaatgagcctggcaagaatgtgtttaaacttggtttttaaaaaactgctgactgttttctcttgagagggtggaatatccaatattcgctgtgtcagcatagaagtaacttacttaggtgtgggggaagcaccataactttgtttagcccaaaaccaagtcaagtgaaaaaggaggaagagaaaaaatattttcctgccaggcatggtggcccacgcacttcgggaggtcgaggcaggaggatcacttgagtccagaagtttgagatcagcctgggcaatgtgataaaaccccatctctacaaaaagcataaaaattagccaagtgtggtagagtgtgcctgaagtcccagatacttggggggctgaggtgggaggatctcttgagcctgggaggtcaaggctgcagtgagccgagattgcaccactgcactccagcctgggtgacagagcaagtgagaccctgtctcaaaaaaagaaaaagaaaaagaaaaaatattttccctattagagaagagattgtggtttcattctgtattttgtttttgtcttaaaaagtggaaaaatagcctgcctcttctctactctagggaaaaaccagcgtgtgactactcccccaggtggttatggagagggtgtccggtccctgtcccagtgccgagaaggaagcctcccacgactgcccggcagggtcctagaaattccccaccctgaaagccctgagctttctgctatcaaagaggttttaaaaaaatcccatttaaaaaaaatcccttacctcggtgccttcctctttttatttagttccttgagttgattcagctctgcaagaattgaagcaggactaaatgtctagttgtaacaccatgattaaccacttcagctgacttttctgtccgagctttgaaaattcagtggtgttagtggttacccagttagctctcaagttatcagggtattccagagtggggatatgatttaaatcagccgtgtaaccatggacccaatatttaccagaccacaaaacttttctaatactctaccctcttagaaaaaccaccaccatcaccagacaggtgcgaaaggatgaaagtgaccatgttttgtttacggttttccaggtttaagctgttactgtcttcagtaagccgtgattttcattgctgggcttgtctgtagattttagaccctattgctgcttgaggcaactcatcttaggttggcaaaaaggcaggatggccgggcgcggtggctcacgcctgtaatcctagcactttgggaggccaaggtgggaggattgcttgagctcaggagtttgagaccaacctgggtaacatagtgagacaccatctctattatgaacaataacagttaagaaaaaaaaaggcaggcaggcggttatggtggttccctcccatcccaccacataaagtttctgagacttgagaacagcaaaatgctgttaaagggaaatattaagaatgagaatctgcagtaagggtgattctgtgcccacagttcttcaattctttataccgttttacccacatgtggtgttaccaaagccgggcagaaccatgctagcggaagatgtgaaatccagatagctcattattgccaagagctaggcagctttgatctccaaattgttattgctttcatttttattgtaatggaattgctttgttttgtttttttgtttttgtattgaagagggttgttttccctttatttttcataagctaatgtaaatgaagaaaaaatgtcttctctgggctgtaggcctggctcagcgtacacaggtatacatcctaagctctctatgttctctaatctgtggtgactgaacatgtgtctcaatgcacggggcatttctacctgtgtttctgcagcacccccactgccttgagtccccagcagtgctgttatttgcctaacacctgtagccatctgccacgcagccagacgtgaaacgctgagacagagaccatttaggttaaatacgacagcttatcctgctgggtggggaaagtaaaaaatatgctggttcaaggcctaaagtaaaatgatcaataatgtttgtagcattaatgaaatattttcaagaaatgtgtccaggggtagcactggctatgttgacgaggcctttggtaactcagagagctcttggccctgatggggacttgcccttacgctttctttatcaggctctgagttcacacggagcctctggcacttccctgctgtcttgggagaaaggaaactggttgccgcggcaggttgtggaatctgttgctggaaccaggctggaagcccacctggtagtgaacagggcccagtggggcaggctgggcatgttgtggtctatgggtttgtttcctggagaatgttcaggaatgtcttcccagctgctttggtgctgagctctattatctcacagcacgtccagaaggctaacccaggtggggaggatgctgacaccagctccaggtggagttggtggtcttaatttggagatgcaggggcaacctgtgaccctttgaggcaagagccctgcacccagctgtcccgtgcagccgtgggcaggggctgcacacggaggggcaggcgggccagttcagggtccgtgccaggccctcctcagtgccctgtgaaggcctcctgtcctccgtgcggctgggcaccagcaccagggagtttctatggcaaccttagtgattattaaggaacactgtcagttttatgaacatatgctcaaatgaaattctactttaggaggaaaggattggaacagcatgtcacaaggctgttaattaacagagagaccttattggatggagatcacatctgttaaatagaatacctcaactctacgttgttttcttggagataaataatagtttcaagtttttgtttgtttgttttacctaattacctgaaagcaaataccaaaggctgatgtctgtatatggggcaaagggtcagtatatttttcagtgtttttttttctaccagctattttgcatttaaagtgaacattgtgtttggaataaatactcttaaaaaata

SEQ ID NO: 144095 - DNA, 570 bp, Homo sapiens
  Payload ID: 8480
  Gene Symbol: IL6R
  Gene Name: interleukin 6 receptor
  ENST ID: ENST00000515190
  CDS Start-End: 1-570
tcgggagcaagttcagcaaaactcaaacctttcagggttgtggaatcttgcagcctgatccgcctgccaacatcacagtcactgccgtggccagaaacccccgctggctcagtgtcacctggcaagacccccactcctggaactcatctttctacagactacggtttgagctcagatatcgggctgaacggtcaaagacattcacaacatggatggtcaaggacctccagcatcactgtgtcatccacgacgcctggagcggcctgaggcacgtggtgcagcttcgtgcccaggaggagttcgggcaaggcgagtggagcgagtggagcccggaggccatgggcacgccttggacagaatccaggagtcctccagctgagaacgaggtgtccacccccatgcaggcacttactactaataaagacgatgataatattctcttcagagattctgcaaatgcgacaagcctcccagtgcaagattcttcttcagtaccactgcccacattcctggttgctggagggagcctggccttcggaacgctcctctgcattgccattgttctgaggt

SEQ ID NO: 144096 - DNA, 527 bp, Homo sapiens
  Payload ID: 8480
  Gene Symbol: IL6R
  Gene Name: interleukin 6 receptor
  ENST ID: ENST00000512471
  CDS Start-End: 16-527
agccgaggaggaagcatgctggccgtcggctgcgcgctgctggctgccctgctggccgcgccgggagcggcgctggccccaaggcgctgccctgcgcaggaggtggcgagaggcgtgctgaccagtctgccaggagacagcgtgactctgacctgcccgggggtagagccggaagacaatgccactgttcactgggtgctcaggaagccggctgcaggctcccaccccagcagatgggctggcatgggaaggaggctgctgctgaggtcggtgcagctccacgactctggaaactattcatgctaccgggccggccgcccagctgggactgtgcacttgctggtggatgttccccccgaggagccccagctctcctgcttccggaagagccccctcagcaatgttgtttgtgagtggggtcctcggagcaccccatccctgacgacaaaggctgtgctcttgtcagaacagtccggccgaagacttccaggagccgtgccagtattcccaggagtcccagaagttct

SEQ ID NO: 144097 - DNA, 881 bp, Homo sapiens
  Payload ID: 8480
  Gene Symbol: IL6R
  Gene Name: interleukin 6 receptor
  ENST ID: ENST00000476006
  CDS Start-End: 1-881
gaaggaggctgctgctgaggtcggtgcagctccacgactctggaaactattcatgctaccgggccggccgcccagctgggactgtgcacttgctggtggatgttccccccgaggagccccagctctcctgcttccggaagagccccctcagcaatgttgtttgtgagtggggtcctcggagcaccccatccctgacgacaaaggctgtgctcttggtgaggaagtttcagaacagtccggccgaagacttccaggagccgtgccagtattcccaggagtcccagaagttctcctgccagttagcagtcccggagggagacagctctttctacatagtgtccatgtgcgtcgccagtagtgtcgggagcaagttcagcaaaactcaaacctttcagggttgtggaatcttgcagcctgatccgcctgccaacatcacagtcactgccgtggccagaaacccccgctggctcagtgtcacctggcaagacccccactcctggaactcatctttctacagactacggtttgagctcagatatcgggctgaacggtcaaagacattcacaacatggatggtcaaggacctccagcatcactgtgtcatccacgacgcctggagcggcctgaggcacgtggtgcagcttcgtgcccaggaggagttcgggcaaggcgagtggagcgagtggagcccggaggccatgggcacgccttggacaggcttctctccacagaccatcccgggtggcatttgggacccagctggagaatccaggagtcctccagctgagaacgaggtgtccacccccatgcaggcacttactactaataaagacgatgataatattctcttcagagattctgcaaatgcgacaagcctccca

SEQ ID NO: 144098 - DNA, 1496 bp, Homo sapiens
  Payload ID: 8480
  Gene Symbol: IL6R
  Gene Name: interleukin 6 receptor
  ENST ID: ENST00000622330
  CDS Start-End: 438-1496
ggcggtcccctgttctccccgctcaggtgcggcgctgtggcaggaagccaccccctcggtcggccggtgcgcggggctgttgcgccatccgctccggctttcgtaaccgcaccctgggacggcccagagacgctccagcgcgagttcctcaaatgttttcctgcgttgccaggaccgtccgccgctctgagtcatgtgcgagtgggaagtcgcactgacactgagccgggccagagggagaggagccgagcgcggcgcggggccgagggactcgcagtgtgtgtagagagccgggctcctgcggatgggggctgcccccggggcctgagcccgcctgcccgcccaccgccccgccccgcccctgccacccctgccgcccggttcccattagcctgtccgcctctgcgggaccatggagtggtagccgaggaggaagcatgctggccgtcggctgcgcgctgctggctgccctgctggccgcgccgggagcggcgctggccccaaggcgctgccctgcgcaggaggtggcgagaggcgtgctgaccagtctgccaggagacagcgtgactctgacctgcccgggggtagagccggaagacaatgccactgttcactgggtgctcaggaagccggctgcaggctcccaccccagcagatgggctggcatgggaaggaggctgctgctgaggtcggtgcagctccacgactctggaaactattcatgctaccgggccggccgcccagctgggactgtgcacttgctggtggatgttccccccgaggagccccagctctcctgcttccggaagagccccctcagcaatgttgtttgtgagtggggtcctcggagcaccccatccctgacgacaaaggctgtgctcttggtgaggaagtttcagaacagtccggccgaagacttccaggagccgtgccagtattcccaggagtcccagaagttctcctgccagttagcagtcccggagggagacagctctttctacatagtgtccatgtgcgtcgccagtagtgtcgggagcaagttcagcaaaactcaaacctttcagggttgtggaatcttgcagcctgatccgcctgccaacatcacagtcactgccgtggccagaaacccccgctggctcagtgtcacctggcaagacccccactcctggaactcatctttctacagactacggtttgagctcagatatcgggctgaacggtcaaagacattcacaacatggatggtcaaggacctccagcatcactgtgtcatccacgacgcctggagcggcctgaggcacgtggtgcagcttcgtgcccaggaggagttcgggcaaggcgagtggagcgagtggagcccggaggccatgggcacgccttggacagacaggctttctcctcgttgcccaggatggagtacagcagtgcaatcacagctcacggcaacttctgcctcctgggttcaagcaatcctcccgcctcagcctcctaagtag

SEQ ID NO: 144099 - DNA, 8776 bp, Homo sapiens
  Payload ID: 8481
  Gene Symbol: IL6ST
  Gene Name: interleukin 6 signal transducer
  Uniprot ID: P40189
  ENST ID: ENST00000336909
  CDS Start-End: 37-2793
tattacatgtgtctgttgcagaaatatccgcgcaagatgttgacgttgcagacttggctagtgcaagccttgtttattttcctcaccactgaatctacaggtgaacttctagatccatgtggttatatcagtcctgaatctccagttgtacaacttcattctaatttcactgcagtttgtgtgctaaaggaaaaatgtatggattattttcatgtaaatgctaattacattgtctggaaaacaaaccattttactattcctaaggagcaatatactatcataaacagaacagcatccagtgtcacctttacagatatagcttcattaaatattcagctcacttgcaacattcttacattcggacagcttgaacagaatgtttatggaatcacaataatttcaggcttgcctccagaaaaacctaaaaatttgagttgcattgtgaacgaggggaagaaaatgaggtgtgagtgggatggtggaagggaaacacacttggagacaaacttcactttaaaatctgaatgggcaacacacaagtttgctgattgcaaagcaaaacgtgacacccccacctcatgcactgttgattattctactgtgtattttgtcaacattgaagtctgggtagaagcagagaatgcccttgggaaggttacatcagatcatatcaattttgatcctgtatataaagtgaagcccaatccgccacataatttatcagtgatcaactcagaggaactgtctagtatcttaaaattgacatggaccaacccaagtattaagagtgttataatactaaaatataacattcaatataggaccaaagatgcctcaacttggagccagattcctcctgaagacacagcatccacccgatcttcattcactgtccaagaccttaaaccttttacagaatatgtgtttaggattcgctgtatgaaggaagatggtaagggatactggagtgactggagtgaagaagcaagtgggatcacctatgaagatagaccatctaaagcaccaagtttctggtataaaatagatccatcccatactcaaggctacagaactgtacaactcgtgtggaagacattgcctccttttgaagccaatggaaaaatcttggattatgaagtgactctcacaagatggaaatcacatttacaaaattacacagttaatgccacaaaactgacagtaaatctcacaaatgatcgctatctagcaaccctaacagtaagaaatcttgttggcaaatcagatgcagctgttttaactatccctgcctgtgactttcaagctactcaccctgtaatggatcttaaagcattccccaaagataacatgctttgggtggaatggactactccaagggaatctgtaaagaaatatatacttgagtggtgtgtgttatcagataaagcaccctgtatcacagactggcaacaagaagatggtaccgtgcatcgcacctatttaagagggaacttagcagagagcaaatgctatttgataacagttactccagtatatgctgatggaccaggaagccctgaatccataaaggcataccttaaacaagctccaccttccaaaggacctactgttcggacaaaaaaagtagggaaaaacgaagctgtcttagagtgggaccaacttcctgttgatgttcagaatggatttatcagaaattatactatattttatagaaccatcattggaaatgaaactgctgtgaatgtggattcttcccacacagaatatacattgtcctctttgactagtgacacattgtacatggtacgaatggcagcatacacagatgaaggtgggaaggatggtccagaattcacttttactaccccaaagtttgctcaaggagaaattgaagccatagtcgtgcctgtttgcttagcattcctattgacaactcttctgggagtgctgttctgctttaataagcgagacctaattaaaaaacacatctggcctaatgttccagatccttcaaagagtcatattgcccagtggtcacctcacactcctccaaggcacaattttaattcaaaagatcaaatgtattcagatggcaatttcactgatgtaagtgttgtggaaatagaagcaaatgacaaaaagccttttccagaagatctgaaatcattggacctgttcaaaaaggaaaaaattaatactgaaggacacagcagtggtattggggggtcttcatgcatgtcatcttctaggccaagcatttctagcagtgatgaaaatgaatcttcacaaaacacttcgagcactgtccagtattctaccgtggtacacagtggctacagacaccaagttccgtcagtccaagtcttctcaagatccgagtctacccagcccttgttagattcagaggagcggccagaagatctacaattagtagatcatgtagatggcggtgatggtattttgcccaggcaacagtacttcaaacagaactgcagtcagcatgaatccagtccagatatttcacattttgaaaggtcaaagcaagtttcatcagtcaatgaggaagattttgttagacttaaacagcagatttcagatcatatttcacaatcctgtggatctgggcaaatgaaaatgtttcaggaagtttctgcagcagatgcttttggtccaggtactgagggacaagtagaaagatttgaaacagttggcatggaggctgcgactgatgaaggcatgcctaaaagttacttaccacagactgtacggcaaggcggctacatgcctcagtgaaggactagtagttcctgctacaacttcagcagtacctataaagtaaagctaaaatgattttatctgtgaattcagattttaaaaagtcttcactctctgaagatgatcatttgcccttaaggacaaaaatgaactgaagtttcacatgagctatttccattccagaatatctgggattctactttaagcactacataaactgactttatcctcagactagctgaatgattttgtgctgtttcaggatgtttgcactgaagaaaaacagaaagcttatctgaaatttataaaactttttgttttgctacatagaaaacagaaggtatttgaataataagcagtgatatgcttagtgagcacagctatactgattttgattagaatagtcatcagagtggcttagggacagttaatataaaagaggagcaaggtgtagaccatcatctacttctgctaaaataacttaaaaagaggtccataggccataactacatgagcccagcttttgtaatctgacaaaaaaatgaggagcagcttcgtgtatatcagtgtacacggtattccttaggtcccttccattggtagtgatgctgcgagttattactggagaaaaggaattctagagctttaacttggcagattaaaagtactcattttttattcatcaataattagtaatctcactagttttcaaaaatttgcatattattgacaacctctttgaagatgcatttcacaaactcaacagagtgccatgataagagctagggatcccccaaactatctcaagcatctaaaaaattgccatttttaaaggcttaaattgtagtagtaaaggggaaaacaggaagtagtagtaaaggggaaaaaaaaccaataaagcatctaaaaaattggcatgttaaaaggcttaaattgctaatgtgtgtatatatatatatatatatacacacacatatcattgacttttcttaagacttcagagtactgggtagatgaacactttatacagtatatatcttcagcttaaatttgttttgagtattttttttatttttaaataagtaggcaaagatttaaatttttttatttttagtaaatgtttgaggcacactaagacaacttgggcaatatttgccaaaacaaaacagaaccccaaaaaatgtacatcttgttcttagcaaatatcattattgtagagacacttaataaagagatggtattttaatgtctgcagttctgaggtagggtggaacttagttctacattgtgatttaggaatttttaaaaccttttttcttcaagggagaagtgacccaggcctcgagtttagtgctaaagccgctagtgtacttatgctgtcccctaaccaccacgtgcgatatggaagcagatgctaaatataggggttttcttagaaagtaagaggaaattagcaagcgttattagtgattgactactgctatcaagtgaattcaaaggaaacaggtttttatgccatatttaagttacagaaaccaggcatgcttagaatagtttctagaggttattggagaatagaaagctaagaaaacttggtatacatttacaatggaaatataattacactttttactctcagaatattgttcacattagacttcctgtttatcttttatattcttgcatttatataatgcctcatcctttcaaagttctttcacatattatatgatcttctttatgaaaaaaatagatgtttcattctgatatattcagtttcccactttaggcaaaagtagattaatagaatgacgaattcaaagtagatgaggaaaatcaggcacagagaagtaaaggtagggatagacccaaatttacacaacaagataatgacatctccagcttttaagttgatcatcaaaggctgggctggatttgtcttgctgtatgtgtcaggaaatttatacctattacattttccattttctcaaaatttaagtcacatgactaatatttagctgcaactttcctcataacaaatagtgtcatgaagaatgttgtagtgtgaagtttgtacatttcagggtcagatatacaatatgaactcttaatctacaggaatgagaatggaggatcattgaaggccatgatataaacaaatttgcatgttgaagcctgtataaaacatggtacagtgagtgaatatacccccatccccaagaacactttatacatattaaatggatatatgattactgtgcaaaaattcattctggaaatgaacatatatttgagcactaatatgtaatgtacacctgccctaaggagaaaataaattataaaactttttacattcaaaattactttcccaagcatgtcttagaataatctatgtgttgatgcatgtaaattgtactttaggtaggcaaagaaatctggttatttatgtaaaaactagtctaataaagttagttagtggctttatcactttaaatctttagtgtccaaaagtggtgtttaaagtaatagcacatcagaaaaccttgtctggacaaaactagttcactcactgcttctgcacctgcagttgctccctttagggttataaaataatgacccaaatgttacatgtgttgatattataacttgtcagttactgatgtctgtggtatcctaccctcatctctgaaagggataatactgaataattattagaaaactataaaacttcacactttgtaccattaaaacctaaaattttaatcttgtccttttttactatggatcagtcggcactcgggaacagcagcaaggaaaaaaagcaaatttcattcacatgttctgtgttcatacctcttctctacctaattgttcatttaaatttcagccttattccttgataagggattttaccacatgaagtcatccagtgaccctagctcttattgtgaagttagtggagtatacttagaaatgttacaactttaaaatgttacaaaacattcattaaagctcatatttaaagtagagcatctagtttgagaaatagaaatcaattattaaagatgtcttttttctacccatttaactagttaaaaccatgacatgtaaatgtagaagtagaataatcatagaattccctaaaatatttctgtttactaacatatattgaccaagtacatcaagcaggagagatcttccttcattctgttatagtccacatcattctaattttgctcagttgttattaagagcatattcctaaaccatacacttttgtttcaataaagttttattttgttgagatgaataaaataacaaagttataagctgcataagacaaaagttcaattgttcaaaaaaaatttactgggatagctttctattacaggtattgttagattatattgtgctgataagattactttctaaaaaatttgtacttttctgtaaattaaaagaatatggagtcataaaatggcaagtgttttaggattagcctaaaattggacattgtcattgatttcaaagaaggtatgaactagcagtcttacagcctaattcttctttggactggtccttggcagcagttccttttcagactcgataaacagaattcagatgatgtaagtcaaaacaaaactttacaaagccaagcgtattatcttttgcattaacctatttttttccatcatacatgctactagtatgtgcattagcatgatattctcatatacattgcattaaaaattaaaaggtggcagctcagggtgagctcttctgttgctcatttgttcctaaatttttaagggctttttctcagtcaatagtttgtacaaactggttagtttaacttcattacccatttcattaaagttgatgggtcgtgtgatgagatgcatttaaggccgatagtgatagatgttttttttatttcttgaacacaggctttgtctgaatgatgttcttttatctcttgaacacaagctttgaatgataactacaggttttaagtgctgttacattaataccataatgtgatgtgttagaaacaaagggatatttcaaaggtagatatttgaaaattctctagtctcaatatgtatgtgtattgaatatactctaaaaataaatgtgcaatttgctagtaggacaatgcagtgactgactagcattaggtatgtttcttttatatcctagctatgtcccactttcttctaagtgcaatcctttcatgttcacttgctgttttaccccatctactctaacttcatttggaaggcttgtctagagtatagcatgtatttttacctttgcagtgaattgcatgtgctaattgtaaccacagctatttttatgttgacataactccaaatgttatattaaatgttctattatatattagctctaatcccttaagtaaattttaagaaataaatacttgttcaaattttttttctgtatgtggttactatcatctgactatgcatatttgtaacagcatttatcattagtggtgttagctaaataagcatcttagtgtaaatgagatgcttcgtgtgggttttgtgacattttaaatgacataatggaatgtgatttaaaagaaaaccagtacactatcttggtcttaataacatagaatggagatggcaaatttatccactagttttccagatttactatttaatagctgaggtctgaaatcgtagcatcctccctcctagtggacattaaaaaaaaaaaaaaaaaaaaaaacctacttggttgtcaagagcccaagtatggaggtgctgcgccatcttgtggcctgtctgtgcccaccctgcactctgctggagtctccatccttgttgcagtgagacttgaagttcaagattgatacatggcatcctcctgctacttcttgaggttactaagtagtatatgaaactaatcagtcagcaagtccacctggaaggaaaagaaaatctcaactattaatgtgccttcacattgtgattttgtctaaaaaaatgtagtgagtcaaaaaacccacaagccagccaacagtaactccttcacatatataccagagtttatagaaataacatgtcagctttgggctatgtgctcctttgtttaaaatcttctatttggttatggcttgtataggctcaagcctgatttctttaaggtgtggtggctcatcttatcctaatgtgtatgatagatacagtccatcctgctttggaaaagattatgtaactccttgagagcatactctttctctagcccaaaggcagtgagagagttttcttgttcaggattgcttaactttccatttaagctttttctttttaaattaatacaaacttctacactttcaaaatacgaaatatattacaactgcgtataggctcttccatacttaagtccagtgcttgggcaagttaatggagtgaaagactacaagcaaagaggaactgaggtagaaaaagaagaatgtgtgaaagcagcaggaagctcagccaactcgaaagcagggtgaacagcttgagtcctgttgctgctgatcggggttggctcttggacaacttagtaagatcatggaaaggctgcttgggttctccatagaaaagttctgtctccatcaagggaggaaaatgtacctttcaactcaaaattcaatatttgtttttaaatatagctattttccccaaccgctaaagattttcaacagatacgaagccagagcttagttttagaaacctgtggacattcaaacctgattctttattccctgtgactatggttatgtcattttacatgtcaaaaaagtgtatctagaattgtcatttcttatttttgagctttttttagtgagaattatcccctcacttaaatggctttttatttaaacatctgtgcattctgtatgaaattgtagtctttctgggataacatggtgagctatatggtggtaatccacacacacaaaaataaaagccaaaaaaaaacc

SEQ ID NO: 144100 - DNA, 201 bp, Homo sapiens
  Payload ID: 8481
  Gene Symbol: IL6ST
  Gene Name: interleukin 6 signal transducer
  ENST ID: ENST00000381286
  CDS Start-End: 1-201
atgttgacgttgcagacttggctagtgcaagccttgtttattttcctcaccactgaatctacagaattaaaaaacacatctggcctaatgttccagatccttcaaagagtcatattgcccagtggtcacctcacactcctccaaggcacaattttaattcaaaagatcaaatgtattcagatggcaatttcactgatgtaa

SEQ ID NO: 144101 - DNA, 8667 bp, Homo sapiens
  Payload ID: 8481
  Gene Symbol: IL6ST
  Gene Name: interleukin 6 signal transducer
  Uniprot ID: P40189
  ENST ID: ENST00000381287
  CDS Start-End: 37-1026
tattacatgtgtctgttgcagaaatatccgcgcaagatgttgacgttgcagacttggctagtgcaagccttgtttattttcctcaccactgaatctacaggtgaacttctagatccatgtggttatatcagtcctgaatctccagttgtacaacttcattctaatttcactgcagtttgtgtgctaaaggaaaaatgtatggattattttcatgtaaatgctaattacattgtctggaaaacaaaccattttactattcctaaggagcaatatactatcataaacagaacagcatccagtgtcacctttacagatatagcttcattaaatattcagctcacttgcaacattcttacattcggacagcttgaacagaatgtttatggaatcacaataatttcaggcttgcctccagaaaaacctaaaaatttgagttgcattgtgaacgaggggaagaaaatgaggtgtgagtgggatggtggaagggaaacacacttggagacaaacttcactttaaaatctgaatgggcaacacacaagtttgctgattgcaaagcaaaacgtgacacccccacctcatgcactgttgattattctactgtgtattttgtcaacattgaagtctgggtagaagcagagaatgcccttgggaaggttacatcagatcatatcaattttgatcctgtatataaagtgaagcccaatccgccacataatttatcagtgatcaactcagaggaactgtctagtatcttaaaattgacatggaccaacccaagtattaagagtgttataatactaaaatataacattcaatataggaccaaagatgcctcaacttggagccagattcctcctgaagacacagcatccacccgatcttcattcactgtccaagaccttaaaccttttacagaatatgtgtttaggattcgctgtatgaaggaagatggtaagggatactggagtgactggagtgaagaagcaagtgggatcacctatgaagataacattgcctccttttgaagccaatggaaaaatcttggattatgaagtgactctcacaagatggaaatcacatttacaaaattacacagttaatgccacaaaactgacagtaaatctcacaaatgatcgctatctagcaaccctaacagtaagaaatcttgttggcaaatcagatgcagctgttttaactatccctgcctgtgactttcaagctactcaccctgtaatggatcttaaagcattccccaaagataacatgctttgggtggaatggactactccaagggaatctgtaaagaaatatatacttgagtggtgtgtgttatcagataaagcaccctgtatcacagactggcaacaagaagatggtaccgtgcatcgcacctatttaagagggaacttagcagagagcaaatgctatttgataacagttactccagtatatgctgatggaccaggaagccctgaatccataaaggcataccttaaacaagctccaccttccaaaggacctactgttcggacaaaaaaagtagggaaaaacgaagctgtcttagagtgggaccaacttcctgttgatgttcagaatggatttatcagaaattatactatattttatagaaccatcattggaaatgaaactgctgtgaatgtggattcttcccacacagaatatacattgtcctctttgactagtgacacattgtacatggtacgaatggcagcatacacagatgaaggtgggaaggatggtccagaattcacttttactaccccaaagtttgctcaaggagaaattgaagccatagtcgtgcctgtttgcttagcattcctattgacaactcttctgggagtgctgttctgctttaataagcgagacctaattaaaaaacacatctggcctaatgttccagatccttcaaagagtcatattgcccagtggtcacctcacactcctccaaggcacaattttaattcaaaagatcaaatgtattcagatggcaatttcactgatgtaagtgttgtggaaatagaagcaaatgacaaaaagccttttccagaagatctgaaatcattggacctgttcaaaaaggaaaaaattaatactgaaggacacagcagtggtattggggggtcttcatgcatgtcatcttctaggccaagcatttctagcagtgatgaaaatgaatcttcacaaaacacttcgagcactgtccagtattctaccgtggtacacagtggctacagacaccaagttccgtcagtccaagtcttctcaagatccgagtctacccagcccttgttagattcagaggagcggccagaagatctacaattagtagatcatgtagatggcggtgatggtattttgcccaggcaacagtacttcaaacagaactgcagtcagcatgaatccagtccagatatttcacattttgaaaggtcaaagcaagtttcatcagtcaatgaggaagattttgttagacttaaacagcagatttcagatcatatttcacaatcctgtggatctgggcaaatgaaaatgtttcaggaagtttctgcagcagatgcttttggtccaggtactgagggacaagtagaaagatttgaaacagttggcatggaggctgcgactgatgaaggcatgcctaaaagttacttaccacagactgtacggcaaggcggctacatgcctcagtgaaggactagtagttcctgctacaacttcagcagtacctataaagtaaagctaaaatgattttatctgtgaattcagattttaaaaagtcttcactctctgaagatgatcatttgcccttaaggacaaaaatgaactgaagtttcacatgagctatttccattccagaatatctgggattctactttaagcactacataaactgactttatcctcagactagctgaatgattttgtgctgtttcaggatgtttgcactgaagaaaaacagaaagcttatctgaaatttataaaactttttgttttgctacatagaaaacagaaggtatttgaataataagcagtgatatgcttagtgagcacagctatactgattttgattagaatagtcatcagagtggcttagggacagttaatataaaagaggagcaaggtgtagaccatcatctacttctgctaaaataacttaaaaagaggtccataggccataactacatgagcccagcttttgtaatctgacaaaaaaatgaggagcagcttcgtgtatatcagtgtacacggtattccttaggtcccttccattggtagtgatgctgcgagttattactggagaaaaggaattctagagctttaacttggcagattaaaagtactcattttttattcatcaataattagtaatctcactagttttcaaaaatttgcatattattgacaacctctttgaagatgcatttcacaaactcaacagagtgccatgataagagctagggatcccccaaactatctcaagcatctaaaaaattgccatttttaaaggcttaaattgtagtagtaaaggggaaaacaggaagtagtagtaaaggggaaaaaaaaccaataaagcatctaaaaaattggcatgttaaaaggcttaaattgctaatgtgtgtatatatatatatatatatacacacacatatcattgacttttcttaagacttcagagtactgggtagatgaacactttatacagtatatatcttcagcttaaatttgttttgagtattttttttatttttaaataagtaggcaaagatttaaatttttttatttttagtaaatgtttgaggcacactaagacaacttgggcaatatttgccaaaacaaaacagaaccccaaaaaatgtacatcttgttcttagcaaatatcattattgtagagacacttaataaagagatggtattttaatgtctgcagttctgaggtagggtggaacttagttctacattgtgatttaggaatttttaaaaccttttttcttcaagggagaagtgacccaggcctcgagtttagtgctaaagccgctagtgtacttatgctgtcccctaaccaccacgtgcgatatggaagcagatgctaaatataggggttttcttagaaagtaagaggaaattagcaagcgttattagtgattgactactgctatcaagtgaattcaaaggaaacaggtttttatgccatatttaagttacagaaaccaggcatgcttagaatagtttctagaggttattggagaatagaaagctaagaaaacttggtatacatttacaatggaaatataattacactttttactctcagaatattgttcacattagacttcctgtttatcttttatattcttgcatttatataatgcctcatcctttcaaagttctttcacatattatatgatcttctttatgaaaaaaatagatgtttcattctgatatattcagtttcccactttaggcaaaagtagattaatagaatgacgaattcaaagtagatgaggaaaatcaggcacagagaagtaaaggtagggatagacccaaatttacacaacaagataatgacatctccagcttttaagttgatcatcaaaggctgggctggatttgtcttgctgtatgtgtcaggaaatttatacctattacattttccattttctcaaaatttaagtcacatgactaatatttagctgcaactttcctcataacaaatagtgtcatgaagaatgttgtagtgtgaagtttgtacatttcagggtcagatatacaatatgaactcttaatctacaggaatgagaatggaggatcattgaaggccatgatataaacaaatttgcatgttgaagcctgtataaaacatggtacagtgagtgaatatacccccatccccaagaacactttatacatattaaatggatatatgattactgtgcaaaaattcattctggaaatgaacatatatttgagcactaatatgtaatgtacacctgccctaaggagaaaataaattataaaactttttacattcaaaattactttcccaagcatgtcttagaataatctatgtgttgatgcatgtaaattgtactttaggtaggcaaagaaatctggttatttatgtaaaaactagtctaataaagttagttagtggctttatcactttaaatctttagtgtccaaaagtggtgtttaaagtaatagcacatcagaaaaccttgtctggacaaaactagttcactcactgcttctgcacctgcagttgctccctttagggttataaaataatgacccaaatgttacatgtgttgatattataacttgtcagttactgatgtctgtggtatcctaccctcatctctgaaagggataatactgaataattattagaaaactataaaacttcacactttgtaccattaaaacctaaaattttaatcttgtccttttttactatggatcagtcggcactcgggaacagcagcaaggaaaaaaagcaaatttcattcacatgttctgtgttcatacctcttctctacctaattgttcatttaaatttcagccttattccttgataagggattttaccacatgaagtcatccagtgaccctagctcttattgtgaagttagtggagtatacttagaaatgttacaactttaaaatgttacaaaacattcattaaagctcatatttaaagtagagcatctagtttgagaaatagaaatcaattattaaagatgtcttttttctacccatttaactagttaaaaccatgacatgtaaatgtagaagtagaataatcatagaattccctaaaatatttctgtttactaacatatattgaccaagtacatcaagcaggagagatcttccttcattctgttatagtccacatcattctaattttgctcagttgttattaagagcatattcctaaaccatacacttttgtttcaataaagttttattttgttgagatgaataaaataacaaagttataagctgcataagacaaaagttcaattgttcaaaaaaaatttactgggatagctttctattacaggtattgttagattatattgtgctgataagattactttctaaaaaatttgtacttttctgtaaattaaaagaatatggagtcataaaatggcaagtgttttaggattagcctaaaattggacattgtcattgatttcaaagaaggtatgaactagcagtcttacagcctaattcttctttggactggtccttggcagcagttccttttcagactcgataaacagaattcagatgatgtaagtcaaaacaaaactttacaaagccaagcgtattatcttttgcattaacctatttttttccatcatacatgctactagtatgtgcattagcatgatattctcatatacattgcattaaaaattaaaaggtggcagctcagggtgagctcttctgttgctcatttgttcctaaatttttaagggctttttctcagtcaatagtttgtacaaactggttagtttaacttcattacccatttcattaaagttgatgggtcgtgtgatgagatgcatttaaggccgatagtgatagatgttttttttatttcttgaacacaggctttgtctgaatgatgttcttttatctcttgaacacaagctttgaatgataactacaggttttaagtgctgttacattaataccataatgtgatgtgttagaaacaaagggatatttcaaaggtagatatttgaaaattctctagtctcaatatgtatgtgtattgaatatactctaaaaataaatgtgcaatttgctagtaggacaatgcagtgactgactagcattaggtatgtttcttttatatcctagctatgtcccactttcttctaagtgcaatcctttcatgttcacttgctgttttaccccatctactctaacttcatttggaaggcttgtctagagtatagcatgtatttttacctttgcagtgaattgcatgtgctaattgtaaccacagctatttttatgttgacataactccaaatgttatattaaatgttctattatatattagctctaatcccttaagtaaattttaagaaataaatacttgttcaaattttttttctgtatgtggttactatcatctgactatgcatatttgtaacagcatttatcattagtggtgttagctaaataagcatcttagtgtaaatgagatgcttcgtgtgggttttgtgacattttaaatgacataatggaatgtgatttaaaagaaaaccagtacactatcttggtcttaataacatagaatggagatggcaaatttatccactagttttccagatttactatttaatagctgaggtctgaaatcgtagcatcctccctcctagtggacattaaaaaaaaaaaaaaaaaaaaaaacctacttggttgtcaagagcccaagtatggaggtgctgcgccatcttgtggcctgtctgtgcccaccctgcactctgctggagtctccatccttgttgcagtgagacttgaagttcaagattgatacatggcatcctcctgctacttcttgaggttactaagtagtatatgaaactaatcagtcagcaagtccacctggaaggaaaagaaaatctcaactattaatgtgccttcacattgtgattttgtctaaaaaaatgtagtgagtcaaaaaacccacaagccagccaacagtaactccttcacatatataccagagtttatagaaataacatgtcagctttgggctatgtgctcctttgtttaaaatcttctatttggttatggcttgtataggctcaagcctgatttctttaaggtgtggtggctcatcttatcctaatgtgtatgatagatacagtccatcctgctttggaaaagattatgtaactccttgagagcatactctttctctagcccaaaggcagtgagagagttttcttgttcaggattgcttaactttccatttaagctttttctttttaaattaatacaaacttctacactttcaaaatacgaaatatattacaactgcgtataggctcttccatacttaagtccagtgcttgggcaagttaatggagtgaaagactacaagcaaagaggaactgaggtagaaaaagaagaatgtgtgaaagcagcaggaagctcagccaactcgaaagcagggtgaacagcttgagtcctgttgctgctgatcggggttggctcttggacaacttagtaagatcatggaaaggctgcttgggttctccatagaaaagttctgtctccatcaagggaggaaaatgtacctttcaactcaaaattcaatatttgtttttaaatatagctattttccccaaccgctaaagattttcaacagatacgaagccagagcttagttttagaaacctgtggacattcaaacctgattctttattccctgtgactatggttatgtcattttacatgtcaaaaaagtgtatctagaattgtcatttcttatttttgagctttttttagtgagaattatcccctcacttaaatggctttttatttaaacatctgtgcattctgtatgaaattgtagtctttctgggataacatggtgagctatatggtggtaatccacacac

SEQ ID NO: 144102 - DNA, 612 bp, Homo sapiens
  Payload ID: 8481
  Gene Symbol: IL6ST
  Gene Name: interleukin 6 signal transducer
  ENST ID: ENST00000381293
  CDS Start-End: 1-612
atgttgacgttgcagacttggctagtgcaagccttgtttattttcctcaccactgaatctacaggtgaacttctagatccatgtggttatatcagtcctgaatctccagttgtacaacttcattctaatttcactgcagtttgtgtgctaaaggaaaaattgaagcccaatccgccacataatttatcagtgatcaactcagaggaactgtctagtatcttaaaattgacatggaccaacccaagtattaagagtgttataatactaaaatataacattcaatataggaccaaagatgcctcaacttggagccagattcctcctgaagacacagcatccacccgatcttcattcactgtccaagaccttaaaccttttacagaatatgtgtttaggattcgctgtatgaaggaagatggtaagggatactggagtgactggagtgaagaagcaagtgggatcacctatgaagataaattaaaaaacacatctggcctaatgttccagatccttcaaagagtcatattgcccagtggtcacctcacactcctccaaggcacaattttaattcaaaagatcaaatgtattcagatggcaatttcactgatgtaa

SEQ ID NO: 144103 - DNA, 2574 bp, Homo sapiens
  Payload ID: 8481
  Gene Symbol: IL6ST
  Gene Name: interleukin 6 signal transducer
  Uniprot ID: P40189
  ENST ID: ENST00000381294
  CDS Start-End: 1-2574
atgttgacgttgcagacttggctagtgcaagccttgtttattttcctcaccactgaatctacaggtgaacttctagatccatgtggttatatcagtcctgaatctccagttgtacaacttcattctaatttcactgcagtttgtgtgctaaaggaaaaatgtatggattattttcatgtaaatgctaattacattgtctggaaaacaaaccattttactattcctaaggagcaatatactatcataaacagaacagcatccagtgtcacctttacagatatagcttcattaaatattcagctcacttgcaacattcttacattcggacagcttgaacagaatgtttatggaatcacaataatttcaggcttgcctccagaaaaacctaaaaatttgagttgcattgtgaacgaggggaagaaaatgaggtgtgagtgggatggtggaagggaaacacacttggagacaaacttcactttaaaatctgaatgggcaacacacaagtttgctgattgcaaagcaaaacgtgacacccccacctcatgcactgttgattattctactgtgtattttgtcaacattgaagtctgggtagaagcagagaatgcccttgggaaggttacatcagatcatatcaattttgatcctgtatataaagtgaagcccaatccgccacataatttatcagtgatcaactcagaggaactgtctagtatcttaaaattgacatggaccaacccaagtattaagagtgttataatactaaaatataacattcaatataggaccaaagatgcctcaacttggagccagattcctcctgaagacacagcatccacccgatcttcattcactgtccaagaccttaaaccttttacagaatatgtgtttaggattcgctgtatgaaggaagatggtaagggatactggagtgactggagtgaagaagcaagtgggatcacctatgaagatagaccatctaaagcaccaagtttctggtataaaatagatccatcccatactcaaggctacagaactgtacaactcgtgtggaagacattgcctccttttgaagccaatggaaaaatcttggattatgaagtgactctcacaagatggaaatcacatttacaaaattacacagttaatgccacaaaactgacagtaaatctcacaaatgatcgctatctagcaaccctaacagtaagaaatcttgttggcaaatcagatgcagctgttttaactatccctgcctgtgactttcaagggaacttagcagagagcaaatgctatttgataacagttactccagtatatgctgatggaccaggaagccctgaatccataaaggcataccttaaacaagctccaccttccaaaggacctactgttcggacaaaaaaagtagggaaaaacgaagctgtcttagagtgggaccaacttcctgttgatgttcagaatggatttatcagaaattatactatattttatagaaccatcattggaaatgaaactgctgtgaatgtggattcttcccacacagaatatacattgtcctctttgactagtgacacattgtacatggtacgaatggcagcatacacagatgaaggtgggaaggatggtccagaattcacttttactaccccaaagtttgctcaaggagaaattgaagccatagtcgtgcctgtttgcttagcattcctattgacaactcttctgggagtgctgttctgctttaataagcgagacctaattaaaaaacacatctggcctaatgttccagatccttcaaagagtcatattgcccagtggtcacctcacactcctccaaggcacaattttaattcaaaagatcaaatgtattcagatggcaatttcactgatgtaagtgttgtggaaatagaagcaaatgacaaaaagccttttccagaagatctgaaatcattggacctgttcaaaaaggaaaaaattaatactgaaggacacagcagtggtattggggggtcttcatgcatgtcatcttctaggccaagcatttctagcagtgatgaaaatgaatcttcacaaaacacttcgagcactgtccagtattctaccgtggtacacagtggctacagacaccaagttccgtcagtccaagtcttctcaagatccgagtctacccagcccttgttagattcagaggagcggccagaagatctacaattagtagatcatgtagatggcggtgatggtattttgcccaggcaacagtacttcaaacagaactgcagtcagcatgaatccagtccagatatttcacattttgaaaggtcaaagcaagtttcatcagtcaatgaggaagattttgttagacttaaacagcagatttcagatcatatttcacaatcctgtggatctgggcaaatgaaaatgtttcaggaagtttctgcagcagatgcttttggtccaggtactgagggacaagtagaaagatttgaaacagttggcatggaggctgcgactgatgaaggcatgcctaaaagttacttaccacagactgtacggcaaggcggctacatgcctcagtga

SEQ ID NO: 144104 - DNA, 9057 bp, Homo sapiens
  Payload ID: 8481
  Gene Symbol: IL6ST
  Gene Name: interleukin 6 signal transducer
  Uniprot ID: P40189
  ENST ID: ENST00000381298
  CDS Start-End: 314-3070
actggggtggcgcgctacctctgcggagaaggatctgacagtgttccggagccggggcgagcagccaaaaggcccgcggagtcgcgctgggccgccccggcgcagctgaaccgggggccgcgcctgccaggccgacgggtctggcccagcctggcgccaaggggttcgtgcgctgtggagacgcggagggtcgaggcggcgcggcctgagtgaaacccaatggaaaaagcatgacatttagaagtagaagacttagcttcaaatccctactccttcacttactaattttgtgatttggaaatatccgcgcaagatgttgacgttgcagacttggctagtgcaagccttgtttattttcctcaccactgaatctacaggtgaacttctagatccatgtggttatatcagtcctgaatctccagttgtacaacttcattctaatttcactgcagtttgtgtgctaaaggaaaaatgtatggattattttcatgtaaatgctaattacattgtctggaaaacaaaccattttactattcctaaggagcaatatactatcataaacagaacagcatccagtgtcacctttacagatatagcttcattaaatattcagctcacttgcaacattcttacattcggacagcttgaacagaatgtttatggaatcacaataatttcaggcttgcctccagaaaaacctaaaaatttgagttgcattgtgaacgaggggaagaaaatgaggtgtgagtgggatggtggaagggaaacacacttggagacaaacttcactttaaaatctgaatgggcaacacacaagtttgctgattgcaaagcaaaacgtgacacccccacctcatgcactgttgattattctactgtgtattttgtcaacattgaagtctgggtagaagcagagaatgcccttgggaaggttacatcagatcatatcaattttgatcctgtatataaagtgaagcccaatccgccacataatttatcagtgatcaactcagaggaactgtctagtatcttaaaattgacatggaccaacccaagtattaagagtgttataatactaaaatataacattcaatataggaccaaagatgcctcaacttggagccagattcctcctgaagacacagcatccacccgatcttcattcactgtccaagaccttaaaccttttacagaatatgtgtttaggattcgctgtatgaaggaagatggtaagggatactggagtgactggagtgaagaagcaagtgggatcacctatgaagatagaccatctaaagcaccaagtttctggtataaaatagatccatcccatactcaaggctacagaactgtacaactcgtgtggaagacattgcctccttttgaagccaatggaaaaatcttggattatgaagtgactctcacaagatggaaatcacatttacaaaattacacagttaatgccacaaaactgacagtaaatctcacaaatgatcgctatctagcaaccctaacagtaagaaatcttgttggcaaatcagatgcagctgttttaactatccctgcctgtgactttcaagctactcaccctgtaatggatcttaaagcattccccaaagataacatgctttgggtggaatggactactccaagggaatctgtaaagaaatatatacttgagtggtgtgtgttatcagataaagcaccctgtatcacagactggcaacaagaagatggtaccgtgcatcgcacctatttaagagggaacttagcagagagcaaatgctatttgataacagttactccagtatatgctgatggaccaggaagccctgaatccataaaggcataccttaaacaagctccaccttccaaaggacctactgttcggacaaaaaaagtagggaaaaacgaagctgtcttagagtgggaccaacttcctgttgatgttcagaatggatttatcagaaattatactatattttatagaaccatcattggaaatgaaactgctgtgaatgtggattcttcccacacagaatatacattgtcctctttgactagtgacacattgtacatggtacgaatggcagcatacacagatgaaggtgggaaggatggtccagaattcacttttactaccccaaagtttgctcaaggagaaattgaagccatagtcgtgcctgtttgcttagcattcctattgacaactcttctgggagtgctgttctgctttaataagcgagacctaattaaaaaacacatctggcctaatgttccagatccttcaaagagtcatattgcccagtggtcacctcacactcctccaaggcacaattttaattcaaaagatcaaatgtattcagatggcaatttcactgatgtaagtgttgtggaaatagaagcaaatgacaaaaagccttttccagaagatctgaaatcattggacctgttcaaaaaggaaaaaattaatactgaaggacacagcagtggtattggggggtcttcatgcatgtcatcttctaggccaagcatttctagcagtgatgaaaatgaatcttcacaaaacacttcgagcactgtccagtattctaccgtggtacacagtggctacagacaccaagttccgtcagtccaagtcttctcaagatccgagtctacccagcccttgttagattcagaggagcggccagaagatctacaattagtagatcatgtagatggcggtgatggtattttgcccaggcaacagtacttcaaacagaactgcagtcagcatgaatccagtccagatatttcacattttgaaaggtcaaagcaagtttcatcagtcaatgaggaagattttgttagacttaaacagcagatttcagatcatatttcacaatcctgtggatctgggcaaatgaaaatgtttcaggaagtttctgcagcagatgcttttggtccaggtactgagggacaagtagaaagatttgaaacagttggcatggaggctgcgactgatgaaggcatgcctaaaagttacttaccacagactgtacggcaaggcggctacatgcctcagtgaaggactagtagttcctgctacaacttcagcagtacctataaagtaaagctaaaatgattttatctgtgaattcagattttaaaaagtcttcactctctgaagatgatcatttgcccttaaggacaaaaatgaactgaagtttcacatgagctatttccattccagaatatctgggattctactttaagcactacataaactgactttatcctcagactagctgaatgattttgtgctgtttcaggatgtttgcactgaagaaaaacagaaagcttatctgaaatttataaaactttttgttttgctacatagaaaacagaaggtatttgaataataagcagtgatatgcttagtgagcacagctatactgattttgattagaatagtcatcagagtggcttagggacagttaatataaaagaggagcaaggtgtagaccatcatctacttctgctaaaataacttaaaaagaggtccataggccataactacatgagcccagcttttgtaatctgacaaaaaaatgaggagcagcttcgtgtatatcagtgtacacggtattccttaggtcccttccattggtagtgatgctgcgagttattactggagaaaaggaattctagagctttaacttggcagattaaaagtactcattttttattcatcaataattagtaatctcactagttttcaaaaatttgcatattattgacaacctctttgaagatgcatttcacaaactcaacagagtgccatgataagagctagggatcccccaaactatctcaagcatctaaaaaattgccatttttaaaggcttaaattgtagtagtaaaggggaaaacaggaagtagtagtaaaggggaaaaaaaaccaataaagcatctaaaaaattggcatgttaaaaggcttaaattgctaatgtgtgtatatatatatatatatatacacacacatatcattgacttttcttaagacttcagagtactgggtagatgaacactttatacagtatatatcttcagcttaaatttgttttgagtattttttttatttttaaataagtaggcaaagatttaaatttttttatttttagtaaatgtttgaggcacactaagacaacttgggcaatatttgccaaaacaaaacagaaccccaaaaaatgtacatcttgttcttagcaaatatcattattgtagagacacttaataaagagatggtattttaatgtctgcagttctgaggtagggtggaacttagttctacattgtgatttaggaatttttaaaaccttttttcttcaagggagaagtgacccaggcctcgagtttagtgctaaagccgctagtgtacttatgctgtcccctaaccaccacgtgcgatatggaagcagatgctaaatataggggttttcttagaaagtaagaggaaattagcaagcgttattagtgattgactactgctatcaagtgaattcaaaggaaacaggtttttatgccatatttaagttacagaaaccaggcatgcttagaatagtttctagaggttattggagaatagaaagctaagaaaacttggtatacatttacaatggaaatataattacactttttactctcagaatattgttcacattagacttcctgtttatcttttatattcttgcatttatataatgcctcatcctttcaaagttctttcacatattatatgatcttctttatgaaaaaaatagatgtttcattctgatatattcagtttcccactttaggcaaaagtagattaatagaatgacgaattcaaagtagatgaggaaaatcaggcacagagaagtaaaggtagggatagacccaaatttacacaacaagataatgacatctccagcttttaagttgatcatcaaaggctgggctggatttgtcttgctgtatgtgtcaggaaatttatacctattacattttccattttctcaaaatttaagtcacatgactaatatttagctgcaactttcctcataacaaatagtgtcatgaagaatgttgtagtgtgaagtttgtacatttcagggtcagatatacaatatgaactcttaatctacaggaatgagaatggaggatcattgaaggccatgatataaacaaatttgcatgttgaagcctgtataaaacatggtacagtgagtgaatatacccccatccccaagaacactttatacatattaaatggatatatgattactgtgcaaaaattcattctggaaatgaacatatatttgagcactaatatgtaatgtacacctgccctaaggagaaaataaattataaaactttttacattcaaaattactttcccaagcatgtcttagaataatctatgtgttgatgcatgtaaattgtactttaggtaggcaaagaaatctggttatttatgtaaaaactagtctaataaagttagttagtggctttatcactttaaatctttagtgtccaaaagtggtgtttaaagtaatagcacatcagaaaaccttgtctggacaaaactagttcactcactgcttctgcacctgcagttgctccctttagggttataaaataatgacccaaatgttacatgtgttgatattataacttgtcagttactgatgtctgtggtatcctaccctcatctctgaaagggataatactgaataattattagaaaactataaaacttcacactttgtaccattaaaacctaaaattttaatcttgtccttttttactatggatcagtcggcactcgggaacagcagcaaggaaaaaaagcaaatttcattcacatgttctgtgttcatacctcttctctacctaattgttcatttaaatttcagccttattccttgataagggattttaccacatgaagtcatccagtgaccctagctcttattgtgaagttagtggagtatacttagaaatgttacaactttaaaatgttacaaaacattcattaaagctcatatttaaagtagagcatctagtttgagaaatagaaatcaattattaaagatgtcttttttctacccatttaactagttaaaaccatgacatgtaaatgtagaagtagaataatcatagaattccctaaaatatttctgtttactaacatatattgaccaagtacatcaagcaggagagatcttccttcattctgttatagtccacatcattctaattttgctcagttgttattaagagcatattcctaaaccatacacttttgtttcaataaagttttattttgttgagatgaataaaataacaaagttataagctgcataagacaaaagttcaattgttcaaaaaaaatttactgggatagctttctattacaggtattgttagattatattgtgctgataagattactttctaaaaaatttgtacttttctgtaaattaaaagaatatggagtcataaaatggcaagtgttttaggattagcctaaaattggacattgtcattgatttcaaagaaggtatgaactagcagtcttacagcctaattcttctttggactggtccttggcagcagttccttttcagactcgataaacagaattcagatgatgtaagtcaaaacaaaactttacaaagccaagcgtattatcttttgcattaacctatttttttccatcatacatgctactagtatgtgcattagcatgatattctcatatacattgcattaaaaattaaaaggtggcagctcagggtgagctcttctgttgctcatttgttcctaaatttttaagggctttttctcagtcaatagtttgtacaaactggttagtttaacttcattacccatttcattaaagttgatgggtcgtgtgatgagatgcatttaaggccgatagtgatagatgttttttttatttcttgaacacaggctttgtctgaatgatgttcttttatctcttgaacacaagctttgaatgataactacaggttttaagtgctgttacattaataccataatgtgatgtgttagaaacaaagggatatttcaaaggtagatatttgaaaattctctagtctcaatatgtatgtgtattgaatatactctaaaaataaatgtgcaatttgctagtaggacaatgcagtgactgactagcattaggtatgtttcttttatatcctagctatgtcccactttcttctaagtgcaatcctttcatgttcacttgctgttttaccccatctactctaacttcatttggaaggcttgtctagagtatagcatgtatttttacctttgcagtgaattgcatgtgctaattgtaaccacagctatttttatgttgacataactccaaatgttatattaaatgttctattatatattagctctaatcccttaagtaaattttaagaaataaatacttgttcaaattttttttctgtatgtggttactatcatctgactatgcatatttgtaacagcatttatcattagtggtgttagctaaataagcatcttagtgtaaatgagatgcttcgtgtgggttttgtgacattttaaatgacataatggaatgtgatttaaaagaaaaccagtacactatcttggtcttaataacatagaatggagatggcaaatttatccactagttttccagatttactatttaatagctgaggtctgaaatcgtagcatcctccctcctagtggacattaaaaaaaaaaaaaaaaaaaaaaacctacttggttgtcaagagcccaagtatggaggtgctgcgccatcttgtggcctgtctgtgcccaccctgcactctgctggagtctccatccttgttgcagtgagacttgaagttcaagattgatacatggcatcctcctgctacttcttgaggttactaagtagtatatgaaactaatcagtcagcaagtccacctggaaggaaaagaaaatctcaactattaatgtgccttcacattgtgattttgtctaaaaaaatgtagtgagtcaaaaaacccacaagccagccaacagtaactccttcacatatataccagagtttatagaaataacatgtcagctttgggctatgtgctcctttgtttaaaatcttctatttggttatggcttgtataggctcaagcctgatttctttaaggtgtggtggctcatcttatcctaatgtgtatgatagatacagtccatcctgctttggaaaagattatgtaactccttgagagcatactctttctctagcccaaaggcagtgagagagttttcttgttcaggattgcttaactttccatttaagctttttctttttaaattaatacaaacttctacactttcaaaatacgaaatatattacaactgcgtataggctcttccatacttaagtccagtgcttgggcaagttaatggagtgaaagactacaagcaaagaggaactgaggtagaaaaagaagaatgtgtgaaagcagcaggaagctcagccaactcgaaagcagggtgaacagcttgagtcctgttgctgctgatcggggttggctcttggacaacttagtaagatcatggaaaggctgcttgggttctccatagaaaagttctgtctccatcaagggaggaaaatgtacctttcaactcaaaattcaatatttgtttttaaatatagctattttccccaaccgctaaagattttcaacagatacgaagccagagcttagttttagaaacctgtggacattcaaacctgattctttattccctgtgactatggttatgtcattttacatgtcaaaaaagtgtatctagaattgtcatttcttatttttgagctttttttagtgagaattatcccctcacttaaatggctttttatttaaacatctgtgcattctgtatgaaattgtagtctttctgggataacatggtgagctatatggtggtaatccacacacacaaaaataaaagccaaaaaaaaaccaaaa

SEQ ID NO: 144105 - DNA, 3031 bp, Homo sapiens
  Payload ID: 8481
  Gene Symbol: IL6ST
  Gene Name: interleukin 6 signal transducer
  ENST ID: ENST00000503773
  CDS Start-End: 113-1114
cggcctgagtgaaacccaatggaaaaagcatgacatttagaagtagaagacttagcttcaaatccctactccttcacttactaattttgtgatttggaaatatccgcgcaagatgttgacgttgcagacttggctagtgcaagccttgtttattttcctcaccactgaatctacaggtgaacttctagatccatgtggttatatcagtcctgaatctccagttgtacaacttcattctaatttcactgcagtttgtgtgctaaaggaaaaatgtatggattattttcatgtaaatgctaattacattgtctggaaaacaaaccattttactattcctaaggagcaatatactatcataaacagaacagcatccagtgtcacctttacagatatagcttcattaaatattcagctcacttgcaacattcttacattcggacagcttgaacagaatgtttatggaatcacaataatttcaggcttgcctccagaaaaacctaaaaatttgagttgcattgtgaacgaggggaagaaaatgaggtgtgagtgggatggtggaagggaaacacacttggagacaaacttcactttaaaatctgaatgggcaacacacaagtttgctgattgcaaagcaaaacgtgacacccccacctcatgcactgttgattattctactgtgtattttgtcaacattgaagtctgggtagaagcagagaatgcccttgggaaggttacatcagatcatatcaattttgatcctgtatataaagtgaagcccaatccgccacataatttatcagtgatcaactcagaggaactgtctagtatcttaaaattgacatggaccaacccaagtattaagagtgttataatactaaaatataacattcaatataggaccaaagatgcctcaacttggagccagattcctcctgaagacacagcatccacccgatcttcattcactgtccaagaccttaaaccttttacagaatatgtgtttaggattcgctgtatgaaggaagatggtaagggatactggagtgactggagtgaagaagcaagtgggatcacctatgaagatacacttgataagcccctgggaagcggttgatcctggaattttggttggaccatctaaagcaccaagtttctggtataaaatagatccatcccatactcaaggctacagaactgtacaactcgtgtggaagacattgcctccttttgaagccaatggaaaaatcttggattatgaagtgactctcacaagatggaaatcacatttacaaaattacacagttaatgccacaaaactgacagtaaatctcacaaatgatcgctatctagcaaccctaacagtaagaaatcttgttggcaaatcagatgcagctgttttaactatccctgcctgtgactttcaagctactcaccctgtaatggatcttaaagcattccccaaagataacatgctttgggtggaatggactactccaagggaatctgtaaagaaatatatacttgagtggtgtgtgttatcagataaagcaccctgtatcacagactggcaacaagaagatggtaccgtgcatcgcacctatttaagagggaacttagcagagagcaaatgctatttgataacagttactccagtatatgctgatggaccaggaagccctgaatccataaaggcataccttaaacaagctccaccttccaaaggacctactgttcggacaaaaaaagtagggaaaaacgaagctgtcttagagtgggaccaacttcctgttgatgttcagaatggatttatcagaaattatactatattttatagaaccatcattggaaatgaaactgctgtgaatgtggattcttcccacacagaatatacattgtcctctttgactagtgacacattgtacatggtacgaatggcagcatacacagatgaaggtgggaaggatggtccagaattcacttttactaccccaaagtttgctcaaggagaaattgaagccatagtcgtgcctgtttgcttagcattcctattgacaactcttctgggagtgctgttctgctttaataagcgagacctaattaaaaaacacatctggcctaatgttccagatccttcaaagagtcatattgcccagtggtcacctcacactcctccaaggcacaattttaattcaaaagatcaaatgtattcagatggcaatttcactgatgtaagtgttgtggaaatagaagcaaatgacaaaaagccttttccagaagatctgaaatcattggacctgttcaaaaaggaaaaaattaatactgaaggacacagcagtggtattggggggtcttcatgcatgtcatcttctaggccaagcatttctagcagtgatgaaaatgaatcttcacaaaacacttcgagcactgtccagtattctaccgtggtacacagtggctacagacaccaagttccgtcagtccaagtcttctcaagatccgagtctacccagcccttgttagattcagaggagcggccagaagatctacaattagtagatcatgtagatggcggtgatggtattttgcccaggcaacagtacttcaaacagaactgcagtcagcatgaatccagtccagatatttcacattttgaaaggtcaaagcaagtttcatcagtcaatgaggaagattttgttagacttaaacagcagatttcagatcatatttcacaatcctgtggatctgggcaaatgaaaatgtttcaggaagtttctgcagcagatgcttttggtccaggtactgagggacaagtagaaagatttgaaacagttggcatggaggctgcgactgatgaaggcatgcctaaaagttacttaccacagactgtacggcaaggcggctacatgcctcagtgaaggactagtagttcctgctacaacttcagcagtacctataaagtaaagctaaaatgattttatctgtgaattcagattttaaaaagtcttcactctctgaagatgatcatttgccc

SEQ ID NO: 144106 - DNA, 1878 bp, Homo sapiens
  Payload ID: 8481
  Gene Symbol: IL6ST
  Gene Name: interleukin 6 signal transducer
  Uniprot ID: P40189
  ENST ID: ENST00000522633
  CDS Start-End: 93-1082
ggaaaaagcatgacatttagaagtagaagacttagcttcaaatccctactccttcacttactaattttgtgatttggaaatatccgcgcaagatgttgacgttgcagacttggctagtgcaagccttgtttattttcctcaccactgaatctacaggtgaacttctagatccatgtggttatatcagtcctgaatctccagttgtacaacttcattctaatttcactgcagtttgtgtgctaaaggaaaaatgtatggattattttcatgtaaatgctaattacattgtctggaaaacaaaccattttactattcctaaggagcaatatactatcataaacagaacagcatccagtgtcacctttacagatatagcttcattaaatattcagctcacttgcaacattcttacattcggacagcttgaacagaatgtttatggaatcacaataatttcaggcttgcctccagaaaaacctaaaaatttgagttgcattgtgaacgaggggaagaaaatgaggtgtgagtgggatggtggaagggaaacacacttggagacaaacttcactttaaaatctgaatgggcaacacacaagtttgctgattgcaaagcaaaacgtgacacccccacctcatgcactgttgattattctactgtgtattttgtcaacattgaagtctgggtagaagcagagaatgcccttgggaaggttacatcagatcatatcaattttgatcctgtatataaagtgaagcccaatccgccacataatttatcagtgatcaactcagaggaactgtctagtatcttaaaattgacatggaccaacccaagtattaagagtgttataatactaaaatataacattcaatataggaccaaagatgcctcaacttggagccagattcctcctgaagacacagcatccacccgatcttcattcactgtccaagaccttaaaccttttacagaatatgtgtttaggattcgctgtatgaaggaagatggtaagggatactggagtgactggagtgaagaagcaagtgggatcacctatgaagataacattgcctccttttgaagccaatggaaaaatcttggattatgaagtgactctcacaagatggaaatcacatttacaaaattacacagttaatgccacaaaactgacagtaaatctcacaaatgatcgctatctagcaaccctaacagtaagaaatcttgttggcaaatcagatgcagctgttttaactatccctgcctgtgactttcaagctactcaccctgtaatggatcttaaagcattccccaaagataacatgctttgggtggaatggactactccaagggaatctgtaaagaaatatatacttgagtggtgtgtgttatcagataaagcaccctgtatcacagactggcaacaagaagatggtaccgtgcatcgcacctatttaagagggaacttagcagagagcaaatgctatttgataacagttactccagtatatgctgatggaccaggaagccctgaatccataaaggcataccttaaacaagctccaccttccaaaggacctactgttcggacaaaaaaagtagggaaaaacgaagctgtcttagagtgggaccaacttcctgttgatgttcagaatggatttatcagaaattatactatattttatagaaccatcattggaaatgaaactgctgtgaatgtggattcttcccacacagaatatacattgtcctctttgactagtgacacattgtacatggtacgaatggcagcatacacagatgaaggtgggaaggatggtccagaattcacttttactaccccaaagtttgctcaaggagaaattgaagccatagtcgtg

SEQ ID NO: 144107 - DNA, 3007 bp, Homo sapiens
  Payload ID: 8481
  Gene Symbol: IL6ST
  Gene Name: interleukin 6 signal transducer
  Uniprot ID: P40189
  ENST ID: ENST00000502326
  CDS Start-End: 197-2953
aggatctgacagtgttccggagccggggcgagcagccaaaaggcccgcggagtcgcgctgggccgccccggcgcagctgaaccgggggccgcgcctgccaggccgacgggtctggcccagcctggcgccaaggggttcgtgcgctgtggagacgcggagggtcgaggcggcgcggcctgagaaatatccgcgcaagatgttgacgttgcagacttggctagtgcaagccttgtttattttcctcaccactgaatctacaggtgaacttctagatccatgtggttatatcagtcctgaatctccagttgtacaacttcattctaatttcactgcagtttgtgtgctaaaggaaaaatgtatggattattttcatgtaaatgctaattacattgtctggaaaacaaaccattttactattcctaaggagcaatatactatcataaacagaacagcatccagtgtcacctttacagatatagcttcattaaatattcagctcacttgcaacattcttacattcggacagcttgaacagaatgtttatggaatcacaataatttcaggcttgcctccagaaaaacctaaaaatttgagttgcattgtgaacgaggggaagaaaatgaggtgtgagtgggatggtggaagggaaacacacttggagacaaacttcactttaaaatctgaatgggcaacacacaagtttgctgattgcaaagcaaaacgtgacacccccacctcatgcactgttgattattctactgtgtattttgtcaacattgaagtctgggtagaagcagagaatgcccttgggaaggttacatcagatcatatcaattttgatcctgtatataaagtgaagcccaatccgccacataatttatcagtgatcaactcagaggaactgtctagtatcttaaaattgacatggaccaacccaagtattaagagtgttataatactaaaatataacattcaatataggaccaaagatgcctcaacttggagccagattcctcctgaagacacagcatccacccgatcttcattcactgtccaagaccttaaaccttttacagaatatgtgtttaggattcgctgtatgaaggaagatggtaagggatactggagtgactggagtgaagaagcaagtgggatcacctatgaagatagaccatctaaagcaccaagtttctggtataaaatagatccatcccatactcaaggctacagaactgtacaactcgtgtggaagacattgcctccttttgaagccaatggaaaaatcttggattatgaagtgactctcacaagatggaaatcacatttacaaaattacacagttaatgccacaaaactgacagtaaatctcacaaatgatcgctatctagcaaccctaacagtaagaaatcttgttggcaaatcagatgcagctgttttaactatccctgcctgtgactttcaagctactcaccctgtaatggatcttaaagcattccccaaagataacatgctttgggtggaatggactactccaagggaatctgtaaagaaatatatacttgagtggtgtgtgttatcagataaagcaccctgtatcacagactggcaacaagaagatggtaccgtgcatcgcacctatttaagagggaacttagcagagagcaaatgctatttgataacagttactccagtatatgctgatggaccaggaagccctgaatccataaaggcataccttaaacaagctccaccttccaaaggacctactgttcggacaaaaaaagtagggaaaaacgaagctgtcttagagtgggaccaacttcctgttgatgttcagaatggatttatcagaaattatactatattttatagaaccatcattggaaatgaaactgctgtgaatgtggattcttcccacacagaatatacattgtcctctttgactagtgacacattgtacatggtacgaatggcagcatacacagatgaaggtgggaaggatggtccagaattcacttttactaccccaaagtttgctcaaggagaaattgaagccatagtcgtgcctgtttgcttagcattcctattgacaactcttctgggagtgctgttctgctttaataagcgagacctaattaaaaaacacatctggcctaatgttccagatccttcaaagagtcatattgcccagtggtcacctcacactcctccaaggcacaattttaattcaaaagatcaaatgtattcagatggcaatttcactgatgtaagtgttgtggaaatagaagcaaatgacaaaaagccttttccagaagatctgaaatcattggacctgttcaaaaaggaaaaaattaatactgaaggacacagcagtggtattggggggtcttcatgcatgtcatcttctaggccaagcatttctagcagtgatgaaaatgaatcttcacaaaacacttcgagcactgtccagtattctaccgtggtacacagtggctacagacaccaagttccgtcagtccaagtcttctcaagatccgagtctacccagcccttgttagattcagaggagcggccagaagatctacaattagtagatcatgtagatggcggtgatggtattttgcccaggcaacagtacttcaaacagaactgcagtcagcatgaatccagtccagatatttcacattttgaaaggtcaaagcaagtttcatcagtcaatgaggaagattttgttagacttaaacagcagatttcagatcatatttcacaatcctgtggatctgggcaaatgaaaatgtttcaggaagtttctgcagcagatgcttttggtccaggtactgagggacaagtagaaagatttgaaacagttggcatggaggctgcgactgatgaaggcatgcctaaaagttacttaccacagactgtacggcaaggcggctacatgcctcagtgaaggactagtagttcctgctacaacttcagcagtacctataaagtaaagctaaaa

SEQ ID NO: 144108 - DNA, 168 bp, Homo sapiens
  Payload ID: 8481
  Gene Symbol: IL6ST
  Gene Name: interleukin 6 signal transducer
  ENST ID: ENST00000396816
  CDS Start-End: 1-168
atgttgacgttgcagacttggctagtgcaagccttgtttattttcctcaccactgaatctacagggcaacacacaagtttgctgattgcaaagcaaaacgtgacacccccacctcatgcactgttgattattctactgtgtattttgtcaacattgaagtctgggtag

SEQ ID NO: 144109 - DNA, 2076 bp, Homo sapiens
  Payload ID: 8482
  Gene Symbol: IL7
  Gene Name: interleukin 7
  Uniprot ID: P13232
  ENST ID: ENST00000263851
  CDS Start-End: 602-1135
acatccgcggcaacgcctccttggtgtcgtccgcttccaataacccagcttgcgtcctgcacacttgtggcttccgtgcacacattaacaactcatggttctagctcccagtcgccaagcgttgccaaggcgttgagagatcatctgggaagtcttttacccagaattgctttgattcaggccagctggtttttcctgcggtgattcggaaattcgcgaattcctctggtcctcatccaggtgcgcgggaagcaggtgcccaggagagaggggataatgaagattccatgctgatgatcccaaagattgaacctgcagaccaagcgcaaagtagaaactgaaagtacactgctggcggatcctacggaagttatggaaaaggcaaagcgcagagccacgccgtagtgtgtgccgccccccttgggatggatgaaactgcagtcgcggcgtgggtaagaggaaccagctgcagagatcaccctgcccaacacagactcggcaactccgcggaagaccagggtcctgggagtgactatgggcggtgagagcttgctcctgctccagttgcggtcatcatgactacgcccgcctcccgcagaccatgttccatgtttcttttaggtatatctttggacttcctcccctgatccttgttctgttgccagtagcatcatctgattgtgatattgaaggtaaagatggcaaacaatatgagagtgttctaatggtcagcatcgatcaattattggacagcatgaaagaaattggtagcaattgcctgaataatgaatttaacttttttaaaagacatatctgtgatgctaataaggaaggtatgtttttattccgtgctgctcgcaagttgaggcaatttcttaaaatgaatagcactggtgattttgatctccacttattaaaagtttcagaaggcacaacaatactgttgaactgcactggccaggttaaaggaagaaaaccagctgccctgggtgaagcccaaccaacaaagagtttggaagaaaataaatctttaaaggaacagaaaaaactgaatgacttgtgtttcctaaagagactattacaagagataaaaacttgttggaataaaattttgatgggcactaaagaacactgaaaaatatggagtggcaatatagaaacacgaactttagctgcatcctccaagaatctatctgcttatgcagtttttcagagtggaatgcttcctagaagttactgaatgcaccatggtcaaaacggattagggcatttgagaaatgcatattgtattactagaagatgaatacaaacaatggaaactgaatgctccagtcaacaaactatttcttatatatgtgaacatttatcaatcagtataattctgtactgatttttgtaagacaatccatgtaaggtatcagttgcaataatacttctcaaacctgtttaaatatttcaagacattaaatctatgaagtatataatggtttcaaagattcaaaattgacattgctttactgtcaaaataattttatggctcactatgaatctattatactgtattaagagtgaaaattgtcttcttctgtgctggagatgttttagagttaacaatgatatatggataatgccggtgagaataagagagtcataaaccttaagtaagcaacagcataacaaggtccaagatacctaaaagagatttcaagagatttaattaatcatgaatgtgtaacacagtgccttcaataaatggtatagcaaatgttttgacatgaaaaaaggacaatttcaaaaaaataaaataaaataaaaataaattcacctagtctaaggatgctaaaccttagtactgagttacattgtcatttatatagattataacttgtctaaataagtttgcaatttgggagatatatttttaagataataatatatgtttaccttttaattaatgaaatatctgtatttaattttgacactatatctgtatataaaatattttcatacagcattacaaattgcttactttggaatacatttctcctttgataaaataaatgagctatgtattaa

SEQ ID NO: 144110 - DNA, 1888 bp, Homo sapiens
  Payload ID: 8482
  Gene Symbol: IL7
  Gene Name: interleukin 7
  ENST ID: ENST00000379113
  CDS Start-End: 602-949
acatccgcggcaacgcctccttggtgtcgtccgcttccaataacccagcttgcgtcctgcacacttgtggcttccgtgcacacattaacaactcatggttctagctcccagtcgccaagcgttgccaaggcgttgagagatcatctgggaagtcttttacccagaattgctttgattcaggccagctggtttttcctgcggtgattcggaaattcgcgaattcctctggtcctcatccaggtgcgcgggaagcaggtgcccaggagagaggggataatgaagattccatgctgatgatcccaaagattgaacctgcagaccaagcgcaaagtagaaactgaaagtacactgctggcggatcctacggaagttatggaaaaggcaaagcgcagagccacgccgtagtgtgtgccgccccccttgggatggatgaaactgcagtcgcggcgtgggtaagaggaaccagctgcagagatcaccctgcccaacacagactcggcaactccgcggaagaccagggtcctgggagtgactatgggcggtgagagcttgctcctgctccagttgcggtcatcatgactacgcccgcctcccgcagaccatgttccatgtttcttttaggtatatctttggacttcctcccctgatccttgttctgttgccagtagcatcatctgattgtgatattgaaggtaaagatggcaaacaatatgagagtgttctaatggtcagcatcgatcaattattggacagcatgaaagaaattggtagcaattgcctgaataatgaatttaacttttttaaaagacatatctgtgatgctaataaggaagaaaataaatctttaaaggaacagaaaaaactgaatgacttgtgtttcctaaagagactattacaagagataaaaacttgttggaataaaattttgatgggcactaaagaacactgaaaaatatggagtggcaatatagaaacacgaactttagctgcatcctccaagaatctatctgcttatgcagtttttcagagtggaatgcttcctagaagttactgaatgcaccatggtcaaaacggattagggcatttgagaaatgcatattgtattactagaagatgaatacaaacaatggaaactgaatgctccagtcaacaaactatttcttatatatgtgaacatttatcaatcagtataattctgtactgatttttgtaagacaatccatgtaaggtatcagttgcaataatacttctcaaacctgtttaaatatttcaagacattaaatctatgaagtatataatggtttcaaagattcaaaattgacattgctttactgtcaaaataattttatggctcactatgaatctattatactgtattaagagtgaaaattgtcttcttctgtgctggagatgttttagagttaacaatgatatatggataatgccggtgagaataagagagtcataaaccttaagtaagcaacagcataacaaggtccaagatacctaaaagagatttcaagagatttaattaatcatgaatgtgtaacacagtgccttcaataaatggtatagcaaatgttttgacatgaaaaaaggacaatttcaaaaaaataaaataaaataaaaataaattcacctagtctaaggatgctaaaccttagtactgagttacattgtcatttatatagattataacttgtctaaataagtttgcaatttgggagatatatttttaagataataatatatgtttaccttttaattaatgaaatatctgtatttaattttgacactatatctgtatataaaatattttcatacagcattacaaattgcttactttggaatacatttctcctttgataaaataaatgagctatgtatt

SEQ ID NO: 144111 - DNA, 456 bp, Homo sapiens
  Payload ID: 8482
  Gene Symbol: IL7
  Gene Name: interleukin 7
  Uniprot ID: P13232
  ENST ID: ENST00000520269
  CDS Start-End: 7-408
cagaccatgttccatgtttcttttaggtatatctttggacttcctcccctgatccttgttctgttgccagtagcatcatctgattgtgatattgaaggtaaagatggcaaacaatatgagagtgttctaatggtcagcatcgatcaattattggacagcatgaaagaaattggtagcaattgcctgaataatgaatttaacttttttaaaagacatatctgtgatgctaataaggttaaaggaagaaaaccagctgccctgggtgaagcccaaccaacaaagagtttggaagaaaataaatctttaaaggaacagaaaaaactgaatgacttgtgtttcctaaagagactattacaagagataaaaacttgttggaataaaattttgatgggcactaaagaacactgaaaaatatggagtggcaatatagaaacacgaactttagctgcatcctcc

SEQ ID NO: 144112 - DNA, 1055 bp, Homo sapiens
  Payload ID: 8482
  Gene Symbol: IL7
  Gene Name: interleukin 7
  ENST ID: ENST00000520317
  CDS Start-End: 530-643
tccgtgcacacattaacaactcatggttctagctcccagtcgccaagcgttgccaaggcgttgagagatcatctgggaagtcttttacccagaattgctttgattcaggccagctggtttttcctgcggtgattcggaaattcgcgaattcctctggtcctcatccaggtgcgcgggaagcaggtgcccaggagagaggggataatgaagattccatgctgatgatcccaaagattgaacctgcagaccaagcgcaaagtagaaactgaaagtacactgctggcggatcctacggaagttatggaaaaggcaaagcgcagagccacgccgtagtgtgtgccgccccccttgggatggatgaaactgcagtcgcggcgtgggtaagaggaaccagctgcagagatcaccctgcccaacacagactcggcaactccgcggaagaccagggtcctgggagtgactatgggcggtgagagcttgctcctgctccagttgcggtcatcatgactacgcccgcctcccgcagaccatgttccatgtttcttttaggtatatctttggacttcctcccctgatccttgttctgttgccagtagcatcatctgattgtgatattgaaggacagcatgaaagaaattggtagcaattgcctgaataatgaatttaacttttttaaaagacatatctgtgatgctaataaggaaggtatgtttttattccgtgctgctcgcaagttgaggcaatttcttaaaatgaatagcactggtgattttgatctccacttattaaaagtttcagaaggcacaacaatactgttgaactgcactggccaggttaaaggaagaaaaccagctgccctgggtgaagcccaaccaacaaagagtttggaagaaaataaatctttaaaggaacagaaaaaactgaatgacttgtgtttcctaaagagactattacaagagataaaaacttgttggaataaaattttgatgggcactaaagaacactgaaaaatatggagtggcaatatagaaacacgaactttagctgcatcctcc

SEQ ID NO: 144113 - DNA, 400 bp, Homo sapiens
  Payload ID: 8482
  Gene Symbol: IL7
  Gene Name: interleukin 7
  ENST ID: ENST00000520215
  CDS Start-End: 7-120
cagaccatgttccatgtttcttttaggtatatctttggacttcctcccctgatccttgttctgttgccagtagcatcatctgattgtgatattgaaggacagcatgaaagaaattggtagcaattgcctgaataatgaatttaacttttttaaaagacatatctgtgatgctaataaggttaaaggaagaaaaccagctgccctgggtgaagcccaaccaacaaagagtttggaagaaaataaatctttaaaggaacagaaaaaactgaatgacttgtgtttcctaaagagactattacaagagataaaaacttgttggaataaaattttgatgggcactaaagaacactgaaaaatatggagtggcaatatagaaacacgaactttagctgcatcctcc

SEQ ID NO: 144114 - DNA, 1940 bp, Homo sapiens
  Payload ID: 8482
  Gene Symbol: IL7
  Gene Name: interleukin 7
  ENST ID: ENST00000518982
  CDS Start-End: 543-758
cacacttgtggcttccgtgcacacattaacaactcatggttctagctcccagtcgccaagcgttgccaaggcgttgagagatcatctgggaagtcttttacccagaattgctttgattcaggccagctggtttttcctgcggtgattcggaaattcgcgaattcctctggtcctcatccaggtgcgcgggaagcaggtgcccaggagagaggggataatgaagattccatgctgatgatcccaaagattgaacctgcagaccaagcgcaaagtagaaactgaaagtacactgctggcggatcctacggaagttatggaaaaggcaaagcgcagagccacgccgtagtgtgtgccgccccccttgggatggatgaaactgcagtcgcggcgtgggtaagaggaaccagctgcagagatcaccctgcccaacacagactcggcaactccgcggaagaccagggtcctgggagtgactatgggcggtgagagcttgctcctgctccagttgcggtcatcatgactacgcccgcctcccgcagaccatgttccatgtttcttttaggtatatctttggacttcctcccctgatccttgttctgttgccagtagcatcatctgattgtgatattgaaggtaaagatggcaaacaatatgagagtgttctaatggtcagcatcgatcaattattgaatcagccctacaaaaagaaagaaaaaagaacagaaaggaagcagcaatcagctatgagcaataattagacattcgtttgctagctctagcacatgtgaccatgaagagtaactgtgaaccatattgactttctctcctgaaaagaaaaatatgaaaaaaattcagaagaaaactgtcctatcacaaagaatacagaaattgggacagcatgaaagaaattggtagcaattgcctgaataatgaatttaacttttttaaaagacatatctgtgatgctaataaggaaggtatgtttttattccgtgctgctcgcaagttgaggcaatttcttaaaatgaatagcactggtgattttgatctccacttattaaaagtttcagaaggcacaacaatactgttgaactgcactggccaggttaaaggaagaaaaccagctgccctgggtgaagcccaaccaacaaagagtttgaaaataaatctttaaaggaacagaaaaaactgaatgacttgtgtttcctaaagagactattacaagagataaaaacttgttggaataaaattttgatgggcactaaagaacactgaaaaatatggagtggcaatatagaaacacgaactttagctgcatcctccaagaatctatctgcttatgcagtttttcagagtggaatgcttcctagaagttactgaatgcaccatggtcaaaacggattagggcatttgagaaatgcatattgtattactagaagatgaatacaaacaatggaaactgaatgctccagtcaacaaactatttcttatatatgtgaacatttatcaatcagtataattctgtactgatttttgtaagacaatccatgtaaggtatcagttgcaataatacttctcaaacctgtttaaatatttcaagacattaaatctatgaagtatataatggtttcaaagattcaaaattgacattgctttactgtcaaaataattttatggctcactatgaatctattatactgtattaagagtgaaaattgtcttcttctgtgctggagatgttttagagttaacaatgatatatggataatgccggtgagaataagagagtcataaaccttaagtaagcaacagcataacaaggtccaagatacctaaaagagatttcaagagatttaattaatcatgaatgtgtaacacagtgccttcaataaatggtatagcaaatgttttgacatgaaaaaaggacaatttcaaaaaaa

SEQ ID NO: 144115 - DNA, 2020 bp, Homo sapiens
  Payload ID: 8482
  Gene Symbol: IL7
  Gene Name: interleukin 7
  ENST ID: ENST00000541183
  CDS Start-End: 602-1081
acatccgcggcaacgcctccttggtgtcgtccgcttccaataacccagcttgcgtcctgcacacttgtggcttccgtgcacacattaacaactcatggttctagctcccagtcgccaagcgttgccaaggcgttgagagatcatctgggaagtcttttacccagaattgctttgattcaggccagctggtttttcctgcggtgattcggaaattcgcgaattcctctggtcctcatccaggtgcgcgggaagcaggtgcccaggagagaggggataatgaagattccatgctgatgatcccaaagattgaacctgcagaccaagcgcaaagtagaaactgaaagtacactgctggcggatcctacggaagttatggaaaaggcaaagcgcagagccacgccgtagtgtgtgccgccccccttgggatggatgaaactgcagtcgcggcgtgggtaagaggaaccagctgcagagatcaccctgcccaacacagactcggcaactccgcggaagaccagggtcctgggagtgactatgggcggtgagagcttgctcctgctccagttgcggtcatcatgactacgcccgcctcccgcagaccatgttccatgtttcttttaggtatatctttggacttcctcccctgatccttgttctgttgccagtagcatcatctgattgtgatattgaaggtaaagatggcaaacaatatgagagtgttctaatggtcagcatcgatcaattattggacagcatgaaagaaattggtagcaattgcctgaataatgaatttaacttttttaaaagacatatctgtgatgctaataaggaaggtatgtttttattccgtgctgctcgcaagttgaggcaatttcttaaaatgaatagcactggtgattttgatctccacttattaaaagtttcagaaggcacaacaatactgttgaactgcactggccaggaagaaaataaatctttaaaggaacagaaaaaactgaatgacttgtgtttcctaaagagactattacaagagataaaaacttgttggaataaaattttgatgggcactaaagaacactgaaaaatatggagtggcaatatagaaacacgaactttagctgcatcctccaagaatctatctgcttatgcagtttttcagagtggaatgcttcctagaagttactgaatgcaccatggtcaaaacggattagggcatttgagaaatgcatattgtattactagaagatgaatacaaacaatggaaactgaatgctccagtcaacaaactatttcttatatatgtgaacatttatcaatcagtataattctgtactgatttttgtaagacaatccatgtaaggtatcagttgcaataatacttctcaaacctgtttaaatatttcaagacattaaatctatgaagtatataatggtttcaaagattcaaaattgacattgctttactgtcaaaataattttatggctcactatgaatctattatactgtattaagagtgaaaattgtcttcttctgtgctggagatgttttagagttaacaatgatatatggataatgccggtgagaataagagagtcataaaccttaagtaagcaacagcataacaaggtccaagatacctaaaagagatttcaagagatttaattaatcatgaatgtgtaacacagtgccttcaataaatggtatagcaaatgttttgacatgaaaaaaggacaatttcaaaaaaataaaataaaataaaaataaattcacctagtctaaggatgctaaaccttagtactgagttacattgtcatttatatagattataacttgtctaaataagtttgcaatttgggagatatatttttaagataataatatatgtttaccttttaattaatgaaatatctgtatttaattttgacactatatctgtatataaaatattttcatacagcattacaaattgcttactttggaatacatttctcctttgataaaataaatgagctatgtatt

SEQ ID NO: 144116 - DNA, 4626 bp, Homo sapiens
  Payload ID: 8483
  Gene Symbol: IL7R
  Gene Name: interleukin 7 receptor
  Uniprot ID: P16871
  ENST ID: ENST00000303115
  CDS Start-End: 130-1509
gtggttagataagtataaagccctagatctaagcttctctgtcttcctccctccctcccttcctcttactctcattcatttcatacacactggctcacacatctactctctctctctatctctctcagaatgacaattctaggtacaacttttggcatggttttttctttacttcaagtcgtttctggagaaagtggctatgctcaaaatggagacttggaagatgcagaactggatgactactcattctcatgctatagccagttggaagtgaatggatcgcagcactcactgacctgtgcttttgaggacccagatgtcaacatcaccaatctggaatttgaaatatgtggggccctcgtggaggtaaagtgcctgaatttcaggaaactacaagagatatatttcatcgagacaaagaaattcttactgattggaaagagcaatatatgtgtgaaggttggagaaaagagtctaacctgcaaaaaaatagacctaaccactatagttaaacctgaggctccttttgacctgagtgtcgtctatcgggaaggagccaatgactttgtggtgacatttaatacatcacacttgcaaaagaagtatgtaaaagttttaatgcacgatgtagcttaccgccaggaaaaggatgaaaacaaatggacgcatgtgaatttatccagcacaaagctgacactcctgcagagaaagctccaaccggcagcaatgtatgagattaaagttcgatccatccctgatcactattttaaaggcttctggagtgaatggagtccaagttattacttcagaactccagagatcaataatagctcaggggagatggatcctatcttactaaccatcagcattttgagttttttctctgtcgctctgttggtcatcttggcctgtgtgttatggaaaaaaaggattaagcctatcgtatggcccagtctccccgatcataagaagactctggaacatctttgtaagaaaccaagaaaaaatttaaatgtgagtttcaatcctgaaagtttcctggactgccagattcatagggtggatgacattcaagctagagatgaagtggaaggttttctgcaagatacgtttcctcagcaactagaagaatctgagaagcagaggcttggaggggatgtgcagagccccaactgcccatctgaggatgtagtcatcactccagaaagctttggaagagattcatccctcacatgcctggctgggaatgtcagtgcatgtgacgcccctattctctcctcttccaggtccctagactgcagggagagtggcaagaatgggcctcatgtgtaccaggacctcctgcttagccttgggactacaaacagcacgctgccccctccattttctctccaatctggaatcctgacattgaacccagttgctcagggtcagcccattcttacttccctgggatcaaatcaagaagaagcatatgtcaccatgtccagcttctaccaaaaccagtgaagtgtaagaaacccagactgaacttaccgtgagcgacaaagatgatttaaaagggaagtctagagttcctagtctccctcacagcacagagaagacaaaattagcaaaaccccactacacagtctgcaagattctgaaacattgctttgaccactcttcctgagttcagtggcactcaacatgagtcaagagcatcctgcttctaccatgtggatttggtcacaaggtttaaggtgacccaatgattcagctatttaaaaaaaaaagaggaaagaatgaaagagtaaaggaaatgattgaggagtgaggaaggcaggaagagagcatgagaggaaagaaagaaaggaaaataaaaaatgatagttgccattattaggatttaatatatatccagtgctttgcaagtgctctgcgcaccttgtctcactccatcctgacaataatcctgggaggtgtgtgcaattactacgactactctcttttttatagatcattaaattcagaactaaggagttaagtaacttgtccaagttgttcacacagtgaagggaggggccaagatatgatggctgggagtctaattgcagttccctgagccatgtgcctttctcttcactgaggactgccccattcttgagtgccaaacgtcactagtaacagggtgtgcctagataatttatgatccaaactgagtcagtttggaaagtgaaagggaaacttacatataatccctccgggacaatgagcaaaaactaggactgtccccagacaaatgtgaacatacatatcatcacttaaattaaaatggctatgagaaagaaagagggggagaaacagtcttgcgggtgtgaagtcccatgaccagccatgtcaaaagaaggtaaagaagtcaagaaaaagccatgaagcccatttggtttcatttttctgaaaataggctcaagagggaataaattagaaactcacaatttctcttgtttgttaccaagacagtgattctcttgctgctaccacccaactgcatccgtccatgatctcagaggaaactgtcgctgaccctggacatgggtacgtttgacgagtgagaggaggcatgacccctcccatgtgtatagacactaccccaacctaaattcatccctaaattgtcccaagttctccagcaatagaggctgccacaaacttcagggagaaagagttacaagtacatgcaatgagtgaactgactgtggctacaatcttgaagatatacggaagagacgtattattaatgcttgacatatatcatcttgcctttcttggtctagactgacttctaatgactaactcaaagtcaaggcaactgagtaatgtcagctcagcaaagtgcagcaaacccatctcccacaggcctccaaaccctggctgttcacagaaccacaaagggcagatgctgcacagaaaactagagaaggggtcataggttcatggttttgtttgagatttgttgctactgtttttctgttttgaattttcttctttgttctgtttttactttatttagggggactaggtgtttctgatattttagttttcttgtttgttttgttttgtgttgtctgtgaatggggttttaactgtggatgaatggaccttatctgttggcttaaaggactggtaagatcagaccatcttattcttcaggtgaatgttttactttccaaagtgctctcctctgcaccagcagtaataaatacaatgccataatcccttaggtttgcctagtgcttttgcaattttcaaagcacttccataagcattccttccacctccttgataggcatttatggaaagcctgctacatgtcaatcatactgttaggcacaggggacctaaagacacataaaaggatggcattctgcctcataaattgcaaaacctaatgaaagtgactgcttggtaaacaaattattattatattataaaatgctataaaagagccatattgaaagtgccctgttggagacagggcaaatgccacaaaaatgatgtaaatttacatggaggaaaagtagaatctgcctggtttgtaggcagcagaagacatttttcatcagtgggcaggtgttctttaccttttgtagaaatgggagtcaagtctcaaataggaggctccacaaaatctcatgccaggtctctgataccttattcacagaagttctttgaagtatttattgttattttctttgacttatgggaaaactgggacacaggaagacaggtaaattacccaacctcacacgttaagtcagaactgggagccataattttgtatccctggtataaatagacaatctcttgaagaaatgaagagatgaccatagaaaaacatcgagatatctccagctctaaaatcctttgtttcaatgttgtttggcatatgttatctttggaatttagtgtctgagcctctgtctgttactgtagtatttaaaatgcatgtattataatcatataatcataactgctgttaattcttgattatatacctagggacaatgtgtaatgtaagattactaattggttctgcccaatctcctttcagattttattaggaaaaaaaaataaacctcctgatcggagacaatgtattaatcagaagtgtaaactgccagttctatatagcatgaaatgaaaagacagctaatttggtccaacaaacatgactgggtctagggcacccaggctgattcagctgatttcctaccagcctttgcctcttccttcaatgtggtttccatgggaatttgcttcagaaaagccaagtatgggctgttcagaggtgcacacctgcattttcttagctcttctagaggggctaagagacttggtacgggccaggaagaatatgtggcagagctcctggaaatgatgcagattaggtggcatttttgtcagctctgtggtttattgttgggactattctttaaaatatccattgttcactacagtgaagatctctgatttaaccgtgtactatccacatgcattacaaacatttcgcagagctgcttagtatataagcgtacaatgtatgtaataaccatctcatatttaattaaatggtatagaagaaca

SEQ ID NO: 144117 - DNA, 1004 bp, Homo sapiens
  Payload ID: 8483
  Gene Symbol: IL7R
  Gene Name: interleukin 7 receptor
  ENST ID: ENST00000506850
  CDS Start-End: 88-873
cttcctccctccctcccttcctcttactctcattcatttcatacacactggctcacacatctactctctctctctatctctctcagaatgacaattctaggtacaacttttggcatggttttttctttacttcaagtcgtttctggagaaagtggctatgctcaaaatggagacttggaagatgcagaactggatgactactcattctcatgctatagccagttggaagtgaatggatcgcagcactcactgacctgtgcttttgaggacccagatgtcaacatcaccaatctggaatttgaaatatgtggggccctcgtggaggtaaagtgcctgaatttcaggaaactacaagagatatatttcatcgagacaaagaaattcttactgattggaaagagcaatatatgtgtgaaggttggagaaaagagtctaacctgcaaaaaaatagacctaaccactatagttaaacctgaggctccttttgacctgagtgtcgtctatcgggaaggagccaatgactttgtggtgacatttaatacatcacacttgcaaaagaagtatgtaaaagttttaatgcacgatgtagcttaccgccaggaaaaggatgaaaacaaatggacgcatgtgaatttatccagcacaaagctgacactcctgcagagaaagctccaaccggcagcaatgtatgagattaaagttcgatccatccctgatcactattttaaaggcttctggagtgaatggagtccaagttattacttcagaactccagagatcaataatagctcaggattaagcctatcgtatggcccagtctccccgatcataagaagactctggaacatctttgtaagaaaccaagaaaagtgagtgtttttggtgcttaaaaagtgttgtgttggcaacatcccagtggccaagaatgatattccaggacaaggaacagttgaacctcaccttttggtatttgattcatcctgtaactagggtccctcctaaga

SEQ ID NO: 144118 - DNA, 612 bp, Homo sapiens
  Payload ID: 8483
  Gene Symbol: IL7R
  Gene Name: interleukin 7 receptor
  ENST ID: ENST00000511982
  CDS Start-End: 87-539
ttcctccctccctcccttcctcttactctcattcatttcatacacactggctcacacatctactctctctctctatctctctcagaatgacaattctaggtacaacttttggcatggttttttctttacttcaagtcgtttctggagaaagtggctatgctcaaaatggagacttggaagatgcagaactggatgactactcattctcatgctatagccagttggaagtgaatggatcgcagcactcactgacctgtgcttttgaggacccagatgtcaacatcaccaatctggaatttgaaatatgtggggccctcgtggaggtaaagtgcctgaatttcaggaaactacaagagatatatttcatcgagacaaagaaattcttactgattggaaagagcaatatatgtgtgaaggttggagaaaagagtctaacctgcaaaaaaatagacctaaccactataggtaagaagttgtatataaaagtatggttgtcacttttgggctacctgaaaacactgtgtctggacattctgtaggttaaaagtagacaaatagtggaaacaactggcaatagataatagctaattccctactgtaaatttttataat

SEQ ID NO: 144119 - DNA, 551 bp, Homo sapiens
  Payload ID: 8483
  Gene Symbol: IL7R
  Gene Name: interleukin 7 receptor
  ENST ID: ENST00000515665
  CDS Start-End: 395-551
cttttaaagtgggcccttagtcaggagcggtggctcatgcctgtagtcctagcactttgggaggctgaggcaggcagatcacttgaggtcaggagttcgagacaagcctggccaacatggcgaaaccccgtctccactgaaaacacaaaaattaggctggcatagtggcatttgcctgtagtcctagctactcaggaggctgaggcaggagaattgcttgaacctgggaggtggaaattgcagtgagccgagatcatgctattgtactccagcctgggcaacaaagcaagactctgtctcaaaaaaataaaaattaaaaaaataaagtagcctctagcctaagatagcttgagcctaggtgtgaatctactgccttactctgatgtaagcacaaatgacaattctaggtacaacttttggcatggttttttctttacttcaagtcgtttctggagaaagtggctatgctcaaaatggagacttggaagatgcagaactggatgactactcattctcatgctatagccagttggaagtgaatggatcgcagc

SEQ ID NO: 144120 - DNA, 917 bp, Homo sapiens
  Payload ID: 8483
  Gene Symbol: IL7R
  Gene Name: interleukin 7 receptor
  ENST ID: ENST00000505093
  CDS Start-End: 1-198
gcagcaatgtatgagattaaagttcgatccatccctgatcactattttaaaggcttctggagtgaatggagtccaagttattacttcagaactccagagatcaataatagctcaggattaagcctatcgtatggcccagtctccccgatcataagaagactctggaacatctttgtaagaaaccaagaaaaaatttaaatgtgagtttcaatcctgaaagtttcctggactgccagattcatagggtggatgacattcaagctagagatgaagtggaaggttttctgcaagatacgtttcctcagcaactagaagaatctgagaagcagaggcttggaggggatgtgcagagccccaactgcccatctgaggatgtagtcatcactccagaaagctttggaagagattcatccctcacatgcctggctgggaatgtcagtgcatgtgacgcccctattctctcctcttccaggtccctagactgcagggagagtggcaagaatgggcctcatgtgtaccaggacctcctgcttagccttgggactacaaacagcacgctgccccctccattttctctccaatctggaatcctgacattgaacccagttgctcagggtcagcccattcttacttccctgggatcaaatcaagaagaagcatatgtcaccatgtccagcttctaccaaaaccagtgaagtgtaagaaacccagactgaacttaccgtgagcgacaaagatgatttaaaagggaagtctagagttcctagtctccctcacagcacagagaagacaaaattagcaaaaccccactacacagtctgcaagattctgaaacattgctttgaccactcttcctgagttcagtggcactcaacatgagtcaagagcatcctgcttctaccatgtggatttggtca

SEQ ID NO: 144121 - DNA, 562 bp, Homo sapiens
  Payload ID: 8483
  Gene Symbol: IL7R
  Gene Name: interleukin 7 receptor
  ENST ID: ENST00000508941
  CDS Start-End: 384-562
aaatgctagagactattcatttaggaccagagtggcattagctttcctacagccatcctcacctgcttgacacccttggatgttgggtttttttgtttgtttgtttgtttgtttgttgttttttttttccacagctcttgtggtccccagcctctctcttgagcagggctggctttttttttttaataagatagctggtgcccaagattgttttccaccttaaggataaaacctgttaagaaaggtcatagtttgccagcccctgccctaaacaaataattcttgaatgcctactgtggtgtgtaagatatgagtaaataccagggatacacagagaacaaaagagaaaaactgctattcttgtgaaacttggaagttggagaatgacaattctaggtacaacttttggcatggttttttctttacttcaagtcgtttctggagaaagtggctatgctcaaaatggagacttggaagatgcagaactggatgactactcattctcatgctatagccagttggaagtgaatggatcgcagcactcactgacctgtgcttttga

SEQ ID NO: 144122 - DNA, 1287 bp, Homo sapiens
  Payload ID: 8483
  Gene Symbol: IL7R
  Gene Name: interleukin 7 receptor
  ENST ID: ENST00000514217
  CDS Start-End: 90-632
gtcttcctccctccctcccttcctcttactctcattcatttcatacacactggctcacacatctactctctctctctatctctctcagaatgacaattctaggtacaacttttggcatggttttttctttacttcaagtcgtttctggagaaagtggctatgctcaaaatggagacttggaagatgcagaactggatgactactcattctcatgctatagccagttggaagtgaatggatcgcagcactcactgacctgtgcttttgaggacccagatgtcaacatcaccaatctggaatttgaaatatgtggggccctcgtggaggtaaagtgcctgaatttcaggaaactacaagagatatatttcatcgagacaaagaaattcttactgattggaaagagcaatatatgtgtgaaggttggagaaaagagtctaacctgcaaaaaaatagacctaaccactatagttaaacctgaggctccttttgacctgagtgtcgtctatcgggaaggagccaatgactttgtggtgacatttaatacatcacacttgcaaaagaagtatgtaaaagttttaatgcacgatgtagcttaccgccaggaaaaggatgaaaacaaatggacggattaagcctatcgtatggcccagtctccccgatcataagaagactctggaacatctttgtaagaaaccaagaaaaaatttaaatgtgagtttcaatcctgaaagtttcctggactgccagattcatagggtggatgacattcaagctagagatgaagtggaaggttttctgcaagatacgtttcctcagcaactagaagaatctgagaagcagaggcttggaggggatgtgcagagccccaactgcccatctgaggatgtagtcatcactccagaaagctttggaagagattcatccctcacatgcctggctgggaatgtcagtgcatgtgacgcccctattctctcctcttccaggtccctagactgcagggagagtggcaagaatgggcctcatgtgtaccaggacctcctgcttagccttgggactacaaacagcacgctgccccctccattttctctccaatctggaatcctgacattgaacccagttgctcagggtcagcccattcttacttccctgggatcaaatcaagaagaagcatatgtcaccatgtccagcttctaccaaaaccagtgaagtgtaagaaacccagactgaacttaccgtgagcgacaaagatgatttaaaagggaagtctagagttcctagtctccctca

SEQ ID NO: 144123 - DNA, 591 bp, Homo sapiens
  Payload ID: 8484
  Gene Symbol: IL9
  Gene Name: interleukin 9
  Uniprot ID: P15248
  ENST ID: ENST00000274520
  CDS Start-End: 12-446
ccgctgtcaagatgcttctggccatggtccttacctctgccctgctcctgtgctccgtggcaggccaggggtgtccaaccttggcggggatcctggacatcaacttcctcatcaacaagatgcaggaagatccagcttccaagtgccactgcagtgctaatgtgaccagttgtctctgtttgggcattccctctgacaactgcaccagaccatgcttcagtgagagactgtctcagatgaccaataccaccatgcaaacaagatacccactgattttcagtcgggtgaaaaaatcagttgaagtactaaagaacaacaagtgtccatatttttcctgtgaacagccatgcaaccaaaccacggcaggcaacgcgctgacatttctgaagagtcttctggaaattttccagaaagaaaagatgagagggatgagaggcaagatatgaagatgaaatattatttatcctatttattaaatttaaaaagctttctctttaagttgctacaatttaaaaatcaagtaagctactctaaatcagtatcagttgtgattatttgtttaacattgtatgtctttattttgaaataaat

SEQ ID NO: 144124 - DNA, 1944 bp, Homo sapiens
  Payload ID: 8485
  Gene Symbol: IL9R
  Gene Name: interleukin 9 receptor
  Uniprot ID: Q01113
  ENST ID: ENST00000244174
  CDS Start-End: 180-1745
agcagctctgtaatgcgcttgtggtttcagatgtgggcggcctgtgtgaacctgtcgtgcaaagctcacgtcaccaactgctgcagttatctcctgaatcaggctgagggtctttgctgtgcacccagagatagttgggtgacaaatcacctccaggttggggatgcctcagacttgtgatgggactgggcagatgcatctgggaaggctggaccttggagagtgaggccctgaggcgagacatgggcacctggctcctggcctgcatctgcatctgcacctgtgtctgcttgggagtctctgtcacaggggaaggacaagggccaaggtctagaaccttcacctgcctcaccaacaacattctcaggatcgattgccactggtctgccccagagctgggacagggctccagcccctggctcctcttcaccagcaaccaggctcctggcggcacacataagtgcatcttgcggggcagtgagtgcaccgtcgtgctgccacctgaggcagtgctcgtgccatctgacaatttcaccatcactttccaccactgcatgtctgggagggagcaggtcagcctggtggacccggagtacctgccccggagacacgttaagctggacccgccctctgacttgcagagcaacatcagttctggccactgcatcctgacctggagcatcagtcctgccttggagccaatgaccacacttctcagctatgagctggccttcaagaagcaggaagaggcctgggagcaggcccagcacagggatcacattgtcggggtgacctggcttatacttgaagcctttgagctggaccctggctttatccatgaggccaggctgcgtgtccagatggccacactggaggatgatgtggtagaggaggagcgttatacaggccagtggagtgagtggagccagcctgtgtgcttccaggctccccagagacaaggccctctgatcccaccctgggggtggccaggcaacacccttgttgctgtgtccatctttctcctgctgactggcccgacctacctcctgttcaagctgtcgcccagggtgaagagaatcttctaccagaacgtgccctctccagcgatgttcttccagcccctctacagtgtacacaatgggaacttccagacttggatgggggcccacggggccggtgtgctgttgagccaggactgtgctggcaccccacagggagccttggagccctgcgtccaggaggccactgcactgctcacttgtggcccagcgcgtccttggaaatctgtggccctggaggaggaacaggagggccctgggaccaggctcccggggaacctgagctcagaggatgtgctgccagcagggtgtacggagtggagggtacagacgcttgcctatctgccacaggaggactgggcccccacgtccctgactaggccggctcccccagactcagagggcagcaggagcagcagcagcagcagcagcagcaacaacaacaactactgtgccttgggctgctatgggggatggcacctctcagccctcccaggaaacacacagagctctgggcccatcccagccctggcctgtggcctttcttgtgaccatcagggcctggagacccagcaaggagttgcctgggtgctggctggtcactgccagaggcctgggctgcatgaggacctccagggcatgttgctcccttctgtcctcagcaaggctcggtcctggacattctaggtccctgactcgccagatgcatcatgtccattttgggaaaatggactgaagtttctggagcccttgtctgagactgaacctcctgagaaggggcccctagcagcggtcagaggtcctgtctggatggaggctggaggctcccccctcaacccctctgctcagtgcctgtggggagcagcctctaccctcagcatcctgg

SEQ ID NO: 144125 - DNA, 2032 bp, Homo sapiens
  Payload ID: 8485
  Gene Symbol: IL9R
  Gene Name: interleukin 9 receptor
  Uniprot ID: Q01113
  ENST ID: ENST00000369423
  CDS Start-End: 39-1067
cagagatagttgggtgacaaatcacctccaggttggggatgcctcagacttgtgatgggactgggcagatgcatctgggaagtaactgctgcaagaacggacagacactgctgcagagaacttgccacggtgtttcatgctgtggctggtggttccaggctgcacgctccattctaggaaaggggccctcagcccagtcccttgcaggctggaccttggagagtgaggccctgaggcgagacatgggcacctggctcctggcctgcatctgcatctgcacctgtgtctgcttgggagtctctgtcacaggggaaggacaagggccaaggtctagaaccttcacctgcctcaccaacaacattctcaggatcgattgccactggtctgccccagagctgggacagggctccagcccctggctcctcttcaccaggctcctggcggcacacataagtgcatcttgcggggcagtgagtgcaccgtcgtgctgccacctgaggcagtgctcgtgccatctgacaatttcaccatcactttccaccactgcatgtctgggagggagcaggtcagcctggtggacccggagtacctgccccggagacacgagcaacatcagttctggccactgcatcctgacctggagcatcagtcctgccttggagccaatgaccacacttctcagctatgagctggccttcaagaagcaggaagaggcctgggagcaggcccagcacagggatcacattgtcggggtgacctggcttatacttgaagcctttgagctggaccctggctttatccatgaggccaggctgcgtgtccagatggccacactggaggatgatgtggtagaggaggagcgttatacaggccagtggagtgagtggagccagcctgtgtgcttccaggctccccagagacaaggccctctgatcccaccctgggggtggccaggcaacacccttgttgctgtgtccatctttctcctgctgactggcccgacctacctcctgttcaagctgtcgcccagacttggatgggggcccacggggccggtgtgctgttgagccaggactgtgctggcaccccacagggagccttggagccctgcgtccaggaggccactgcactgctcacttgtggcccagcgcgtccttggaaatctgtggccctggaggaggaacaggagggccctgggaccaggctcccggggaacctgagctcagaggatgtgctgccagcagggtgtacggagtggagggtacagacgcttgcctatctgccacaggaggactgggcccccacgtccctgactaggccggctcccccagactcagagggcagcaggagcagcagcagcagcagcagcagcaacaacaacaactactgtgccttgggctgctatgggggatggcacctctcagccctcccaggaaacacacagagctctgggcccatcccagccctggcctgtggcctttcttgtgaccatcagggcctggagacccagcaaggagttgcctgggtgctggctggtcactgccagaggcctgggctgcatgaggacctccagggcatgttgctcccttctgtcctcagcaaggctcggtcctggacattctaggtccctgactcgccagatgcatcatgtccattttgggaaaatggactgaagtttctggagcccttgtctgagactgaacctcctgagaaggggcccctagcagcggtcagaggtcctgtctggatggaggctggaggctcccccctcaacccctctgctcagtgcctgtggggagcagcctctaccctcagcatcctggccacaagttcttccttccattgtcccttttctttatccctgacctctctgagaagtggggtgtggtctctcagctgttctgccctcatacccttaaagggccagcctgggcccagtggacacaggtaaggcaccatgaccacctggtgtgacctctctgtgccttactgaggcacctttctagagattaaaaggggcttgatggctgtt

SEQ ID NO: 144126 - DNA, 1659 bp, Homo sapiens
  Payload ID: 8486
  Gene Symbol: ILF2
  Gene Name: interleukin enhancer binding factor 2
  Uniprot ID: Q12905
  ENST ID: ENST00000361891
  CDS Start-End: 127-1299
gggtaaggcgggagccaatcgcaccgggttttattgggacacgccggcaagacgcctcttcagttgtctgctactcagaggaaggggcggttggtgcggcctccattgttcgtgttttaaggcgccatgaggggtgacagaggccgtggtcgtggtgggcgctttggttccagaggaggcccaggaggagggttcaggccctttgtaccacatatcccatttgacttctatttgtgtgaaatggcctttccccgggtcaagccagcacctgatgaaacttccttcagtgaggccttgctgaagaggaatcaggacctggctcccaattctgctgaacaggcatctatcctttctctggtgacaaaaataaacaatgtgattgataatctgattgtggctccagggacatttgaagtgcaaattgaagaagttcgacaggtgggatcctataaaaaggggacaatgactacaggacacaatgtggctgacctggtggtgatactcaagattctgccaacgttggaagctgttgctgccctggggaacaaagtcgtggaaagcctaagagcacaggatccttctgaagttttaaccatgctgaccaacgaaactggctttgaaatcagttcttctgatgctacagtgaagattctcattacaacagtgccacccaatcttcgaaaactggatccagaactccatttggatatcaaagtattgcagagtgccttagcagccatccgacatgcccgctggttcgaggaaaatgcttctcagtccacagttaaagttctcatcagactactgaaggacttgaggattcgttttcctggctttgagcccctcacaccctggatccttgacctactaggccattatgctgtgatgaacaaccccaccagacagcctttggccctaaacgttgcatacaggcgctgcttgcagattctggctgcaggactgttcctgccaggttcagtgggtatcactgacccctgtgagagtggcaactttagagtacacacagtcatgaccctagaacagcaggacatggtctgctatacagctcagactctcgtccgaatcctctcacatggtggctttaggaagatccttggccaggagggtgatgccagctatcttgcttctgaaatatctacctgggatggagtgatagtaacaccttcagaaaaggcttatgagaagccaccagagaagaaggaaggagaggaagaagaggagaatacagaagaaccacctcaaggagaggaagaagaaagcatggaaactcaggagtgacattcccttcactccttttcctacccaagggggaagactggagcctaagctgcctgctactgggctttacatggtgacagacatttccgtgggatagggaagatagcaggaagaaaagtaaactccatagaagtgtcattccactgggttttgatattggcttagctgccagtctcccatttgtgacctatgccatccatctataatggaggataccaacatttcttcctaatattctataatctccaactcctgaaaacccctctctcaactaatactttgctgttgaaatgttgtgaaatgttaagtgtctggaaatttttttttctaagaaaaactattaaagtacttcctagtagg

SEQ ID NO: 144127 - DNA, 726 bp, Homo sapiens
  Payload ID: 8486
  Gene Symbol: ILF2
  Gene Name: interleukin enhancer binding factor 2
  ENST ID: ENST00000368681
  CDS Start-End: 61-513
tctgctactcagaggaaggggcggttggtgcggcctccattgttcgtgttttaaggcgccatgaggggtgacagaggccgtggtcgtggtgggcgctttggttccagaggaggcccaggaggagggttcaggccctttgtaccacatatcccatttgacttctatttgtgtgaaatggcctttccccgggtcaagccagcacctgatgaaacttccttcagtgaggccttgctgaagaggaatcaggacctggctcccaattctgctgaacaggcatctatcctttctctggtgacaaaaataaacaatgtgattgataatctgattgtggctccagggacatttgaagtgcaaattgaagaagttcgacaggtgggatcctataaaaaggggacaatgactacaggacacaatgtggctgacctggtggtgatactcaagattctgccaacgtgtgagtgtgcctgtttctggtcatgggaacagaacatagcacttggattaggggtttaggtatctttttttgttttgagacaaattctccctccgttggccaggctggagtgcagtggtaccattgtagctcactgcagccttgacctccactacagcaagtgatcttcccgccttagcctcccgagtagctgggactacagatgtgtgctaccacacccagctaatttttgtattttttgtagatacagggtttcaccgtgttgctcgggc

SEQ ID NO: 144128 - DNA, 476 bp, Homo sapiens
  Payload ID: 8486
  Gene Symbol: ILF2
  Gene Name: interleukin enhancer binding factor 2
  ENST ID: ENST00000368684
  CDS Start-End: 131-476
aggggtgacagaggccgtggtcgtggtgggcgctttggttccagaggaggcccaggaggagggttcaggccctttgtaccacatatcccatttgacttctatttgttgtttacttctggtttagtgtgaaatggcctttccccgggtcaagccagcacctgatgaaacttccttcagtgaggccttgctgaagaggaatcaggacctggctcccaattctgctgaacaggcatctatcctttctctggtgacaaaaataaacaatgtgattgataatctgattgtggctccagggacatttgaagtgcaaattgaagaagttcgacaggtgggatcctataaaaaggggacaatgactacaggacacaatgtggctgacctggtggtgatactcaagattctgccaacgttggaagctgttgctgccctggggaacaaagtcgtggaaagcctaagagcacaggatccttctgaag

SEQ ID NO: 144129 - DNA, 1906 bp, Homo sapiens
  Payload ID: 8486
  Gene Symbol: ILF2
  Gene Name: interleukin enhancer binding factor 2
  ENST ID: ENST00000615950
  CDS Start-End: 240-1298
gcaccgggttttattgggacacgccggcaagacgcctcttcagttgtctgctactcagaggaaggggcggttggtgcggcctccattgttcgtgttttaaggcgccatgaggggtgacagaggccgtggtcgtggtgggcgctttggttccagaggaggcccaggaggagggttcaggccctttgtaccacatatcccatttgacttctatttgttgtttacttctggtttagtgtgaaatggcctttccccgggtcaagccagcacctgatgaaacttccttcagtgaggccttgctgaagaggaatcaggacctggctcccaattctgctgaacaggcatctatcctttctctggtgacaaaaataaacaatgtgattgataatctgattgtggctccagggacatttgaagtgcaaattgaagaagttcgacaggtgggatcctataaaaaggggacaatgactacaggacacaatgtggctgacctggtggtgatactcaagattctgccaacgttggaagctgttgctgccctggggaacaaagtcgtggaaagcctaagagcacaggatccttctgaagttttaaccatgctgaccaacgaaactggctttgaaatcagttcttctgatgctacagtgaagattctcattacaacagtgccacccaatcttcgaaaactggatccagaactccatttggatatcaaagtattgcagagtgccttagcagccatccgacatgcccgctggttcgaggaaaatgcttctcagtccacagttaaagttctcatcagactactgaaggacttgaggattcgttttcctggctttgagcccctcacaccctggatccttgacctactaggccattatgctgtgatgaacaaccccaccagacagcctttggccctaaacgttgcatacaggcgctgcttgcagattctggctgcaggactgttcctgccaggttcagtgggtatcactgacccctgtgagagtggcaactttagagtacacacagtcatgaccctagaacagcaggacatggtctgctatacagctcagactctcgtccgaatcctctcacatggtggctttaggaagatccttggccaggagggtgatgccagctatcttgcttctgaaatatctacctgggatggagtgatagtaacaccttcagaaaaggcttatgagaagccaccagagaagaaggaaggagaggaagaagaggagaatacagaagaaccacctcaaggagaggaagaagaaagcatggaaactcaggagtgacattcccttcactccttttcctacccaagggggaagactggagcctaagctgcctgctactgggctttacatggtgacagacatttccgtgggatagggaagatagcaggaagaaaagtaaactccatagaagtgtcattccactgggttttgatattggcttagctgccagtctcccatttgtgacctatgccatccatctataatggaggataccaacatttcttcctaatattctataatctccaactcctgaaaacccctctctcaactaatactttgctgttgaaatgttgtgaaatgttaagtgtctggaaatttttttttctaagaaaaactattaaagtacttcctagtagggctcttggtctttctggttggtgttttttgtttgtttgtttttttgcatgtggcaaccttttttgcttttggctttgtgtactcttttgttgaaaatgataattgagtcatttaattataaatactcagatcacaatttgaagctgtctttgaattaaaggacaaactcctggaacctttccatataccagagtaaactagaatatcattttaagtatttattgaataaaatgattctatcaacactg

SEQ ID NO: 144130 - DNA, 3035 bp, Homo sapiens
  Payload ID: 8487
  Gene Symbol: ILF3
  Gene Name: interleukin enhancer binding factor 3, 90kDa
  Uniprot ID: Q12906
  ENST ID: ENST00000250241
  CDS Start-End: 70-2142
aaggaactctatcacaatttgaaaagataagcaaaagtttgatttccagacactacagaagaagtaaaaatgcgtccaatgcgaatttttgtgaatgatgaccgccatgtgatggcaaagcattcttccgtttatccaacacaagaggagctggaggcagtccagaacatggtgtcccacacggagcgggcgctcaaagctgtgtccgactggatagacgagcaggaaaagggtagcagcgagcaggcagagtccgataacatggatgtgcccccagaggacgacagtaaagaaggggctggggaacagaagacggagcacatgaccagaaccctgcggggagtgatgcgggtgggcctggtggcaaagggcctcctactcaagggggacttggatctggagctggtgctgctgtgtaaggagaagcccacaaccgccctcctggacaaggtggccgacaacctggccatccagcttgctgctgtaacagaagacaagtacgaaatactgcaatctgtcgacgatgctgcgattgtgataaaaaacacaaaagagcctccattgtccctgaccatccacctgacatcccctgttgtcagagaagaaatggagaaagtattagctggagaaacgctatcagtcaacgaccccccggacgttctggacaggcagaaatgccttgctgccttggcgtccctccgacacgccaagtggttccaggccagagccaacgggctgaagtcttgtgtcattgtgatccgggtcttgagggacctgtgcactcgcgtgcccacctggggtcccctccgaggctggcctctcgagctcctgtgtgagaaatccattggcacggccaacagaccgatgggtgctggcgaggccctgcggagagtgctggagtgcctggcgtcgggcatcgtgatgccagatggttctggcatttatgacccttgtgaaaaagaagccactgatgctattgggcatctagacagacagcaacgggaagatatcacacagagtgcgcagcacgcactgcggctcgctgccttcggccagctccataaagtcctaggcatggaccctctgccttccaagatgcccaagaaaccaaagaatgaaaacccagtggactacaccgttcagatcccaccaagcaccacctatgccattacgcccatgaaacgcccaatggaggaggacggggaggagaagtcgcccagcaaaaagaagaagaagattcagaagaaagaggagaaggcagagcccccccaggctatgaatgccctgatgcggttgaaccagctgaagccagggctgcagtacaagctggtgtcccagactgggcccgtccatgcccccatctttaccatgtctgtggaggttgatggcaattcattcgaggcctctgggccctccaaaaagacggccaagctgcacgtggccgttaaggtgttacaggacatgggcttgccgacgggtgctgaaggcagggactcgagcaagggggaggactcggctgaggagaccgaggcgaagccagcagtggtggcccctgccccagtggtagaagctgtctccacccctagtgcggcctttccctcagatgccactgccgagcaggggccgatcctgacaaagcacggcaagaacccagtcatggagctgaacgagaagaggcgtgggctcaagtacgagctcatctccgagaccgggggcagccacgacaagcgcttcgtcatggaggtcgaagtggatggacagaagttccaaggtgctggttccaacaaaaaggtggcgaaggcctacgctgctcttgctgccctagaaaagcttttccctgacacccctctcgcccttgatgccaacaaaaagaagagagccccagtacccgtcagagggggaccgaaatttgctgctaagccacataaccctggcttcggcatgggaggccccatgcacaacgaagtgcccccaccccccaaccttcgagggcggggaagaggcgggagcatccggggacgagggcgcgggcgaggatttggtggcgccaaccatggaggctacatgaatgccggtgctgggtatggaagctatgggtacggaggcaactcggcgacagcaggctacacaggttttgtatgaatttttaaccttttaacaaactcccaaatctggttgatgcctttgacagtgatgaaaacgatttcaccacatctgaatccagagaaaccggctttttttcttattgcgagcatgttaaaacgttgggaacatgtggggaattgtatattgcgctgaattaacttctcccgcctcttgtaatgctctggtgggttcttgtttgggaatgcgatattttgtggctggtttagctagagagtgaactctcaaaggtatcaaaactgtgcttccattattagtgcaagaaacagacaggctttaaggggtagatgacgtgaaattttgcaagtcttaattacagctgcagatgcatgggattctggatttttttgttgctttttagtttaatgggactttaaaagtaattgaggagaaagaaccgtgatgttccctgtttctccagtaaaggactggcttttgcttgggcagaggtggtgctgctgggtgtgcagctgccacagactccaaaggcgtagaagtttgtgccaacacacggagtcattctggctctctgctgaggcccctgttttctggcaggtgccctccttggaaactggttttggctctgatcagcggttctttttgcagcaaagcctgcatctgtgttgacttgcaagattttgcgtttattcaggcaaaaactggtcaaaatggttactacatgatttgttcccagaggtttgaaacattcagtgaaactttttaaaactttgattgcatgatgtattttttttttagaaagttattgtttgagaataatgtctttttataccaggaaaatagttatcctgaatgacgttgaaaactccccctcccctttatttttttttaatcaatacatgtgaaagtaacaa

SEQ ID NO: 144131 - DNA, 3671 bp, Homo sapiens
  Payload ID: 8487
  Gene Symbol: ILF3
  Gene Name: interleukin enhancer binding factor 3, 90kDa
  Uniprot ID: Q12906
  ENST ID: ENST00000407004
  CDS Start-End: 251-2371
cgctcgcccccggtccggactcctcctcctcctcttctcgccattgcagttggacccagcagcccggcgcgcaccgcgtggcttttgggggcagaccccggcgggctgtggcaggagggcggcggcggcggctgcggtcgaagaaggggacgccgacaagagttgaagtattgataacaccaaggaactctatcacaatttgaaaagataagcaaaagtttgatttccagacactacagaagaagtaaaaatgcgtccaatgcgaatttttgtgaatgatgaccgccatgtgatggcaaagcattcttccgtttatccaacacaagaggagctggaggcagtccagaacatggtgtcccacacggagcgggcgctcaaagctgtgtccgactggatagacgagcaggaaaagggtagcagcgagcaggcagagtccgataacatggatgtgcccccagaggacgacagtaaagaaggggctggggaacagaagacggagcacatgaccagaaccctgcggggagtgatgcgggtgggcctggtggcaaagggcctcctactcaagggggacttggatctggagctggtgctgctgtgtaaggagaagcccacaaccgccctcctggacaaggtggccgacaacctggccatccagcttgctgctgtaacagaagacaagtacgaaatactgcaatctgtcgacgatgctgcgattgtgataaaaaacacaaaagagcctccattgtccctgaccatccacctgacatcccctgttgtcagagaagaaatggagaaagtattagctggagaaacgctatcagtcaacgaccccccggacgttctggacaggcagaaatgccttgctgccttggcgtccctccgacacgccaagtggttccaggccagagccaacgggctgaagtcttgtgtcattgtgatccgggtcttgagggacctgtgcactcgcgtgcccacctggggtcccctccgaggctggcctctcgagctcctgtgtgagaaatccattggcacggccaacagaccgatgggtgctggcgaggccctgcggagagtgctggagtgcctggcgtcgggcatcgtgatgccagatggttctggcatttatgacccttgtgaaaaagaagccactgatgctattgggcatctagacagacagcaacgggaagatatcacacagagtgcgcagcacgcactgcggctcgctgccttcggccagctccataaagtcctaggcatggaccctctgccttccaagatgcccaagaaaccaaagaatgaaaacccagtggactacaccgttcagatcccaccaagcaccacctatgccattacgcccatgaaacgcccaatggaggaggacggggaggagaagtcgcccagcaaaaagaagaagaagattcagaagaaagaggagaaggcagagcccccccaggctatgaatgccctgatgcggttgaaccagctgaagccagggctgcagtacaagctggtgtcccagactgggcccgtccatgcccccatctttaccatgtctgtggaggttgatggcaattcattcgaggcctctgggccctccaaaaagacggccaagctgcacgtggccgttaaggtgttacaggacatgggcttgccgacgggtgctgaaggcagggactcgagcaagggggaggactcggctgaggagaccgaggcgaagccagcagtggtggcccctgccccagtggtagaagctgtctccacccctagtgcggcctttccctcagatgccactgccgagaacgtaaaacagcaggggccgatcctgacaaagcacggcaagaacccagtcatggagctgaacgagaagaggcgtgggctcaagtacgagctcatctccgagaccgggggcagccacgacaagcgcttcgtcatggaggtcgaagtggatggacagaagttccaaggtgctggttccaacaaaaaggtggcgaaggcctacgctgctcttgctgccctagaaaagcttttccctgacacccctctcgcccttgatgccaacaaaaagaagagagccccagtacccgtcagagggggaccgaaatttgctgctaagccacataaccctggcttcggcatgggaggccccatgcacaacgaagtgcccccaccccccaaccttcgagggcggggaagaggcgggagcatccggggacgagggcgcgggcgaggatttggtggcgccaaccatggaggctacatgaatgccggtgctgggtatggaagctatgggtacggaggcaactcggcgacagcaggctacagtgactttttcacagactgctacggctatcatgattttgggtcttcctagagcgtctaaaagtattgcacacaaaatcaactttttactccaatttcctccaactccaaaacccaaagtgtccgtgctgtgtccctgtgcttcactgggtttctcaaccgtggcttttcaccgcagcttgtctgaaactcttagcctgcagaatttaagacaatggcagtttttatcgtgatttgcctttgaacttggtcctattgaagttcacaataagtggaaaacaattttttcagagaatgtatttttgtgcagaattgcacagaattctagagacagcgttgttcggcatcaaggcaaaagcccacctttgctttttatggaaagcattactttatttaaagagacagacaatgacgcattttaatctacctttgtcttaatttacagcaggttttgtatgaatttttaaccttttaacaaactcccaaatctggttgatgcctttgacagtgatgaaaacgatttcaccacatctgaatccagagaaaccggctttttttcttattgcgagcatgttaaaacgttgggaacatgtggggaattgtatattgcgctgaattaacttctcccgcctcttgtaatgctctggtgggttcttgtttgggaatgcgatattttgtggctggtttagctagagagtgaactctcaaaggtatcaaaactgtgcttccattattagtgcaagaaacagacaggctttaaggggtagatgacgtgaaattttgcaagtcttaattacagctgcagatgcatgggattctggatttttttgttgctttttagtttaatgggactttaaaagtaattgaggagaaagaaccgtgatgttccctgtttctccagtaaaggactggcttttgcttgggcagaggtggtgctgctgggtgtgcagctgccacagactccaaaggcgtagaagtttgtgccaacacacggagtcattctggctctctgctgaggcccctgttttctggcaggtgccctccttggaaactggttttggctctgatcagcggttctttttgcagcaaagcctgcatctgtgttgacttgcaagattttgcgtttattcaggcaaaaactggtcaaaatggttactacatgatttgttcccagaggtttgaaacattcagtgaaactttttaaaactttgattgcatgatgtattttttttttagaaagttattgtttgagaataatgtctttttataccaggaaaatagttatcctgaatgacgttgaaaactccccctcccctttatttttttttaatcaatacatgtgaaagtaacaa

SEQ ID NO: 144132 - DNA, 6119 bp, Homo sapiens
  Payload ID: 8487
  Gene Symbol: ILF3
  Gene Name: interleukin enhancer binding factor 3, 90kDa
  Uniprot ID: Q12906
  ENST ID: ENST00000449870
  CDS Start-End: 318-3014
aaagggggcggggcttcagccggtcacgtgttcccgcacctccccggcgcgcgcctgcccgcccgcccgctcgcccccggtccggactcctcctcctcctcttctcgccattgcagttggacccagcagcccggcgcgcaccgcgtggcttttgggggcagaccccggcgggctgtggcaggagggcggcggcggcggctgcggtcgaagaaggggacgccgacaagagttgaagtattgataacaccaaggaactctatcacaatttgaaaagataagcaaaagtttgatttccagacactacagaagaagtaaaaatgcgtccaatgcgaatttttgtgaatgatgaccgccatgtgatggcaaagcattcttccgtttatccaacacaagaggagctggaggcagtccagaacatggtgtcccacacggagcgggcgctcaaagctgtgtccgactggatagacgagcaggaaaagggtagcagcgagcaggcagagtccgataacatggatgtgcccccagaggacgacagtaaagaaggggctggggaacagaagacggagcacatgaccagaaccctgcggggagtgatgcgggtgggcctggtggcaaagggcctcctactcaagggggacttggatctggagctggtgctgctgtgtaaggagaagcccacaaccgccctcctggacaaggtggccgacaacctggccatccagcttgctgctgtaacagaagacaagtacgaaatactgcaatctgtcgacgatgctgcgattgtgataaaaaacacaaaagagcctccattgtccctgaccatccacctgacatcccctgttgtcagagaagaaatggagaaagtattagctggagaaacgctatcagtcaacgaccccccggacgttctggacaggcagaaatgccttgctgccttggcgtccctccgacacgccaagtggttccaggccagagccaacgggctgaagtcttgtgtcattgtgatccgggtcttgagggacctgtgcactcgcgtgcccacctggggtcccctccgaggctggcctctcgagctcctgtgtgagaaatccattggcacggccaacagaccgatgggtgctggcgaggccctgcggagagtgctggagtgcctggcgtcgggcatcgtgatgccagatggttctggcatttatgacccttgtgaaaaagaagccactgatgctattgggcatctagacagacagcaacgggaagatatcacacagagtgcgcagcacgcactgcggctcgctgccttcggccagctccataaagtcctaggcatggaccctctgccttccaagatgcccaagaaaccaaagaatgaaaacccagtggactacaccgttcagatcccaccaagcaccacctatgccattacgcccatgaaacgcccaatggaggaggacggggaggagaagtcgcccagcaaaaagaagaagaagattcagaagaaagaggagaaggcagagcccccccaggctatgaatgccctgatgcggttgaaccagctgaagccagggctgcagtacaagctggtgtcccagactgggcccgtccatgcccccatctttaccatgtctgtggaggttgatggcaattcattcgaggcctctgggccctccaaaaagacggccaagctgcacgtggccgttaaggtgttacaggacatgggcttgccgacgggtgctgaaggcagggactcgagcaagggggaggactcggctgaggagaccgaggcgaagccagcagtggtggcccctgccccagtggtagaagctgtctccacccctagtgcggcctttccctcagatgccactgccgagaacgtaaaacagcaggggccgatcctgacaaagcacggcaagaacccagtcatggagctgaacgagaagaggcgtgggctcaagtacgagctcatctccgagaccgggggcagccacgacaagcgcttcgtcatggaggtcgaagtggatggacagaagttccaaggtgctggttccaacaaaaaggtggcgaaggcctacgctgctcttgctgccctagaaaagcttttccctgacacccctctcgcccttgatgccaacaaaaagaagagagccccagtacccgtcagagggggaccgaaatttgctgctaagccacataaccctggcttcggcatgggaggccccatgcacaacgaagtgcccccaccccccaaccttcgagggcggggaagaggcgggagcatccggggacgagggcgcgggcgaggatttggtggcgccaaccatggaggctacatgaatgccggtgctgggtatggaagctatgggtacggaggcaactcggcgacagcaggctacagtcagttctacagcaacggagggcattctgggaatgccagtggcggtggcggcgggggcggtggtggctcctccggctatggctcctactaccaaggtgacaactacaactcaccggtgcccccaaaacacgctgggaagaagcagccgcacgggggccagcagaagccctcctacggctcgggctaccagtcccaccagggccagcagcagtcctacaaccagagcccctacagcaactatggccctccacagggcaagcagaaaggctataaccatggacaaggcagctactcctactcgaactcctacaactctcccgggggcgggggcggatccgactacaactacgagagcaaattcaactacagtggtagtggaggccgaagcggcgggaacagctacggctcaggcggggcatcctacaacccagggtcacacgggggctacggcggaggttctgggggcggctcctcataccaaggcaaacaaggaggctactcacagtcgaactacaactccccggggtccggccagaactacagtggccctcccagctcctaccagtcctcacaaggcggctatggcagaaacgcagaccacagcatgaactaccagtacagataagcccccgcggggcggagatttctaccttctgcacttactccccatcagaagatcgagttttatgcatcacagttaacatgtcagctggccctccaggcccccgcccccatcccgtccacgttgctgtgtcgtgaggtgcagcgggtcaccctgtggcccgtcctgtgacccatatttagccgtgtttgggactccgtgtcttcaatggtttgttagttgccattacaactttgtctgggtagagtttttgagtttttgcagttcagtatccctctgtctattcacacttcgtgttagtggtaactcagtttgtctttaaatagttacagaagggatacgtcatttgttaatgcttttgtgaagtgagttaaacgagctttctgtattttaatgctttagtgtttcagttttataagtgaagattttattttaaaaaccagtgggaaagagtggggggtttctttttatgtctgggtcattcaggcagtacatctgaattaagctgaatgtagacaaataaagaaaaacaaaactgcgcccgtcttaggcctgggtgtctgacccaccagcagtgcaatgggcaggtttccccactctattcctgctcttgggaaagcagcgtgggccatcaggatggtccctggtccttagagagggtccagttcaggcttctagacattttactcatgctcagcgaaggctggttcctggtcccctgggctgtgtagacccggtgtcccaccaggctccaggctcccaccatctacagaggggcttacagcgcccattctggtcttggggaacccatcacaaaataggctttttctgctccccgattctggtgtagttctaagtacacagtgatgtcctctgtaggggcgtgcctgtggtggaacataacgcagttacaaaagaaagggcaggtgaggcctgggtaaccccagccatggaccgtcagtggctggagggagcttcgtgtctgtgctggagctgcagcctgctcgccatctggaggctcagtggagtggggagttggggttctcataccagcagatttccctagagcgtgattctcccatctgaggcaatcttgcctcccaggggaaattttgcaatgtttggaggatgttgtcacagctagtagcgggtgctctgggatctggtggatagatgccaaggatgctgtcaagcatactgtactgcccagaacagtggcccatagcagggacctgccctatcaaaatatcaggtgtatggaggtggagtcccaacgctagagcagcccttctcagctccaccctgcccggggagggaggaggagctctggtttcagagcagtgccgggattgcctttccccaggatctgtgtcggccatccaggaagaactgtactggccaagcctgggaccacacgtctgcagagatcctgctctgctggcctgagccccaggccttggcctcctgtgcttgggtaaccatggccactgggaaaagcaaggaccgtgtttgactttcttggagaggtgaaagaggtgaaagaacaagttgtgtgctagaaaacttttgaggaattcttatttgtgttagagcagaggaggtcccagataccaagtggcgcctcccaggaaaggctgggagaagaggtggcctggagtaccccgagatcccagcagcgcacacagtggagggatgaggatggatgggtcctaacccctgattttgatgggatgtgttcatgtcctatctcctctcctggacacattaaggggttgggacaagaagagactcctgtgagatcagcagacctcgtgtttaaggagagaatgcctgcctgcaacactcatggagagggacacttcctggccccacctgctaaatacctccaaactctgggcaggcgcctgcattctcaacacaggacttcccttaacagtttccggatcagtgaccaccaccacgttcaggtttctgaatgcagacccaccacgagggatggattccacccgcccgccctgctgcagatacatgcggcacagcaggcacgtgcctggagagaacagctcctgagcacagcacccttggagccctcaccccgctcacgatcctcaccagtgctgatgatgccgtcatgctgctggcctgagacagtatcccagctacaacaggacgacaccgggttcaggaatatgtggctatcaccttgagcactgacagtggccttccaggctagttgccttccaaacgcaggtagccgacctgcaggagggcctacaaacgggcccagcaagagctgggcaacagctggcttgtgaaatgagacaccttgaccaatatgctttgggtggacggtctcctacatgttcagtggaggccaccaggagcatccatgagcggggaaggggtccacacccttacatggcaagttgatacgatggggtgcttggtggatgggccatggaggtccgtgagctggaactgggcacacgccatcccagagggctcaggatgccccaggaaggaaagaagggcaacagactacacgattggacgtgtgtggttgactgggatgaagttggagggaggggcagggccttgcaggggattggtactgatcccagggaggaagtgttggggcttcatgaactaggatgaaaggaggcccctgagccatgacaaggggcacatccaggatttccgccaccctgaatttagtagagctagtaggccctggtcgtcactctgggcagggatgccgtcagccttgagggtcgccacccacctgtgtgttgccctctgtcctggcagggaaacatacaccccttgtctcaccaccaaccttgcttgtgtagtcagcagggctggccctgccccaaggactcactgcatgtacccggacccctaggcctggcctttgcagcatagttgggagcttctggattccatctgcacctgtgagccccatgctggctgtgcactgcgcgggcctgagactgctggatacaatgttgggcaacaactcagccagcctgatggcagcctcagaggcttactctaacccatcccagaataaatggagacttcatgtgttcattgtttcattcactc

SEQ ID NO: 144133 - DNA, 533 bp, Homo sapiens
  Payload ID: 8487
  Gene Symbol: ILF3
  Gene Name: interleukin enhancer binding factor 3, 90kDa
  ENST ID: ENST00000587941
  CDS Start-End: 166-533
agtttgcttgtccctccttggttcttcagttgtgctcctgcaggctttgcttttacacacgagcgatatagcatcattctgaattgtgcagcttaaaagatgaacgttgggctgcttgctctctttacatcatttttaacttaattctcacatccctagcgtccaatgcgaatttttgtgaatgatgaccgccatgtgatggcaaagcattcttccgtttatccaacacaagaggagctggaggcagtccagaacatggtgtcccacacggagcgggcgctcaaagctgtgtccgactggatagacgagcaggaaaagggtagcagcgagcaggcagagtccgataacatggatgtgcccccagaggacgacagtaaagaaggggctggggaacagaagacggagcacatgaccagaaccctgcggggagtgatgcgggtgggcctggtggcaaagggcctcctactcaagggggacttggatctggagctggtgctgctgtgtaaggagaagcccacaaccgccctcctgga

SEQ ID NO: 144134 - DNA, 2622 bp, Homo sapiens
  Payload ID: 8487
  Gene Symbol: ILF3
  Gene Name: interleukin enhancer binding factor 3, 90kDa
  Uniprot ID: Q12906
  ENST ID: ENST00000589998
  CDS Start-End: 218-2326
cttctcgccattgcagttggacccagcagcccggcgcgcaccgcgtggcttttgggggcagaccccggcgggctgtggcaggagggcggcggcggcggctgcggtcgaagaaggggacgccgacaagagttgaagtattgataacaccaaggaactctatcacaatttgaaaagataagcaaaagtttgatttccagacactacagaagaagtaaaaatgcgtccaatgcgaatttttgtgaatgatgaccgccatgtgatggcaaagcattcttccgtttatccaacacaagaggagctggaggcagtccagaacatggtgtcccacacggagcgggcgctcaaagctgtgtccgactggatagacgagcaggaaaagggtagcagcgagcaggcagagtccgataacatggatgtgcccccagaggacgacagtaaagaaggggctggggaacagaagacggagcacatgaccagaaccctgcggggagtgatgcgggtgggcctggtggcaaagggcctcctactcaagggggacttggatctggagctggtgctgctgtgtaaggagaagcccacaaccgccctcctggacaaggtggccgacaacctggccatccagcttgctgctgtaacagaagacaagtacgaaatactgcaatctgtcgacgatgctgcgattgtgataaaaaacacaaaagagcctccattgtccctgaccatccacctgacatcccctgttgtcagagaagaaatggagaaagtattagctggagaaacgctatcagtcaacgaccccccggacgttctggacaggcagaaatgccttgctgccttggcgtccctccgacacgccaagtggttccaggccagagccaacgggctgaagtcttgtgtcattgtgatccgggtcttgagggacctgtgcactcgcgtgcccacctggggtcccctccgaggctggcctctcgagctcctgtgtgagaaatccattggcacggccaacagaccgatgggtgctggcgaggccctgcggagagtgctggagtgcctggcgtcgggcatcgtgatgccagatggttctggcatttatgacccttgtgaaaaagaagccactgatgctattgggcatctagacagacagcaacgggaagatatcacacagagtgcgcagcacgcactgcggctcgctgccttcggccagctccataaagtcctaggcatggaccctctgccttccaagatgcccaagaaaccaaagaatgaaaacccagtggactacaccgttcagatcccaccaagcaccacctatgccattacgcccatgaaacgcccaatggaggaggacggggaggagaagtcgcccagcaaaaagaagaagaagattcagaagaaagaggagaaggcagagcccccccaggctatgaatgccctgatgcggttgaaccagctgaagccagggctgcagtacaagctggtgtcccagactgggcccgtccatgcccccatctttaccatgtctgtggaggttgatggcaattcattcgaggcctctgggccctccaaaaagacggccaagctgcacgtggccgttaaggtgttacaggacatgggcttgccgacgggtgctgaaggcagggactcgagcaagggggaggactcggctgaggagaccgaggcgaagccagcagtggtggcccctgccccagtggtagaagctgtctccacccctagtgcggcctttccctcagatgccactgccgagcaggggccgatcctgacaaagcacggcaagaacccagtcatggagctgaacgagaagaggcgtgggctcaagtacgagctcatctccgagaccgggggcagccacgacaagcgcttcgtcatggaggtcgaagtggatggacagaagttccaaggtgctggttccaacaaaaaggtggcgaaggcctacgctgctcttgctgccctagaaaagcttttccctgacacccctctcgcccttgatgccaacaaaaagaagagagccccagtacccgtcagagggggaccgaaatttgctgctaagccacataaccctggcttcggcatgggaggccccatgcacaacgaagtgcccccaccccccaaccttcgagggcggggaagaggcgggagcatccggggacgagggcgcgggcgaggatttggtggcgccaaccatggaggctacatgaatgccggtgctgggtatggaagctatgggtacggaggcaactcggcgacagcaggctacagtgactttttcacagactgctacggctatcatgattttgggtcttcctagagcgtctaaaagtattgcacacaaaatcaactttttactccaatttcctccaactccaaaacccaaagtgtccgtgctgtgtccctgtgcttcactgggtttctcaaccgtggcttttcaccgcagcttgtctgaaactcttagcctgcagaatttaagacaatggcagtttttatcgtgatttgcctttgaacttggtcctattgaagttcacaataagtggaaaacaattttttcagagaatgtatttttgtgcagaattgcacagaattctagagacagcgttgttcggcatc

SEQ ID NO: 144135 - DNA, 3866 bp, Homo sapiens
  Payload ID: 8487
  Gene Symbol: ILF3
  Gene Name: interleukin enhancer binding factor 3, 90kDa
  Uniprot ID: Q12906
  ENST ID: ENST00000592763
  CDS Start-End: 1-2097
atgcgtccaatgcgaatttttgtgaatgatgaccgccatgtgatggcaaagcattcttccgtttatccaacacaagaggagctggaggcagtccagaacatggtgtcccacacggagcgggcgctcaaagctgtgtccgactggatagacgagcaggaaaagggtagcagcgagcaggcagagtccgataacatggatgtgcccccagaggacgacagtaaagaaggggctggggaacagaagacggagcacatgaccagaaccctgcggggagtgatgcgggtgggcctggtggcaaagggcctcctactcaagggggacttggatctggagctggtgctgctgtgtaaggagaagcccacaaccgccctcctggacaaggtggccgacaacctggccatccagcttgctgctgtaacagaagacaagtacgaaatactgcaatctgtcgacgatgctgcgattgtgataaaaaacacaaaagagcctccattgtccctgaccatccacctgacatcccctgttgtcagagaagaaatggagaaagtattagctggagaaacgctatcagtcaacgaccccccggacgttctggacaggcagaaatgccttgctgccttggcgtccctccgacacgccaagtggttccaggccagagccaacgggctgaagtcttgtgtcattgtgatccgggtcttgagggacctgtgcactcgcgtgcccacctggggtcccctccgaggctggcctctcgagctcctgtgtgagaaatccattggcacggccaacagaccgatgggtgctggcgaggccctgcggagagtgctggagtgcctggcgtcgggcatcgtgatgccagatggttctggcatttatgacccttgtgaaaaagaagccactgatgctattgggcatctagacagacagcaacgggaagatatcacacagagtgcgcagcacgcactgcggctcgctgccttcggccagctccataaagtcctaggcatggaccctctgccttccaagatgcccaagaaaccaaagaatgaaaacccagtggactacaccgttcagatcccaccaagcaccacctatgccattacgcccatgaaacgcccaatggaggaggacggggaggagaagtcgcccagcaaaaagaagaagaagattcagaagaaagaggagaaggcagagcccccccaggctatgaatgccctgatgcggttgaaccagctgaagccagggctgcagtacaagctggtgtcccagactgggcccgtccatgcccccatctttaccatgtctgtggaggttgatggcaattcattcgaggcctctgggccctccaaaaagacggccaagctgcacgtggccgttaaggtgttacaggacatgggcttgccgacgggtgctgaaggcagggactcgagcaagggggaggactcggctgaggagaccgaggcgaagccagcagtggtggcccctgccccagtggtagaagctgtctccacccctagtgcggcctttccctcagatgccactgccgagaacgtaaaacagcaggggccgatcctgacaaagcacggcaagaacccagtcatggagctgaacgagaagaggcgtgggctcaagtacgagctcatctccgagaccgggggcagccacgacaagcgcttcgtcatggaggtcgaagtggatggacagaagttccaaggtgctggttccaacaaaaaggtggcgaaggcctacgctgctcttgctgccctagaaaagcttttccctgacacccctctcgcccttgatgccaacaaaaagaagagagccccagtacccgtcagagggggaccgaaatttgctgctaagccacataaccctggcttcggcatgggaggccccatgcacaacgaagtgcccccaccccccaaccttcgagggcggggaagaggcgggagcatccggggacgagggcgcgggcgaggatttggtggcgccaaccatggaggctacatgaatgccggtgctgggtatggaagctatgggtacggaggcaactcggcgacagcaggctacagtaagtgtgcgtttctgtctgtctgacctgggaagcagctgcagtgtagcgtctgggcctgagttagcaaagggtggccagagcagcctcgaggaggctgtagaaggggcacacacctttttgcggtgattaggtcagacggccctcgacccccaccccttcccggccccacagtgggattgattgtgttaatacacgaactcgtgtaactgcaaagttccttaaaagttagaattttaaatttctctgctttaagccatgcgaagcaccaatcttgtgaatacgcttttccggccagtgcacagctcttgtcttgagaaggagccttcattggggggttacaggagcagagaaatctaaaacatgaatttcaaatgtggcgctctgtgccctttttcaaaagaattctaatttcttctctctgctctgtctcccccttttgtaggtgactttttcacagactgctacggctatcatgattttgggtcttcctagagcgtctaaaagtattgcacacaaaatcaactttttactccaatttcctccaactccaaaacccaaagtgtccgtgctgtgtccctgtgcttcactgggtttctcaaccgtggcttttcaccgcagcttgtctgaaactcttagcctgcagaatttaagacaatggcagtttttatcgtgatttgcctttgaacttggtcctattgaagttcacaataagtggaaaacaattttttcagagaatgtatttttgtgcagaattgcacagaattctagagacagcgttgttcggcatcaaggcaaaagcccacctttgctttttatggaaagcattactttatttaaagagacagacaatgacgcattttaatctacctttgtcttaatttacagcaggttttgtatgaatttttaaccttttaacaaactcccaaatctggttgatgcctttgacagtgatgaaaacgatttcaccacatctgaatccagagaaaccggctttttttcttattgcgagcatgttaaaacgttgggaacatgtggggaattgtatattgcgctgaattaacttctcccgcctcttgtaatgctctggtgggttcttgtttgggaatgcgatattttgtggctggtttagctagagagtgaactctcaaaggtatcaaaactgtgcttccattattagtgcaagaaacagacaggctttaaggggtagatgacgtgaaattttgcaagtcttaattacagctgcagatgcatgggattctggatttttttgttgctttttagtttaatgggactttaaaagtaattgaggagaaagaaccgtgatgttccctgtttctccagtaaaggactggcttttgcttgggcagaggtggtgctgctgggtgtgcagctgccacagactccaaaggcgtagaagtttgtgccaacacacggagtcattctggctctctgctgaggcccctgttttctggcaggtgccctccttggaaactggttttggctctgatcagcggttctttttgcagcaaagcctgcatctgtgttgacttgcaagattttgcgtttattcaggcaaaaactggtcaaaatggttactacatgatttgttcccagaggtttgaaacattcagtgaaactttttaaaactttgattgcatgatgtattttttttttagaaagttattgtttgagaataatgtctttttataccaggaaaatagttatcctgaatgacgttgaaaactccccctcccctttatttttttttaatcaatacatgtgaaagtaacaa

SEQ ID NO: 144136 - DNA, 953 bp, Homo sapiens
  Payload ID: 8487
  Gene Symbol: ILF3
  Gene Name: interleukin enhancer binding factor 3, 90kDa
  ENST ID: ENST00000590009
  CDS Start-End: 191-953
ggcgggaaaagtcgcctcctttgtcctcacaggtcgcggagaggcggaccccctccttggaagccccttcccacgcggattgctgaggaagcctttgtggagttgaagtattgataacaccaaggaactctatcacaatttgaaaagataagcaaaagtttgatttccagacactacagaagaagtaaaaatgcgtccaatgcgaatttttgtgaatgatgaccgccatgtgatggcaaagcattcttccgtttatccaacacaagaggagctggaggcagtccagaacatggtgtcccacacggagcgggcgctcaaagctgtgtccgactggatagacgagcaggaaaagggtagcagcgagcaggcagagtccgataacatggatgtgcccccagaggacgacagtaaagaaggggctggggaacagaagacggagcacatgaccagaaccctgcggggagtgatgcgggtgggcctggtggcaaagggcctcctactcaagggggacttggatctggagctggtgctgctgtgtaaggagaagcccacaaccgccctcctggacaaggtggccgacaacctggccatccagcttgctgctgtaacagaagacaagtacgaaatactgcaatctgtcgacgatgctgcgattgtgataaaaaacacaaaagagcctccattgtccctgaccatccacctgacatcccctgttgtcagagaagaaatggagaaagtattagctggagaaacgctatcagtcaacgaccccccggacgttctggacaggcagaaatgccttgctgccttggcgtccctccgacacgccaagtggttccaggccagagccaacgggctgaagtcttgtgtcattgtgatccgggtcttgagggacctgtgcactcgcgtgcccacctggggtcccctccgaggctggcctctcgagctcctgt

SEQ ID NO: 144137 - DNA, 773 bp, Homo sapiens
  Payload ID: 8487
  Gene Symbol: ILF3
  Gene Name: interleukin enhancer binding factor 3, 90kDa
  ENST ID: ENST00000589416
  CDS Start-End: 1-476
tgcccccagaggacgacagtaaagaaggggctggggaacagaagacggagcacatgaccagaaccctgcggggagtgatgcgggtgggcctggtggcaaagggcctcctactcaagggggacttggatctggagctggtgctgctgtgtaaggagaagcccacaaccgccctcctggacaaggtggccgacaacctggccatccagcttgctgctgtaacagaagacaagtacgaaatactgcaatctgtcgacgatgctgcgattgtgataaaaaacacaaaagagcctccattgtccctgaccatccacctgacatcccctgttgtcagagaagaaatggagaaagtattagctggaggccagagccaacgggctgaagtcttgtgtcattgtgatccgggtcttgagggacctgtgcactcgcgtgcccacctggggtcccctccgaggctggcctctcgagctcctgtgtgagaaatccattggcacggccaacagaccgatgggtgctggcgaggccctgcggagagtgctggagtgcctggcgtcgggcatcgtgatgccagcacgcactgcggctcgctgccttcggccagctccataaagtcctaggcatggaccctctgccttccaagatgcccaagaaaccaaagaatgaaaacccagtggactacaccgttcagatcccaccaagcaccacctatgccattacgcccatgaaacgcccaatggaggaggacggggaggagaagtcgcccagcaaaaagaaga

SEQ ID NO: 144138 - DNA, 531 bp, Homo sapiens
  Payload ID: 8487
  Gene Symbol: ILF3
  Gene Name: interleukin enhancer binding factor 3, 90kDa
  ENST ID: ENST00000590869
  CDS Start-End: 1-351
ggtggcgccaaccatggaggctacatgaatgccggtgctgggtatggaagctatgggtacggaggcaactcggcgacagcaggctacaactacagtggtagtggaggccgaagcggcgggaacagctacggctcaggcggggcatcctacaacccagggtcacacgggggctacggcggaggttctgggggcggctcctcataccaaggcaaacaaggaggctactcacagtcgaactacaactccccggggtccggccagaactacagtggccctcccagctcctaccagtcctcacaaggcggctatggcagaaacgcagaccacagcatgaactaccagtacagataagcccccgcggggcggagatttctaccttctgcacttactccccatcagaagatcgagttttatgcatcacagttaacatgtcagctggccctccaggcccccgcccccatcccgtccacgttgctgtgtcgtgaggtgcagcgggtcaccctgtggcccgtcctgtgacccatatttagc

SEQ ID NO: 144139 - DNA, 599 bp, Homo sapiens
  Payload ID: 8487
  Gene Symbol: ILF3
  Gene Name: interleukin enhancer binding factor 3, 90kDa
  ENST ID: ENST00000589283
  CDS Start-End: 301-599
gaccccccttcctcactccttccctaccccctcctcctctttgtcccggtcccgcccccgattccaggagagtcccaggttcccgaggcgggaaaagtcgcctcctttgtcctcacaggtcgcggagaggcggaccccctccttggaagccccttcccacgcggattgctgaggaagcctttgtgggttcgtcgggtttccaaatctctgagttgaagtattgataacaccaaggaactctatcacaatttgaaaagataagcaaaagtttgatttccagacactacagaagaagtaaaaatgcgtccaatgcgaatttttgtgaatgatgaccgccatgtgatggcaaagcattcttccgtttatccaacacaagaggagctggaggcagtccagaacatggtgtcccacacggagcgggcgctcaaagctgtgtccgactggatagacgagcaggaaaagggtagcagcgagcaggcagagtccgataacatggatgtgcccccagaggacgacagtaaagaaggggctggggaacagaagacggagcacatgaccagaaccctgcggggagtgatgcgggtgggcctggtggcaaa

SEQ ID NO: 144140 - DNA, 475 bp, Homo sapiens
  Payload ID: 8487
  Gene Symbol: ILF3
  Gene Name: interleukin enhancer binding factor 3, 90kDa
  ENST ID: ENST00000593061
  CDS Start-End: 1-340
agggggaccgaaatttgctgctaagccacataaccctggcttcggcatgggaggccccatgcacaacgaagtgcccccaccccccaaccttcgagggcggggaagaggcgggagcatccggggacgagggcgcgggcgaggatttggtggcgccaaccatggaggctacatgaatgccggtgctgggtatggaagctatgggtacggaggcaactcggcgacagcaggctacatgatgaaaacgatttcaccacatctgaatccagagaaaccggctttttttcttattgcgagcatgttaaaacgttgggaacatgtggggaattgtatattgcgctgaattaacttctcccgcctcttgtaatgctctggtgggttcttgtttgggaatgcgatattttgtggctggtttagctagagagtgaactctcaaaggtatcaaaactgtgcttccattattagtgcaagaaacaga

SEQ ID NO: 144141 - DNA, 791 bp, Homo sapiens
  Payload ID: 8487
  Gene Symbol: ILF3
  Gene Name: interleukin enhancer binding factor 3, 90kDa
  ENST ID: ENST00000587505
  CDS Start-End: 95-334
atagagttgaagtattgataacaccaaggaactctatcacaatttgaaaagataagcaaaagtttgatttccagacactacagaagaagtaaaaatgcgtccaatgcgaatttttgtgaatgatgaccgccatgtgatggcaaagcattcttccgtttatccaacacaagaggagctggaggcagtccagaacatggtgtcccacacggagcgggcgctcaaagctgtgtccgactggatagacgagcaggaaaagggtagcagcgagcaggcagagtccgataacatggatgtgcccccagaggacgacagtaaagaaggggctgggctgtaacagaagacaagtacgaaatactgcaatctgtcgacgatgctgcgattgtgataaaaaacacaaaagagcctccattgtccctgaccatccacctgacatcccctgttgtcagagaagaaatggagaaagtattagctggaggccagagccaacgggctgaagtcttgtgtcattgtgatccgggtcttgagggacctgtgcactcgcgtgcccacctggggtcccctccgaggctggcctctcgagctcctgtgtgagaaatccattggcacggccaacagaccgatgggtgctggcgaggccctgcggagagtgctggagtgcctggcgtcgggcatcgtgatgccagatggttctggcatttatgacccttgtgaaaaagaagccactgatgctattgggcatctagacagacagcaacgggaagatatcacacagagtgcgcagcacgcactgc

SEQ ID NO: 144142 - DNA, 620 bp, Homo sapiens
  Payload ID: 8487
  Gene Symbol: ILF3
  Gene Name: interleukin enhancer binding factor 3, 90kDa
  ENST ID: ENST00000589485
  CDS Start-End: 1-222
gatgctgcgattgtgataaaaaacacaaaagagcctccattgtccctgaccatccacctgacatcccctgttgtcagagaagaaatggagaaagtattagctggaggccagagccaacgggctgaagtcttgtgtcattgtgatccgggtcttgagggacctgtgcactcgcgtgcccacctggggtcccctccgaggctggcctctcgagctcctgtgtgagaaatccattggcacggccaacagaccgatgggtgctggcgaggccctgcggagagtgctggagtgcctggcgtcgggcatcgtgatgccagatggttctggcatttatgacccttgtgaaaaagaagccactgatgctattgggcatctagacagacagcaacgggaagatatcacacagagtgcgcagcacgcactgcggctcgctgccttcggccagctccataaagtcctaggcatggaccctctgccttccaagatgcccaagaaaccaaagaatgaaaacccagtggactacaccgttcagatcccaccaagcaccacctatgccattacgcccatgaaacgcccaatggaggaggacggggaggagaagtcgcccagcaaaaagaagaaga

SEQ ID NO: 144143 - DNA, 655 bp, Homo sapiens
  Payload ID: 8487
  Gene Symbol: ILF3
  Gene Name: interleukin enhancer binding factor 3, 90kDa
  ENST ID: ENST00000587840
  CDS Start-End: 1-168
ccaacacaagaggagctggaggcagtccagaacatggtgtcccacacggagcgggcgctcaaagctgtgtccgactggatagacgagcaggaaaagggcagaaatgccttgctgccttggcgtccctccgacacgccaagtggttccaggccagagccaacgggctgaagtcttgtgtcattgtgatccgggtcttgagggacctgtgcactcgcgtgcccacctggggtcccctccgaggctggcctctcgagctcctgtgtgagaaatccattggcacggccaacagaccgatgggtgctggcgaggccctgcggagagtgctggagtgcctggcgtcgggcatcgtgatgccagatggttctggcatttatgacccttgtgaaaaagaagccactgatgctattgggcatctagacagacagcaacgggaagatatcacacagagtgcgcagcacgcactgcggctcgctgccttcggccagctccataaagtcctaggcatggaccctctgccttccaagatgcccaagaaaccaaagaatgaaaacccagtggactacaccgttcagatcccaccaagcaccacctatgccattacgcccatgaaacgcccaatggaggaggacggggaggagaagtcgcccagcaaaaa

SEQ ID NO: 144144 - DNA, 849 bp, Homo sapiens
  Payload ID: 8487
  Gene Symbol: ILF3
  Gene Name: interleukin enhancer binding factor 3, 90kDa
  ENST ID: ENST00000585835
  CDS Start-End: 1-541
gcccacaaccgccctcctggacaaggtggccgacaacctggccatccagcttgctgctgtaacagaagacaagtacgaaatactgcaatctgtcgacgatgctgcgattgtgataaaaaacacaaaagagcctccattgtccctgaccatccacctgacatcccctgttgtcagagaagaaatggagaaagtattagctggagaaacgctatcagtcaacgaccccccggacgttctggacaggcagaaatgccttgctgccttggcgtccctccgacacgccaagtggttccaggccagagccaacgggctgaagtcttgtgtcattgtgatccgggtcttgagggacctgtgcactcgcgtgcccacctggggtcccctccgaggctggcctctcgagctcctgtgtgagaaatccattggcacggccaacagaccgatgggtgctggcgaggccctgcggagagtgctggagtgcctggcgtcgggcatcgtgatgccagcacgcactgcggctcgctgccttcggccagctccataaagtcctaggcatggaccctctgccttccaagatgcccaagaaaccaaagaatgaaaacccagtggactacaccgttcagatcccaccaagcaccacctatgccattacgcccatgaaacgcccaatggaggaggacggggaggagaagtcgcccagcaaaaagaagaagaagattcagaagaaagaggagaaggcagagcccccccaggctatgaatgccctgatgcggttgaaccagctgaagccagggctgcagtacaagctggtgtcccagactgggcccgtccatgcccccatctttaccatgt

SEQ ID NO: 144145 - DNA, 637 bp, Homo sapiens
  Payload ID: 8487
  Gene Symbol: ILF3
  Gene Name: interleukin enhancer binding factor 3, 90kDa
  ENST ID: ENST00000589052
  CDS Start-End: 91-330
agttgaagtattgataacaccaaggaactctatcacaatttgaaaagataagcaaaagtttgatttccagacactacagaagaagtaaaaatgcgtccaatgcgaatttttgtgaatgatgaccgccatgtgatggcaaagcattcttccgtttatccaacacaagaggagctggaggcagtccagaacatggtgtcccacacggagcgggcgctcaaagctgtgtccgactggatagacgagcaggaaaagggtagcagcgagcaggcagagtccgataacatggatgtgcccccagaggacgacagtaaagaaggggctgggctgtaacagaagacaagtacgaaatactgcaatctgtcgacgatgctgcgattgtgataaaaaacacaaaagagcctccattgtccctgaccatccacctgacatcccctgttgtcagagaagaaatggagaaagtattagctggagaaacgctatcagtcaacgaccccccggacgttctggacaggcagaaatgccttgctgccttggcgtccctccgacacgccaagtggttccaggccagagccaacgggctgaagtcttgtgtcattgtgatccgggtcttgagggacctgtgcactcgcgtgcccac

SEQ ID NO: 144146 - DNA, 839 bp, Homo sapiens
  Payload ID: 8487
  Gene Symbol: ILF3
  Gene Name: interleukin enhancer binding factor 3, 90kDa
  ENST ID: ENST00000589600
  CDS Start-End: 355-839
cccagcagcccggcgcgcaccgcgtggcttttgggggcagaccccggcgggctgtggcaggagggcggcggcggcggctgcggtcgaagaaggggacgccgacaagccagtgggacacctcacaagtcagctccgatgtcctcaggacaagactgctatagtcaccagtgctttgttgctttctggcgctccggtaggatccaggctcacttggtatatcccctgctgcagattacggtccacttctcccgggagctgctttcaagttgaagtattgataacaccaaggaactctatcacaatttgaaaagataagcaaaagtttgatttccagacactacagaagaagtaaaaatgcgtccaatgcgaatttttgtgaatgatgaccgccatgtgatggcaaagcattcttccgtttatccaacacaagaggagctggaggcagtccagaacatggtgtcccacacggagcgggcgctcaaagctgtgtccgactggatagacgagcaggaaaagggtagcagcgagcaggcagagtccgataacatggatgtgcccccagaggacgacagtaaagaaggggctggggaacagaagacggagcacatgaccagaaccctgcggggagtgatgcgggtgggcctggtggcaaagggcctcctactcaagggggacttggatctggagctggtgctgctgtgtaaggagaagcccacaaccgccctcctggacaaggtggccgacaacctggccatccagcttgctgctgtaacagaagacaagtacgaaatactgcaatctgtcgacgatgctgcgattgtgataaaaaacacaaaaga

SEQ ID NO: 144147 - DNA, 3219 bp, Homo sapiens
  Payload ID: 8487
  Gene Symbol: ILF3
  Gene Name: interleukin enhancer binding factor 3, 90kDa
  Uniprot ID: Q12906
  ENST ID: ENST00000590261
  CDS Start-End: 1-2685
atgcgtccaatgcgaatttttgtgaatgatgaccgccatgtgatggcaaagcattcttccgtttatccaacacaagaggagctggaggcagtccagaacatggtgtcccacacggagcgggcgctcaaagctgtgtccgactggatagacgagcaggaaaagggtagcagcgagcaggcagagtccgataacatggatgtgcccccagaggacgacagtaaagaaggggctggggaacagaagacggagcacatgaccagaaccctgcggggagtgatgcgggtgggcctggtggcaaagggcctcctactcaagggggacttggatctggagctggtgctgctgtgtaaggagaagcccacaaccgccctcctggacaaggtggccgacaacctggccatccagcttgctgctgtaacagaagacaagtacgaaatactgcaatctgtcgacgatgctgcgattgtgataaaaaacacaaaagagcctccattgtccctgaccatccacctgacatcccctgttgtcagagaagaaatggagaaagtattagctggagaaacgctatcagtcaacgaccccccggacgttctggacaggcagaaatgccttgctgccttggcgtccctccgacacgccaagtggttccaggccagagccaacgggctgaagtcttgtgtcattgtgatccgggtcttgagggacctgtgcactcgcgtgcccacctggggtcccctccgaggctggcctctcgagctcctgtgtgagaaatccattggcacggccaacagaccgatgggtgctggcgaggccctgcggagagtgctggagtgcctggcgtcgggcatcgtgatgccagatggttctggcatttatgacccttgtgaaaaagaagccactgatgctattgggcatctagacagacagcaacgggaagatatcacacagagtgcgcagcacgcactgcggctcgctgccttcggccagctccataaagtcctaggcatggaccctctgccttccaagatgcccaagaaaccaaagaatgaaaacccagtggactacaccgttcagatcccaccaagcaccacctatgccattacgcccatgaaacgcccaatggaggaggacggggaggagaagtcgcccagcaaaaagaagaagaagattcagaagaaagaggagaaggcagagcccccccaggctatgaatgccctgatgcggttgaaccagctgaagccagggctgcagtacaagctggtgtcccagactgggcccgtccatgcccccatctttaccatgtctgtggaggttgatggcaattcattcgaggcctctgggccctccaaaaagacggccaagctgcacgtggccgttaaggtgttacaggacatgggcttgccgacgggtgctgaaggcagggactcgagcaagggggaggactcggctgaggagaccgaggcgaagccagcagtggtggcccctgccccagtggtagaagctgtctccacccctagtgcggcctttccctcagatgccactgccgagcaggggccgatcctgacaaagcacggcaagaacccagtcatggagctgaacgagaagaggcgtgggctcaagtacgagctcatctccgagaccgggggcagccacgacaagcgcttcgtcatggaggtcgaagtggatggacagaagttccaaggtgctggttccaacaaaaaggtggcgaaggcctacgctgctcttgctgccctagaaaagcttttccctgacacccctctcgcccttgatgccaacaaaaagaagagagccccagtacccgtcagagggggaccgaaatttgctgctaagccacataaccctggcttcggcatgggaggccccatgcacaacgaagtgcccccaccccccaaccttcgagggcggggaagaggcgggagcatccggggacgagggcgcgggcgaggatttggtggcgccaaccatggaggctacatgaatgccggtgctgggtatggaagctatgggtacggaggcaactcggcgacagcaggctacagtcagttctacagcaacggagggcattctgggaatgccagtggcggtggcggcgggggcggtggtggctcctccggctatggctcctactaccaaggtgacaactacaactcaccggtgcccccaaaacacgctgggaagaagcagccgcacgggggccagcagaagccctcctacggctcgggctaccagtcccaccagggccagcagcagtcctacaaccagagcccctacagcaactatggccctccacagggcaagcagaaaggctataaccatggacaaggcagctactcctactcgaactcctacaactctcccgggggcgggggcggatccgactacaactacgagagcaaattcaactacagtggtagtggaggccgaagcggcgggaacagctacggctcaggcggggcatcctacaacccagggtcacacgggggctacggcggaggttctgggggcggctcctcataccaaggcaaacaaggaggctactcacagtcgaactacaactccccggggtccggccagaactacagtggccctcccagctcctaccagtcctcacaaggcggctatggcagaaacgcagaccacagcatgaactaccagtacagataagcccccgcggggcggagatttctaccttctgcacttactccccatcagaagatcgagttttatgcatcacagttaacatgtcagctggccctccaggcccccgcccccatcccgtccacgttgctgtgtcgtgaggtgcagcgggtcaccctgtggcccgtcctgtgacccatatttagccgtgtttgggactccgtgtcttcaatggtttgttagttgccattacaactttgtctgggtagagtttttgagtttttgcagttcagtatccctctgtctattcacacttcgtgttagtggtaactcagtttgtctttaaatagttacagaagggatacgtcatttgttaatgcttttgtgaagtgagttaaacgagctttctgtattttaatgctttagtgtttcagttttataagtgaagattttattttaaaaaccagtgggaaagagtggggggtttctttttatgtctgggtcattcaggcagtacatctgaattaagctgaatgtagacaaataaagaaaaacaaaact

SEQ ID NO: 144148 - DNA, 2697 bp, Homo sapiens
  Payload ID: 8487
  Gene Symbol: ILF3
  Gene Name: interleukin enhancer binding factor 3, 90kDa
  Uniprot ID: Q12906
  ENST ID: ENST00000588657
  CDS Start-End: 1-2697
atgcgtccaatgcgaatttttgtgaatgatgaccgccatgtgatggcaaagcattcttccgtttatccaacacaagaggagctggaggcagtccagaacatggtgtcccacacggagcgggcgctcaaagctgtgtccgactggatagacgagcaggaaaagggtagcagcgagcaggcagagtccgataacatggatgtgcccccagaggacgacagtaaagaaggggctggggaacagaagacggagcacatgaccagaaccctgcggggagtgatgcgggtgggcctggtggcaaagggcctcctactcaagggggacttggatctggagctggtgctgctgtgtaaggagaagcccacaaccgccctcctggacaaggtggccgacaacctggccatccagcttgctgctgtaacagaagacaagtacgaaatactgcaatctgtcgacgatgctgcgattgtgataaaaaacacaaaagagcctccattgtccctgaccatccacctgacatcccctgttgtcagagaagaaatggagaaagtattagctggagaaacgctatcagtcaacgaccccccggacgttctggacaggcagaaatgccttgctgccttggcgtccctccgacacgccaagtggttccaggccagagccaacgggctgaagtcttgtgtcattgtgatccgggtcttgagggacctgtgcactcgcgtgcccacctggggtcccctccgaggctggcctctcgagctcctgtgtgagaaatccattggcacggccaacagaccgatgggtgctggcgaggccctgcggagagtgctggagtgcctggcgtcgggcatcgtgatgccagatggttctggcatttatgacccttgtgaaaaagaagccactgatgctattgggcatctagacagacagcaacgggaagatatcacacagagtgcgcagcacgcactgcggctcgctgccttcggccagctccataaagtcctaggcatggaccctctgccttccaagatgcccaagaaaccaaagaatgaaaacccagtggactacaccgttcagatcccaccaagcaccacctatgccattacgcccatgaaacgcccaatggaggaggacggggaggagaagtcgcccagcaaaaagaagaagaagattcagaagaaagaggagaaggcagagcccccccaggctatgaatgccctgatgcggttgaaccagctgaagccagggctgcagtacaagctggtgtcccagactgggcccgtccatgcccccatctttaccatgtctgtggaggttgatggcaattcattcgaggcctctgggccctccaaaaagacggccaagctgcacgtggccgttaaggtgttacaggacatgggcttgccgacgggtgctgaaggcagggactcgagcaagggggaggactcggctgaggagaccgaggcgaagccagcagtggtggcccctgccccagtggtagaagctgtctccacccctagtgcggcctttccctcagatgccactgccgagaacgtaaaacagcaggggccgatcctgacaaagcacggcaagaacccagtcatggagctgaacgagaagaggcgtgggctcaagtacgagctcatctccgagaccgggggcagccacgacaagcgcttcgtcatggaggtcgaagtggatggacagaagttccaaggtgctggttccaacaaaaaggtggcgaaggcctacgctgctcttgctgccctagaaaagcttttccctgacacccctctcgcccttgatgccaacaaaaagaagagagccccagtacccgtcagagggggaccgaaatttgctgctaagccacataaccctggcttcggcatgggaggccccatgcacaacgaagtgcccccaccccccaaccttcgagggcggggaagaggcgggagcatccggggacgagggcgcgggcgaggatttggtggcgccaaccatggaggctacatgaatgccggtgctgggtatggaagctatgggtacggaggcaactcggcgacagcaggctacagtcagttctacagcaacggagggcattctgggaatgccagtggcggtggcggcgggggcggtggtggctcctccggctatggctcctactaccaaggtgacaactacaactcaccggtgcccccaaaacacgctgggaagaagcagccgcacgggggccagcagaagccctcctacggctcgggctaccagtcccaccagggccagcagcagtcctacaaccagagcccctacagcaactatggccctccacagggcaagcagaaaggctataaccatggacaaggcagctactcctactcgaactcctacaactctcccgggggcgggggcggatccgactacaactacgagagcaaattcaactacagtggtagtggaggccgaagcggcgggaacagctacggctcaggcggggcatcctacaacccagggtcacacgggggctacggcggaggttctgggggcggctcctcataccaaggcaaacaaggaggctactcacagtcgaactacaactccccggggtccggccagaactacagtggccctcccagctcctaccagtcctcacaaggcggctatggcagaaacgcagaccacagcatgaactaccagtacagataa

SEQ ID NO: 144149 - DNA, 413 bp, Homo sapiens
  Payload ID: 8487
  Gene Symbol: ILF3
  Gene Name: interleukin enhancer binding factor 3, 90kDa
  ENST ID: ENST00000593199
  CDS Start-End: 181-413
acatttccaacattgtttgccagttgctgcttaggtgacatggatcagcaacgaagcgtcggtttcagtggtttctttttctggactccgagttgaagtattgataacaccaaggaactctatcacaatttgaaaagataagcaaaagtttgatttccagacactacagaagaagtaaaaatgcgtccaatgcgaatttttgtgaatgatgaccgccatgtgatggcaaagcattcttccgtttatccaacacaagaggagctggaggcagtccagaacatggtgtcccacacggagcgggcgctcaaagctgtgtccgactggatagacgagcaggaaaagggtagcagcgagcaggcagagtccgataacatggatgtgcccccagaggacgacagtaaagaaggggctgg

SEQ ID NO: 144150 - DNA, 2358 bp, Homo sapiens
  Payload ID: 8488
  Gene Symbol: IRAK1
  Gene Name: interleukin-1 receptor-associated kinase 1
  ENST ID: ENST00000369973
  CDS Start-End: 86-1105
agtgtccgcggacccggccggcccaggcccgcgcccgccgcggccctgagaggccccggcaggtcccggcccggcggcggcagccatggccggggggccgggcccgggggagcccgcagcccccggcgcccagcacttcttgtacgaggtgccgccctgggtcatgtgccgcttctacaaagtgatggacgccctggagcccgccgactggtgccagttcggtgggtggcggcgggctgccggggggcgggaggcgcgcgggctcctggcgccgacgcctgacgccccccgccccgcagccgccctgatcgtgcgcgaccagaccgagctgcggctgtgcgagcgctccgggcagcgcacggccagcgtcctgtggccctggatcaaccgcaacgcccgtgtggccgacctcgtgcacatcctcacgcacctgcagctgctccgtgcgcgggacatcatcacagcctggcaccctcccgccccgcttccgtccccaggcaccactgccccgaggcccagcagcatccctgcacccgccgaggccgaggcctggagcccccggaagttgccatcctcagcctccaccttcctctccccagcttttccaggctcccagacccattcagggcctgagctcggcctggtcccaagccctgcttccctgtggcctccaccgccatctccagccccttcttctaccaagccaggcccagagagctcagtgtccctcctgcagggagcccgcccctttccgttttgctggcccctctgtgagatttcccggggcacccacaacttctcggaggagctcaagatcggggagggtggctttgggtgcgtgtaccgggcggtgatgaggaacacggtgtatgctgtgaagaggctgaaggagaacgctgacctggagtggactgcagtgaagcagagcttcctgaccgaggtggagcagctgtccagacccaggcctgcccacctctctcctggcctcagcgactggacatccttctgggtacagcccgggcaattcagtttctacatcaggacagccccagcctcatccatggagacatcaagagttccaacgtccttctggatgagaggctgacacccaagctgggagactttggcctggcccggttcagccgctttgccgggtccagccccagccagagcagcatggtggcccggacacagacagtgcggggcaccctggcctacctgcccgaggagtacatcaagacgggaaggctggctgtggacacggacaccttcagctttggggtggtagtgctagagaccttggctggtcagagggctgtgaagacgcacggtgccaggaccaagtatctgaaagacctggtggaagaggaggctgaggaggctggagtggctttgagaagcacccagagcacactgcaagcaggtctggctgcagatgcctgggctgctcccatcgccatgcagatctacaagaagcacctggaccccaggcccgggccctgcccacctgagctgggcctgggcctgggccagctggcctgctgctgcctgcaccgccgggccaaaaggaggcctcctatgacccaggtgtacgagaggctagagaagctgcaggcagtggtggcgggggtgcccgggcattcggaggccgccagctgcatccccccttccccgcaggagaactcctacgtgtccagcactggcagagcccacagtggggctgctccatggcagcccctggcagcgccatcaggagccagtgcccaggcagcagagcagctgcagagaggccccaaccagcccgtggagagtgacgagagcctaggcggcctctctgctgccctgcgctcctggcacttgactccaagctgccctctggacccagcacccctcagggaggccggctgtcctcagggggacacggcaggagaatcgagctgggggagtggcccaggatcccggcccacagccgtggaaggactggcccttggcagctctgcatcatcgtcgtcagagccaccgcagattatcatcaaccctgcccgacagaagatggtccagaagctggccctgtacgaggatggggccctggacagcctgcagctgctgtcgtccagctccctcccaggcttgggcctggaacaggacaggcaggggcccgaagaaagtgatgaatttcagagctgatgtgttcacctgggcagatcccccaaatccggaagtcaaagttctcatggtcagaagttctcatggtgcacgagtcctcagcactctgccggcagtgggggtgggggcccatgcccgcgggggagagaaggaggtggccctgctgttctaggctctgtgggcataggcagg

SEQ ID NO: 144151 - DNA, 3319 bp, Homo sapiens
  Payload ID: 8488
  Gene Symbol: IRAK1
  Gene Name: interleukin-1 receptor-associated kinase 1
  Uniprot ID: P51617
  ENST ID: ENST00000369974
  CDS Start-End: 65-1966
cccaggcccgcgcccgccgcggccctgagaggccccggcaggtcccggcccggcggcggcagccatggccggggggccgggcccgggggagcccgcagcccccggcgcccagcacttcttgtacgaggtgccgccctgggtcatgtgccgcttctacaaagtgatggacgccctggagcccgccgactggtgccagttcgccgccctgatcgtgcgcgaccagaccgagctgcggctgtgcgagcgctccgggcagcgcacggccagcgtcctgtggccctggatcaaccgcaacgcccgtgtggccgacctcgtgcacatcctcacgcacctgcagctgctccgtgcgcgggacatcatcacagcctggcaccctcccgccccgcttccgtccccaggcaccactgccccgaggcccagcagcatccctgcacccgccgaggccgaggcctggagcccccggaagttgccatcctcagcctccaccttcctctccccagcttttccaggctcccagacccattcagggcctgagctcggcctggtcccaagccctgcttccctgtggcctccaccgccatctccagccccttcttctaccaagccaggcccagagagctcagtgtccctcctgcagggagcccgcccctttccgttttgctggcccctctgtgagatttcccggggcacccacaacttctcggaggagctcaagatcggggagggtggctttgggtgcgtgtaccgggcggtgatgaggaacacggtgtatgctgtgaagaggctgaaggagaacgctgacctggagtggactgcagtgaagcagagcttcctgaccgaggtggagcagctgtccaggtttcgtcacccaaacattgtggactttgctggctactgtgctcagaacggcttctactgcctggtgtacggcttcctgcccaacggctccctggaggaccgtctccactgccagacccaggcctgcccacctctctcctggcctcagcgactggacatccttctgggtacagcccgggcaattcagtttctacatcaggacagccccagcctcatccatggagacatcaagagttccaacgtccttctggatgagaggctgacacccaagctgggagactttggcctggcccggttcagccgctttgccgggtccagccccagccagagcagcatggtggcccggacacagacagtgcggggcaccctggcctacctgcccgaggagtacatcaagacgggaaggctggctgtggacacggacaccttcagctttggggtggtagtgctagagaccttggctggtcagagggctgtgaagacgcacggtgccaggaccaagtatctggtgtacgagaggctagagaagctgcaggcagtggtggcgggggtgcccgggcattcggaggccgccagctgcatccccccttccccgcaggagaactcctacgtgtccagcactggcagagcccacagtggggctgctccatggcagcccctggcagcgccatcaggagccagtgcccaggcagcagagcagctgcagagaggccccaaccagcccgtggagagtgacgagagcctaggcggcctctctgctgccctgcgctcctggcacttgactccaagctgccctctggacccagcacccctcagggaggccggctgtcctcagggggacacggcaggagaatcgagctgggggagtggcccaggatcccggcccacagccgtggaaggactggcccttggcagctctgcatcatcgtcgtcagagccaccgcagattatcatcaaccctgcccgacagaagatggtccagaagctggccctgtacgaggatggggccctggacagcctgcagctgctgtcgtccagctccctcccaggcttgggcctggaacaggacaggcaggggcccgaagaaagtgatgaatttcagagctgatgtgttcacctgggcagatcccccaaatccggaagtcaaagttctcatggtcagaagttctcatggtgcacgagtcctcagcactctgccggcagtgggggtgggggcccatgcccgcgggggagagaaggaggtggccctgctgttctaggctctgtgggcataggcaggcagagtggaaccctgcctccatgccagcatctgggggcaaggaaggctggcatcatccagtgaggaggctggcgcatgttgggaggctgctggctgcacagacccgtgaggggaggagaggggctgctgtgcaggggtgtggagtagggagctggctcccctgagagccatgcagggcgtctgcagcccaggcctctggcagcagctctttgcccatctctttggacagtggccaccctgcacaatggggccgacgaggcctagggccctcctacctgcttacaatttggaaaagtgtggccgggtgcggtggctcacgcctgtaatcccagcactttgggaggccaaggcaggaggatcgctggagcccagtaggtcaagaccagccagggcaacatgatgagaccctgtctctgccaaaaaattttttaaactattagcctggcgtggtagcgcacgcctgtggtcccagctgctggggaggctgaagtaggaggatcatttatgcttgggaggtcgaggctgcagtgagtcatgattgtatgactgcactccagcctgggtgacagagcaagaccctgtttcaaaaagaaaaaccctgggaaaagtgaagtatggctgtaagtctcatggttcagtcctagcaagaagcgagaattctgagatcctccagaaagtcgagcagcacccacctccaacctcgggccagtgtcttcaggctttactggggacctgcgagctggcctaatgtggtggcctgcaagccaggccatccctgggcgccacagacgagctccgagccaggtcaggcttcggaggccacaagctcagcctcaggcccaggcactgattgtggcagaggggccactacccaaggtctagctaggcccaagacctagttacccagacagtgagaagcccctggaaggcagaaaagttgggagcatggcagacagggaagggaaacattttcagggaaaagacatgtatcacatgtcttcagaagcaagtcaggtttcatgtaaccgagtgtcctcttgcgtgtccaaaagtagcccagggctgtagcacaggcttcacagtgattttgtgttcagccgtgagtcacactacatgcccccgtgaagctgggcattggtgacgtccaggttgtccttgagtaataaaaacgtatgttgcaat

SEQ ID NO: 144152 - DNA, 3666 bp, Homo sapiens
  Payload ID: 8488
  Gene Symbol: IRAK1
  Gene Name: interleukin-1 receptor-associated kinase 1
  Uniprot ID: P51617
  ENST ID: ENST00000369980
  CDS Start-End: 169-2307
gcgcaagatggcggcgggcccgggcaccgccccttccgccccgccgggcgtcgcacgaggccggctcgaaggggaagtgagtcagtgtccgcggacccggccggcccaggcccgcgcccgccgcggccctgagaggccccggcaggtcccggcccggcggcggcagccatggccggggggccgggcccgggggagcccgcagcccccggcgcccagcacttcttgtacgaggtgccgccctgggtcatgtgccgcttctacaaagtgatggacgccctggagcccgccgactggtgccagttcgccgccctgatcgtgcgcgaccagaccgagctgcggctgtgcgagcgctccgggcagcgcacggccagcgtcctgtggccctggatcaaccgcaacgcccgtgtggccgacctcgtgcacatcctcacgcacctgcagctgctccgtgcgcgggacatcatcacagcctggcaccctcccgccccgcttccgtccccaggcaccactgccccgaggcccagcagcatccctgcacccgccgaggccgaggcctggagcccccggaagttgccatcctcagcctccaccttcctctccccagcttttccaggctcccagacccattcagggcctgagctcggcctggtcccaagccctgcttccctgtggcctccaccgccatctccagccccttcttctaccaagccaggcccagagagctcagtgtccctcctgcagggagcccgcccctttccgttttgctggcccctctgtgagatttcccggggcacccacaacttctcggaggagctcaagatcggggagggtggctttgggtgcgtgtaccgggcggtgatgaggaacacggtgtatgctgtgaagaggctgaaggagaacgctgacctggagtggactgcagtgaagcagagcttcctgaccgaggtggagcagctgtccaggtttcgtcacccaaacattgtggactttgctggctactgtgctcagaacggcttctactgcctggtgtacggcttcctgcccaacggctccctggaggaccgtctccactgccagacccaggcctgcccacctctctcctggcctcagcgactggacatccttctgggtacagcccgggcaattcagtttctacatcaggacagccccagcctcatccatggagacatcaagagttccaacgtccttctggatgagaggctgacacccaagctgggagactttggcctggcccggttcagccgctttgccgggtccagccccagccagagcagcatggtggcccggacacagacagtgcggggcaccctggcctacctgcccgaggagtacatcaagacgggaaggctggctgtggacacggacaccttcagctttggggtggtagtgctagagaccttggctggtcagagggctgtgaagacgcacggtgccaggaccaagtatctgaaagacctggtggaagaggaggctgaggaggctggagtggctttgagaagcacccagagcacactgcaagcaggtctggctgcagatgcctgggctgctcccatcgccatgcagatctacaagaagcacctggaccccaggcccgggccctgcccacctgagctgggcctgggcctgggccagctggcctgctgctgcctgcaccgccgggccaaaaggaggcctcctatgacccaggtgtacgagaggctagagaagctgcaggcagtggtggcgggggtgcccgggcattcggaggccgccagctgcatccccccttccccgcaggagaactcctacgtgtccagcactggcagagcccacagtggggctgctccatggcagcccctggcagcgccatcaggagccagtgcccaggcagcagagcagctgcagagaggccccaaccagcccgtggagagtgacgagagcctaggcggcctctctgctgccctgcgctcctggcacttgactccaagctgccctctggacccagcacccctcagggaggccggctgtcctcagggggacacggcaggagaatcgagctgggggagtggcccaggatcccggcccacagccgtggaaggactggcccttggcagctctgcatcatcgtcgtcagagccaccgcagattatcatcaaccctgcccgacagaagatggtccagaagctggccctgtacgaggatggggccctggacagcctgcagctgctgtcgtccagctccctcccaggcttgggcctggaacaggacaggcaggggcccgaagaaagtgatgaatttcagagctgatgtgttcacctgggcagatcccccaaatccggaagtcaaagttctcatggtcagaagttctcatggtgcacgagtcctcagcactctgccggcagtgggggtgggggcccatgcccgcgggggagagaaggaggtggccctgctgttctaggctctgtgggcataggcaggcagagtggaaccctgcctccatgccagcatctgggggcaaggaaggctggcatcatccagtgaggaggctggcgcatgttgggaggctgctggctgcacagacccgtgaggggaggagaggggctgctgtgcaggggtgtggagtagggagctggctcccctgagagccatgcagggcgtctgcagcccaggcctctggcagcagctctttgcccatctctttggacagtggccaccctgcacaatggggccgacgaggcctagggccctcctacctgcttacaatttggaaaagtgtggccgggtgcggtggctcacgcctgtaatcccagcactttgggaggccaaggcaggaggatcgctggagcccagtaggtcaagaccagccagggcaacatgatgagaccctgtctctgccaaaaaattttttaaactattagcctggcgtggtagcgcacgcctgtggtcccagctgctggggaggctgaagtaggaggatcatttatgcttgggaggtcgaggctgcagtgagtcatgattgtatgactgcactccagcctgggtgacagagcaagaccctgtttcaaaaagaaaaaccctgggaaaagtgaagtatggctgtaagtctcatggttcagtcctagcaagaagcgagaattctgagatcctccagaaagtcgagcagcacccacctccaacctcgggccagtgtcttcaggctttactggggacctgcgagctggcctaatgtggtggcctgcaagccaggccatccctgggcgccacagacgagctccgagccaggtcaggcttcggaggccacaagctcagcctcaggcccaggcactgattgtggcagaggggccactacccaaggtctagctaggcccaagacctagttacccagacagtgagaagcccctggaaggcagaaaagttgggagcatggcagacagggaagggaaacattttcagggaaaagacatgtatcacatgtcttcagaagcaagtcaggtttcatgtaaccgagtgtcctcttgcgtgtccaaaagtagcccagggctgtagcacaggcttcacagtgattttgtgttcagccgtgagtcacactacatgcccccgtgaagctgggcattggtgacgtccaggttgtccttgagtaataaaaacgtatgttgcaatctcggg

SEQ ID NO: 144153 - DNA, 2049 bp, Homo sapiens
  Payload ID: 8488
  Gene Symbol: IRAK1
  Gene Name: interleukin-1 receptor-associated kinase 1
  Uniprot ID: P51617
  ENST ID: ENST00000393687
  CDS Start-End: 1-2049
atggccggggggccgggcccgggggagcccgcagcccccggcgcccagcacttcttgtacgaggtgccgccctgggtcatgtgccgcttctacaaagtgatggacgccctggagcccgccgactggtgccagttcgccgccctgatcgtgcgcgaccagaccgagctgcggctgtgcgagcgctccgggcagcgcacggccagcgtcctgtggccctggatcaaccgcaacgcccgtgtggccgacctcgtgcacatcctcacgcacctgcagctgctccgtgcgcgggacatcatcacagcctggcaccctcccgccccgcttccgtccccaggcaccactgccccgaggcccagcagcatccctgcacccgccgaggccgaggcctggagcccccggaagttgccatcctcagcctccaccttcctctccccagcttttccaggctcccagacccattcagggcctgagctcggcctggtcccaagccctgcttccctgtggcctccaccgccatctccagccccttcttctaccaagccaggcccagagagctcagtgtccctcctgcagggagcccgcccctttccgttttgctggcccctctgtgagatttcccggggcacccacaacttctcggaggagctcaagatcggggagggtggctttgggtgcgtgtaccgggcggtgatgaggaacacggtgtatgctgtgaagaggctgaaggagaacgctgacctggagtggactgcagtgaagcagagcttcctgaccgaggtggagcagctgtccaggtttcgtcacccaaacattgtggactttgctggctactgtgctcagaacggcttctactgcctggtgtacggcttcctgcccaacggctccctggaggaccgtctccactgccagacccaggcctgcccacctctctcctggcctcagcgactggacatccttctgggtacagcccgggcaattcagtttctacatcaggacagccccagcctcatccatggagacatcaagagttccaacgtccttctggatgagaggctgacacccaagctgggagactttggcctggcccggttcagccgctttgccgggtccagccccagccagagcagcatggtggcccggacacagacagtgcggggcaccctggcctacctgcccgaggagtacatcaagacgggaaggctggctgtggacacggacaccttcagctttggggtggtagtgctagagaccttggctggtcagagggctgtgaagacgcacggtgccaggaccaagtatctgaaagacctggtggaagaggaggctgaggaggctggagtggctttgagaagcacccagagcacactgcaagcaggtctggctgcagatgcctgggctgctcccatcgccatgcagatctacaagaagcacctggaccccaggcccgggccctgcccacctgagctgggcctgggcctgggccagctggcctgctgctgcctgcaccgccgggccaaaaggaggcctcctatgacccaggagaactcctacgtgtccagcactggcagagcccacagtggggctgctccatggcagcccctggcagcgccatcaggagccagtgcccaggcagcagagcagctgcagagaggccccaaccagcccgtggagagtgacgagagcctaggcggcctctctgctgccctgcgctcctggcacttgactccaagctgccctctggacccagcacccctcagggaggccggctgtcctcagggggacacggcaggagaatcgagctgggggagtggcccaggatcccggcccacagccgtggaaggactggcccttggcagctctgcatcatcgtcgtcagagccaccgcagattatcatcaaccctgcccgacagaagatggtccagaagctggccctgtacgaggatggggccctggacagcctgcagctgctgtcgtccagctccctcccaggcttgggcctggaacaggacaggcaggggcccgaagaaagtgatgaatttcagagctga

SEQ ID NO: 144154 - DNA, 2127 bp, Homo sapiens
  Payload ID: 8488
  Gene Symbol: IRAK1
  Gene Name: interleukin-1 receptor-associated kinase 1
  ENST ID: ENST00000429936
  CDS Start-End: 1-2127
atggccggggggccgggcccgggggagcccgcagcccccggcgcccagcacttcttgtacgaggtgccgccctgggtcatgtgccgcttctacaaagtgatggacgccctggagcccgccgactggtgccagttcggtgggtggcggcgggctgccggggggcgggaggcgcgcgggctcctggcgccgacgcctgacgccccccgccccgcagccgccctgatcgtgcgcgaccagaccgagctgcggctgtgcgagcgctccgggcagcgcacggccagcgtcctgtggccctggatcaaccgcaacgcccgtgtggccgacctcgtgcacatcctcacgcacctgcagctgctccgtgcgcgggacatcatcacagcctggcaccctcccgccccgcttccgtccccaggcaccactgccccgaggcccagcagcatccctgcacccgccgaggccgaggcctggagcccccggaagttgccatcctcagcctccaccttcctctccccagcttttccaggctcccagacccattcagggcctgagctcggcctggtcccaagccctgcttccctgtggcctccaccgccatctccagccccttcttctaccaagccaggcccagagagctcagtgtccctcctgcagggagcccgcccctttccgttttgctggcccctctgtgagatttcccggggcacccacaacttctcggaggagctcaagatcggggagggtggctttgggtgcgtgtaccgggcggtgatgaggaacacggtgtatgctgtgaagaggctgaaggagaacgctgacctggagtggactgcagtgaagcagagcttcctgaccgaggtggagcagctgtccaggtttcgtcacccaaacattgtggactttgctggctactgtgctcagaacggcttctactgcctggtgtacggcttcctgcccaacggctccctggaggaccgtctccactgccagacccaggcctgcccacctctctcctggcctcagcgactggacatccttctgggtacagcccgggcaattcagtttctacatcaggacagccccagcctcatccatggagacatcaagagttccaacgtccttctggatgagaggctgacacccaagctgggagactttggcctggcccggttcagccgctttgccgggtccagccccagccagagcagcatggtggcccggacacagacagtgcggggcaccctggcctacctgcccgaggagtacatcaagacgggaaggctggctgtggacacggacaccttcagctttggggtggtagtgctagagaccttggctggtcagagggctgtgaagacgcacggtgccaggaccaagtatctgaaagacctggtggaagaggaggctgaggaggctggagtggctttgagaagcacccagagcacactgcaagcaggtctggctgcagatgcctgggctgctcccatcgccatgcagatctacaagaagcacctggaccccaggcccgggccctgcccacctgagctgggcctgggcctgggccagctggcctgctgctgcctgcaccgccgggccaaaaggaggcctcctatgacccaggagaactcctacgtgtccagcactggcagagcccacagtggggctgctccatggcagcccctggcagcgccatcaggagccagtgcccaggcagcagagcagctgcagagaggccccaaccagcccgtggagagtgacgagagcctaggcggcctctctgctgccctgcgctcctggcacttgactccaagctgccctctggacccagcacccctcagggaggccggctgtcctcagggggacacggcaggagaatcgagctgggggagtggcccaggatcccggcccacagccgtggaaggactggcccttggcagctctgcatcatcgtcgtcagagccaccgcagattatcatcaaccctgcccgacagaagatggtccagaagctggccctgtacgaggatggggccctggacagcctgcagctgctgtcgtccagctccctcccaggcttgggcctggaacaggacaggcaggggcccgaagaaagtgatgaatttcagagctga

SEQ ID NO: 144155 - DNA, 1125 bp, Homo sapiens
  Payload ID: 8488
  Gene Symbol: IRAK1
  Gene Name: interleukin-1 receptor-associated kinase 1
  ENST ID: ENST00000444230
  CDS Start-End: 1-705
ccgggcccgggggagcccgcagcccccggcgcccagcacttcttgtacgaggtgccgccctgggtcatgtgccgcttctacaaagtgatggacgccctggagcccgccgactggtgccagttcgccgccctgatcgtgcgcgaccagaccgagctgcggctgtgcgagcgctccgggcagcgcacggccagcgtcctgtggccctggatcaaccgcaacgcccgtgtggccgacctcgtgcacatcctcacgcacctgcagctgctccgtgcgcgggacatcatcacagcctggcaccctcccgccccgcttccgtccccaggcaccactgccccgaggcccagcagcatccctgcacccgccgaggccgaggcctggagcccccggaagttgccatcctcagcctccaccttcctctccccagcttttccaggctcccagacccattcagggcctgagctcggcctggtcccaagccctgcttccctgtggcctccaccgccatctccagccccttcttctaccaagcaagaccctgtttcaaaaagaaaaaccctgggaaaagtgaagtatggctgtaagtctcatggttcagtcctagcaagaagcgagaattctgagatcctccagaaagtcgagcagcacccacctccaacctcgggccagtgtcttcaggctttactggggacctgcgagctggcctaatgtggtggcctgcaagccaggccatccctgggcgccacagacgagctccgagccaggtcaggcttcggaggccacaagctcagcctcaggcccaggcactgattgtggcagaggggccactacccaaggtctagctaggcccaagacctagttacccagacagtgagaagcccctggaaggcagaaaagttgggagcatggcagacagggaagggaaacattttcagggaaaagacatgtatcacatgtcttcagaagcaagtcaggtttcatgtaaccgagtgtcctcttgcgtgtccaaaagtagcccagggctgtagcacaggcttcacagtgattttgtgttcagccgtgagtcacactacatgcccccgtgaagctgggcattggtgacgtccaggttgtccttgagtaataaaa

SEQ ID NO: 144156 - DNA, 1175 bp, Homo sapiens
  Payload ID: 8488
  Gene Symbol: IRAK1
  Gene Name: interleukin-1 receptor-associated kinase 1
  ENST ID: ENST00000443220
  CDS Start-End: 1-1175
gatgaggaacacggtgtatgctgtgaagaggctgaaggagaacgctgacctggagtggactgcagtgaagcagagcttcctgaccgaggtggagcagctgtccaggtttcgtcacccaaacattgtggactttgctggctactgtgctcagaacggcttctactgcctggtgtacggcttcctgcccaacggctccctggaggaccgtctccactgccagacccaggcctgcccacctctctcctggcctcagcgactggacatccttctgggtacagcccgggcaattcagtttctacatcaggacagccccagcctcatccatggagacatcaagagttccaacgtccttctggatgagaggctgacacccaagctgggagactttggcctggcccggttcagccgctttgccgggtccagccccagccagagcagcatggtggcccggacacagacagtgcggggcaccctggcctacctgcccgaggagtacatcaagacgggaaggctggctgtggacacggacaccttcagctttggggtgaaagacctggtggaagaggaggctgaggaggctggagtggctttgagaagcacccagagcacactgcaagcaggtctggctgcagatgcctgggctgctcccatcgccatgcagatctacaagaagcacctggaccccaggcccgggccctgcccacctgagctgggcctgggcctgggccagctggcctgctgctgcctgcaccgccgggccaaaaggaggcctcctatgacccaggtgtacgagaggctagagaagctgcaggcagtggtggcgggggtgcccgggcattcggaggccgccagctgcatccccccttccccgcaggagaactcctacgtgtccagcactggcagagcccacagtggggctgctccatggcagcccctggcagcgccatcaggagccagtgcccaggcagcagagcagctgcagagaggccccaaccagcccgtggagagtgacgagagcctaggcggcctctctgctgccctgcgctcctggcacttgactccaagctgccctctggacccagcacccctcagggaggccggctgtcctcagggggacacggcaggagaatcgagctgggggagtggcccaggatcccggcccacagccgtggaag

SEQ ID NO: 144157 - DNA, 862 bp, Homo sapiens
  Payload ID: 8488
  Gene Symbol: IRAK1
  Gene Name: interleukin-1 receptor-associated kinase 1
  ENST ID: ENST00000437278
  CDS Start-End: 1-830
ttctacatcaggacagccccagcctcatccatggagacatcaagagttccaacgtccttctggatgagaggctgacacccaagctgggagactttggcctggcccggttcagccgctttgccgggtccagccccagccagagcagcatggtggcccggacacagacagtgcggggcaccctggcctacctgcccgaggagtacatcaagacgggaaggctggctgtggacacggacaccttcagctttggggtggtagtgctagagaccttggctggtcagagggctgtgaagacgcacggtgccaggaccaagtatctggagaactcctacgtgtccagcactggcagagcccacagtggggctgctccatggcagcccctggcagcgccatcaggagccagtgcccaggcagcagagcagctgcagagaggccccaaccagcccgtggagagtgacgagagcctaggcggcctctctgctgccctgcgctcctggcacttgactccaagctgccctctggacccagcacccctcagggaggccggctgtcctcagggggacacggcaggagaatcgagctgggggagtggcccaggatcccggcccacagccgtggaaggactggcccttggcagctctgcatcatcgtcgtcagagccaccgcagattatcatcaaccctgcccgacagaagatggtccagaagctggccctgtacgaggatggggccctggacagcctgcagctgctgtcgtccagctccctcccaggcttgggcctggaacaggacaggcaggggcccgaagaaagtgatgaatttcagagctgatgtgttcacctgggcagatcccccaaatccgg

SEQ ID NO: 144158 - DNA, 783 bp, Homo sapiens
  Payload ID: 8488
  Gene Symbol: IRAK1
  Gene Name: interleukin-1 receptor-associated kinase 1
  ENST ID: ENST00000444254
  CDS Start-End: 1-655
tggagtggctttgagaagcacccagagcacactgcaagcaggtctggctgcagatgcctgggctgctcccatcgccatgcagatctacaagaagcacctggaccccaggcccgggccctgcccacctgagctgggcctgggcctgggccagctggcctgctgctgcctgcaccgccgggccaaaaggaggcctcctatgacccaggtgtacgagaggctagagaagctgcaggcagtggtggcgggggtgcccgggcattcggaggccgccagctgcatccccccttccccgcaggagaactcctacgtgtccagcactggcagagcccacagtggggctgctccatggcagcccctggcagcgccatcaggagccagtgcccaggcagcagagcagctgcagagaggccccaaccagcccgtggagagtgacgagagcctaggcggcctctctgctgccctgcgctcctggcacttgactccaagctgccctctggacccagcacccctcagggaggccggctgtcctcagggggacacggcaggagaatcgagctgggggagtggcccaggatcccggcccacagccgtggaaggcttgggcctggaacaggacaggcaggggcccgaagaaagtgatgaatttcagagctgatgtgttcacctgggcagatcccccaaatccggaagtcaaagttctcatggtcagaagttctcatggtgcacgagtcctcagcactctgccggcagtgggggtgggggcccatgcccgcgggggagaga

SEQ ID NO: 144159 - DNA, 784 bp, Homo sapiens
  Payload ID: 8488
  Gene Symbol: IRAK1
  Gene Name: interleukin-1 receptor-associated kinase 1
  ENST ID: ENST00000455690
  CDS Start-End: 1-639
cagagggctgtgaagacgcacggtgccaggaccaagtatctgaaagacctggtggaagaggaggctgaggaggctggagtggctttgagaagcacccagagcacactgcaagcaggtctggctgcagatgcctgggctgctcccatcgccatgcagatctacaagaagcacctggaccccaggcccgggccctgcccacctgagctgggcctgggcctgggccagctggcctgctgctgcctgcaccgccgggccaaaaggaggcctcctatgacccaggactggcccttggcagctctgcatcatcgtcgtcagagccaccgcagattatcatcaaccctgcccgacagaagatggtccagaagctggccctgtacgaggatggggccctggacagcctgcagctgctgtcgtccagctccctcccaggcttgggcctggaacaggacaggcaggggcccgaagaaagtgatgaatttcagagctgatgtgttcacctgggcagatcccccaaatccggaagtcaaagttctcatggtcagaagttctcatggtgcacgagtcctcagcactctgccggcagtgggggtgggggcccatgcccgcgggggagagaaggaggtggccctgctgttctaggctctgtgggcataggcaggcagagtggaaccctgcctccatgccagcatctgggggcaaggaaggctggcatcatccagtgaggaggctggcgcatgttgggaggctgctggctgcacagacccgtgaggggaggagaggggct

SEQ ID NO: 144160 - DNA, 5656 bp, Homo sapiens
  Payload ID: 8489
  Gene Symbol: IRAK1BP1
  Gene Name: interleukin-1 receptor-associated kinase 1 binding protein 1
  Uniprot ID: Q5VVH5
  ENST ID: ENST00000369940
  CDS Start-End: 106-888
ccatcccggcatactttgcgccgtgcacaggcaagccctggtgcgcattggccccttcggccgccgtcggccggtagttactatggaaacccagctgccatcgctatgtctctgcaaaagacccctccgacccgagtgttcgtggaactggttccctgggctgaccggagccgggagaacaacctggcctcagggagagagacgctaccgggcttacgccaccccctctcctcaacacaagcccaaactgctacccgcgaggtgcaagtaagcggcacctcagaagtgtctgcgggccctgaccgggcgcaggtggtggtgcgagtgagcagcaccaaggaggcggcagccgaggccaaaaagagcgtttgtcgccgtctagattacatcacgcagagcctccagcagcagggcgtgcaggcagaaaatataactgtgacaaaggattttaggagagtggaaaatgcttatcacatggaagcagaggtctgcattacatttactgaatttggaaaaatgcaaaatatttgtaactttcttgttgaaaagctagatagctctgttgtcatcagcccaccccagttctatcatactccaggttctgttgagaatcttcgacggcaagcctgtcttgttgctgttgagaatgcgtggcgcaaagctcaagaagtctgtaaccttgttggccaaaccttaggaaaacctttactaatcaaagaagaagaaacaaaagaatgggaaggccaaatagatgatcaccagtcatccagactctcaagttcattaactgtacaacaaaaaatcaaaagtgcaacaatacatgctgcttcaaaagtatttataacttttgaggtaaagggaaaagagaagagaaaaaagcacctttgaaattccaaacaaattatattgtacttgtatctttttacctatttttatactttttataatgtttacgtttgtcctgaatatatatatatatatatatatatatatatatatggtataggagataagctatttctttccaaaatctataaatctttgaatatagtcccacagaatacttatgttcactttctatttttaaaagactactctgaaaaacactcttggataataaatgtattatgtgcatacttatatactgacagttcatacaagcacatgtgtaatatttctattataaggacagatattgacccttgcatttcataatttttaaagatatttaagctaaaattttctcagccacatttttatataaaaccaaattttatgtaaaaactaggcttcaataagttagctaaattttttaaattgtaagacaaaatttttatggaaaagaattcctatatcccatcaaacctaataattttccacaactaaaaatgagtataaatacataattttaagtgcatcctgtcaggtctgatatttaattttactttagttagaagctaagtagttaccctgttacttcttcatggatgctaacagaagacttgagattcccagacagaaacaaaggactattactcatggcacaacaaggagcatgagcatcagcacattctcattgcttccccttgtcccaggtcccatgggggcaaaatgatatggccatatgcaatatggctacatatacagcaggcttttgttgtaggtaaagaatactgagcttggagggttcactgctttttatccatgaacagaagcaaacctgctctttgcctcatcccttatagatgctcactcaaaactcaatactgagaaatggcccaggtaaagaacagccaaggtctttcatgcttgccacacccagcaatatgtttaggaaggtgaagtctactgagggctatctcacatctaacagtttctttactaggaccagagaccattttggtaagatgcagataacaaccccaaccttaacaacttcacaacatgaatagaaatagtgataaataattcatagctttttacaaaagaataatgaggtataataggaaaatgttttgatgccaaaaataaaagagttaatgtttggatcggactccaacagggctccttagagtgatacaaatacaaagcaaacgatatgtgtaatttaaaatttcctagtgcacatgtttttttatttttctttttcgagatggagtctttctctgtcgcccaagctggagtgcagtggtacgatctcagctcactgcaacctctgcctcctgaatttaagcgattctcctgcctcagcctcccaagtagctgggattacaggcgtgagccactgcatctggccctgtacgcacatttttaaaaataaaactttaaaaaagaaacagttgaaactaattttaataacattttatttaaccaaatatatcaaaaatattatttcagcatgtaatcagtattttttaaattgagatatttgttttatcttcaaaattcagtgtatatttttacataatagcacatctcaattcacatgctaaattttcatcagaaatattttatctgtatttaaatttcctaaaatgtacagttgaaaaaaagagattcacatacccaggttgttctagcatgcctaaaaaatcttgtaactggatcaagtatcagtttttaaattagttaaaattaaataaaatttaaaatttagttcctcagtcacactagccatatttcaagtacttgaaggccacaaatggcttgagactaccttgctgaacagaccaaggtcaaacactgagataataatgattcttaaggccatttgaaagttaacagcaagtatgtattactgctatctacagtaagaattacattttatctacaggcaatcataagccatgtctgttatgcagcataggctttccattctctatacatctaggtcatagagtttttccattgataaatctggatgtttatataccaacagtactttcttacaacatattccagtatatagtgtccagcttcacccactttttaaagtggccctgaaacaattttattcatcttattggagtgttgctgtaggggaagagtagaagctaagaagagtttgagttcaacaccattatatccaaatcctgaccttactactggaatgtaagctccttgaaagtggagatcttgtctgtcttgttcacagttgtgttcccagccccagaggtagtctcagggccaatatcaagtatgctctcaaatatttgctgggaaaatttactagctggataaaaggcaagttactttaatctctttaatcttcctttgtccttacaaatgaaagagactaatagtacttaaccttgcagtgttattataaggattaaagttgataaatatatgatcatgagaacaattgctagcacataacggtcactctgaaaatagtagctgatatatcagctgcattgtttgattattgttggctcaattaaaagttggcttttccaaatcctccattaggaagaatttttaaatagccatattgaaaataaagttgtcagaaaaccaatgtaacatatgttgaatttttattaccaaaaagaagttactatccagttgtacagaaaagtagaatgaggttgtgcatcaagaaaaaaattgttcgttctcaacaaaaatttaatcacatgggtagtttttttttttttagctatgggttcatgctgtatttggttgcatcatatttgataaagaagcttccaacttagcatgaaatacctaaagacaattttttttttaagttagtaggcactttttagaatttccaggaacttttaaagatgttgtctccaaaaaaaacaaaaaaatcctgtaaagtatacaatcctacatttttctatagaagagcttagggaagaaatcattcaaagattggaaagacttatgtgtagtattctgtatactaaagggtatcaaatttagttgtcagttgatagcaatttaatttcttgatacatggcatacactggaatcttatgatgaattatttaggggacctgtgccacaaagtctactagaataaacctatcctaaacttaatcctgttagaatttccttcttttgaactctgtttaaaaaaaaaaaaatctttccagaaagtaggaagttataatttctattttctgaaagacaaacaaaaattctaaataggatatttgaaacagacccactgtatcctaaatggaagtgctattaaaaggaaatgctattaaaataagatttcatatattactgataattcataatgaattttaggattccattcaattacatactaaaaattacattttttatagtggcaatgtacttttatcagtattcttatttgacggtcaatttgagttcagtgtaaacaaataggacttagaaaaataatttgtaactcaagatgctgtacctcatcctataattgttgttttgtaatattccttctcaggaatatgggctaaggatatctcaactctgtcagatttgttgataagaatttaatagtaaggagttcttatagcctataaaaagcatgaattatgagatcaaatgtgggagttactatatgattatctgcattacaaaatgaaagcaaatgctttatttattccaacaaaaaaagacctatataaattagtttaagctaacatttagacatttactattacatatatggtatttgcaaccaaatcactgagtttgttgttgtcgttgtttgaggctgttgctctgtcacccaggatggagtgcaagtagctcaatcatagcttactgcagcctaaaaactcctgggctgaagaaatcctctcacctcagccttttaagtagctgaaacattaggtgcacaccaccaggcctggctaattttttattagtgataaggtcttgctatgttgcccaggctggtctcaaactcctggcttcaagcagtcctgcctcagcttcccagagtgctggactacaggcttgagccactgcacccagccccaaatagcttctactcataacctagtgtggcctaaatttatttaaaatgcccgggtaggccaggcacgttggctcacgcctgtaatcccagcacttgggaggccgaggtaggcagatcacttgaggtcaggagttcgagaccaacctggccaatatattgaaaccctgtctcttctaaaaatacagaagttactcaggcgtggtggcgtgtgactgtaatctcagctaccggggaggctgaagcagaagaaacgctcgaacctgggaggcagagcttacagtgagccgagatcgcaccactgcacttcagcctgggtgacaaagtgagactccatctacatacatacatacatacatacatacatacatacatacatacatacatacataaaatgcccagtatcttacaagactgtagttcacagtgggtaattcaaatcagacactgctcttcaagagaggtaatattaatagaaatctttcaagaaggattgttttctactattaaaacaataaaactcttataaacctgtttatcagaaggatatttctgtttcagcaactcctggaatccttcttcaacatcccaaccaacaattactcccagatagccatgtcacctgtgaattatcatgaatcccacatcaaatgaacaaatactgcctctgga

SEQ ID NO: 144161 - DNA, 591 bp, Homo sapiens
  Payload ID: 8489
  Gene Symbol: IRAK1BP1
  Gene Name: interleukin-1 receptor-associated kinase 1 binding protein 1
  ENST ID: ENST00000606929
  CDS Start-End: 1-134
aaatagatgatcaccagtcatccagactctcaagttcattaactgtacaacaaaaaatcaaaagtgcaacaatacatgctgcttcaaaagtatttataacttttgagaagttactcaggcgtggtggcgtgtgactgtaatctcagctaccggggaggctgaagcagaagaaacgctcgaacctgggaggcagagcttacagtgagccgagatcgcaccactgcacttcagcctgggtgacaaagtgagactccatctacatacatacatacatacatacatacatacatacatacatacatacatacataaaatgcccagtatcttacaagactgtagttcacagtgggtaattcaaatcagacactgctcttcaagagaggtaatattaatagaaatctttcaagaaggattgttttctactattaaaacaataaaactcttataaacctgtttatcagaaggatatttctgtttcagcaactcctggaatccttcttcaacatcccaaccaacaattactcccagatagccatgtcacctgtgaattatcatgaatcccacatcaaatgaacaaatactgcctctgga

SEQ ID NO: 144162 - DNA, 1387 bp, Homo sapiens
  Payload ID: 8489
  Gene Symbol: IRAK1BP1
  Gene Name: interleukin-1 receptor-associated kinase 1 binding protein 1
  ENST ID: ENST00000607739
  CDS Start-End: 792-1370
atgcatatctaagttctagtgcaagagaggactaggagtaaatgctgaagggagtgtttaacccctttaacccattgcagtatgagcaagactactgtaagattcctttaacacagtgcaaccaaaagacagacaccttttctcctttttgcttcacaacagaccacctcagccaccatgacacccagtaggaggtattccacaggaacagcagacgagaacttaccttacatcatgacacatcaaggcatatagttcttgcaatggactaaatgtttgtttccccccaaaatttatagttgaaacctaatcccaagtatgatggtattcggaggaggcttttaggaggtgattgggacatgaggatagggctgtttatagatgagaactccaaggaccagagtgattattggcaggttgcttgcacacggtcacagccaggaagtggcagaattttaactttagggtccatgctcttaaccactacaggatgttgcttctttattctcttgacagtggataattgagattttaggtagggaagatgtcactgatgctattgataccactacttgtatcctttggcacttcacatttgtgtgcatgcaggcccagcttccatctgacaacatttgtaaattctttgcctgaaagtgaaagctttccctggctgccggaatccactctctgcaaatggggccagagtgtaatgccagggaattaaagtcctctcccccagccccagcagccttcatctgaaggctaatgtagaactagaatgactgagggaaatgaatggaaagagaccccagcatcttcaccccttggggtcggataattctgaggcagaaaatataactgtgacaaaggattttaggagagtggaaaatgcttatcacatggaagcagaggtctgcattacatttactgaatttggaaaaatgcaaaatatttgtaactttcttgttgaaaagctagatagctctgttgtcatcagcccaccccagttctatcatactccaggttctgttgagaatcttcgacggcaagcctgtcttgttgctgttgagaatgcgtggcgcaaagctcaagaagtctgtaaccttgttggccaaaccttaggaaaacctttactaatcaaagaagaagaaacaaaagaatgggaaggccaaatagatgatcaccagtcatccagactctcaagttcattaactgtacaacaaaaaatcaaaagtgcaacaatacatgctgcttcaaaagtatttataacttttgagcaactcctggaatccttcttcaacatcccaaccaacaattactcccagatagccatgtcacctgtgaattatcatgaatcccacatcaaatgaacaaatactgcctctgg

SEQ ID NO: 144163 - DNA, 1634 bp, Homo sapiens
  Payload ID: 8489
  Gene Symbol: IRAK1BP1
  Gene Name: interleukin-1 receptor-associated kinase 1 binding protein 1
  ENST ID: ENST00000606868
  CDS Start-End: 1-534
gtgttcgtggaactggttccctgggctgaccggagccgggagaacaacctggcctcagggagagagacgctaccgggcttacgccaccccctctcctcaacacaagcccaaactgctacccgcgaggtgcaagtaagcggcacctcagaagtgtctgcgggccctgaccgggcgcaggtggtggtgcgagtgagcagcaccaaggaggcggcagccgaggccaaaaagagcgtttgtcgccgtctagattacatcacgcagagcctccagcagcagggcgtgcaggcagaaaatataactgtgacaaaggattttaggagagtggaaaatgcttatcacatggaagcagaggtctgcattacatttactgaatttggaaaaatgcaaaatatttgtaactttcttgttgaaaagctagatagctctgttgtcatcagcccaccccagttctatcatactccaggttctgttgagaatcttcgcaactcctggaatccttcttcaacatcccaaccaacaattactcccagatagccatgtcacctgtgaattatcatgaatcccacatcaaatgaacaaatactgcctctggactctgaataattattcctagtgccatgactaaaactggattgaccaggactggaaagagtattcaaagctttggaatgtttcacagaattctctagtactaaaacatacaaacaaaatttaaaaattaagagttattgaacctaaagataagaaaaaaggttaacctgaattatttgaattagccaagacaacaaaacctgaaggatgcttaaagctttcttaggaaagctactttctaataggaaaaaggcgtatccaactagaaactcttaatagtttcagcccttttagaagctgtcccatcatttcaaaatttcgaaggcaagtcttggcaaattgctagctagtgtgggtactgtgatttaaattcaggtagtttagatcagagttgccatttttaagcattagtctataatgacctaaacctcaatttaattcttcttattaaaaacttttttttaaaataggaaattaataaagaaggcaaaaacaacagtgtctgctaggaattactaaaactcagtatattgcatttggcaaagtaaaagcttaaattaagaaaatcatcatatacatttcaatttagaaagtgagtcttacttgttttccctggtattgcagatgcattagcttttgtaataaaagtctttgcagctgaagaagtagatggttgctcagtgacaactggatctacaaccactcggttgcttctggttcgaaccacagaactagattctgttttaccgtttatctgagcagcattgtgtcttggcggtattgatcgtgtaggtgtagagaatgcagaggtagagctttctgattttagctggggttttaagatcctttttttcctttcagggctgtaaataaaatagtattgtcagtcactcttatagctctatgtgaacgaataaaacagtttataatatttttggattcaatatttgtactattatgaaatatgttaaaatatgagatttatagtggatttcatatgattgtgagcctttgaaagtgaatatttagtgaaggatcgctgt

SEQ ID NO: 144164 - DNA, 3483 bp, Homo sapiens
  Payload ID: 8490
  Gene Symbol: IRAK2
  Gene Name: interleukin-1 receptor-associated kinase 2
  Uniprot ID: O43187
  ENST ID: ENST00000256458
  CDS Start-End: 91-1968
ttccccgccggtccgcccctggctagagaagccgcagcccgcagtgtccgacccagtcgtcccgcgccggagccggccccgtagcgtgccatggcctgctacatctaccagctgccctcctgggtgctggacgacctgtgccgcaacatggacgcgctcagcgagtgggactggatggagttcgcctcctacgtgatcacagacctgacccagctgcggaagatcaagtccatggagcgggtgcagggtgtgagcatcacgcgggagctgctgtggtggtggggcatgcggcaggccaccgtccagcaacttgtggacctcctgtgccgcctggagctctaccgggctgcccagatcatcctgaactggaaaccggctcctgaaatcaggtgtcccattccagccttccctgactctgtgaagccagaaaagcctttggcagcttctgtaagaaaggctgaggatgaacaggaagaggggcagcctgtgaggatggccacctttccaggcccagggtcctctccagccagagcccaccagccggcctttctccagcctcctgaagaagatgcccctcattccttgagaagcgacctccccacttcgtctgattcaaaggacttcagcacctccattcctaagcaggaaaaacttttgagcttggctggagacagccttttctggagtgaggcagacgtggtccaggcaaccgatgacttcaatcaaaaccgcaaaatcagccaggggacctttgctgacgtctacagagggcacaggcacgggaagccattcgtcttcaagaagctcagagagacagcctgttcaagtccaggatcaatcgaaagattcttccaggcagagttgcagatttgtcttagatgctgccaccccaatgtcttacctgtgctgggcttctgtgctgcaagacagtttcacagcttcatctacccctacatggcaaatggttccctacaggacagactgcagggtcagggtggctcggaccccctcccctggccccagcgtgtcagcatctgctcagggctgctctgtgccgtcgagtacctgcatggtctggagatcatccacagcaacgtcaagagctctaatgtcttgctggaccaaaatctcacccccaaacttgctcacccaatggctcatctgtgtcctgtcaacaaaaggtcaaaatacaccatgatgaagactcacctgctccggacgtcagccgcgtatctgccagaggatttcatccgggtggggcagctgacaaagcgagtggacatcttcagctgtggaatagtgttggccgaggtcctcacgggcatccctgcaatggataacaaccgaagcccggtttacctgaaggacttactcctcagtgatattccaagcagcaccgcctcgctctgctccaggaagacgggcgtggagaacgtgatggcaaaggagatctgccagaagtacctggagaagggcgcagggaggcttccggaggactgcgccgaggccctggccacggctgcctgcctgtgcctgcggaggcgtaacaccagcctgcaggaggtgtgtggctctgtggctgctgtggaagagcggctccgaggtcgggagacgttgctcccttggagtgggctttctgagggtacaggctcttcttccaacaccccagaggaaacagacgacgttgacaattccagccttgatgcctcctcctccatgagtgtggcaccctgggcaggggctgccaccccacttctccccacagagaatggggaaggaaggctgcgggtcatcgtgggaagggaggctgactcctcctctgaggcctgtgttggcctggagcctccccaggatgttacagaaacttcgtggcaaattgagatcaatgaggccaaaaggaaactgatggagaatattctgctctacaaagaggaaaaagtggacagcattgagctctttggcccctgatgaccggaacacagctgaggacccttgtcctcagttggaaagatgagcatcagatcaagaaaaaggtctgaggcagaatccaagatctgccaggaaacacacaacaaaacatctgctgtcctgggtgggagggaaacttcatttcactggaatgagttgggagagaaaggccctcagcttttagagacacaaaaatccatgaagtctcttcctttctgggctttgttagtcagagcaggggatcagaggagactgaagcagaaaccctgcacacgggcccaggatgtggctgattttgtggttccggggagtatgtgatgataatcacccccagcagattccattacctcagcagctcttgttcccccgccactggcagttctgcaatgccatagcattttccagagctaagatctctgggttgtatttgctgacagcctgcaagcttgcatgctctgaaagattttttttagtttttaatttttttgtagagatggggtctcgctttgttggcgcaatcctcccacctcagactcccaaagtgctggaattacagttgggagccactgtgcctggcctggaagactttcaacttgtgtctcagtgcagttcttgactcacctctctgggcctcaggttctacaaatgccagacacctagcgaagagctctgcaggctttccactgcctgtattggaaatcttgcaattcacataattattcagtcactgcctggtacctttatcttcccatcccactaatgttagtgttttttaatggagcttttattctgagaatatgtgtttgtctgtttgtttgttttttgagacagagtctcactttgtcacccaggctggagtgcagtggcacgatctcagctcactgcaagctctgcctctcaggttcaagtgattctcctgcctcagcctcctgagtagatgggactgtaggcacctgccactatgcctggctaatttttgtgtttttagtagagacagggtttcaccatattggccaggctggtctcgaactactgacctcgtgatctgcccgccttggcctatcaaagtgttgggattacaggcttgagccaccgcacccggccgagaatatgtgttgttatttatgactggattatgaagaatcaggagaatgcatttcatgtctgattctgctgctaattaagtcaatcatttaatttttgggacctcagtttctttgtaagtaaaataacacctgcttgttcttcatccctgggctgttgggaggaacagatgagacagtggctatagaagcacttggaaaatgcacttgtcctgttttgtaaaataaaaaggtattaaatgtgtatttctgccatgtacctaatgattattcagtgcgtatatatctgaaaagtcatgttgcaaatctttctgtgaaacagatgctattttaaattcactgggagaaatatcctatttaaagtaatctatagtaatttctttttatataataaaaatatatttgtaaagtc

SEQ ID NO: 144165 - DNA, 8663 bp, Homo sapiens
  Payload ID: 8491
  Gene Symbol: IRAK3
  Gene Name: interleukin-1 receptor-associated kinase 3
  Uniprot ID: Q9Y616
  ENST ID: ENST00000261233
  CDS Start-End: 422-2212
gctttcaaaaataaacttttgtaagaagtaatgacaccgctagccgtccacaccaggagaccgcctagccgtggggcacggtgggctcctgggagctctgagctctgggctttctccagttcgcactctgcttgtctcggcagctccgtccccaccgcagaggtgtgaaggggcgcaaagccagcgaagggagaacccgggtcgggtaacccccaggcctggccaggcggacgcaggggcatctcgggcgaggcgcgccttgcgtcacgtgggcaccgcccctgcagtgaccggagaacggcgtgttcctagggctctgctgccgtcgtggaagcaggatttccgcggttgtgtaacggcctgtcgcaggcgtgcagggacctggactccgcctcgtccccggggctcgggcagccgagccatggcggggaactgtggggcccgcggcgcgctgtcggcgcacacgctgctgttcgacctgccgcccgcgctgctcggagagctctgcgctgttctggacagctgcgacggcgcgctgggctggcgcggcctggcagagagactttcaagcagctggctggatgttcgtcatattgaaaagtatgtagaccaaggtaaaagtggaacaagagaattactttggtcctgggcacagaaaaacaagaccatcggtgaccttttacaggtcctccaggagatgggacatcgtcgagctattcatttaattacaaactatggagcagtgttgagtccttcagagaagagttatcaggaaggtggatttccaaatatattattcaaggaaacagccaatgtcaccgtggataatgttcttattcctgaacataatgaaaaaggaatactgcttaaatcttccatcagctttcaaaatatcatagaaggaactagaaatttccacaaagacttcctaattggagaaggagagatttttgaggtatacagagtggagattcaaaacctaacatatgctgtcaaattatttaaacaggagaaaaaaatgcagtgtaagaagcattggaagaggtttttatctgagcttgaagttttactactgtttcatcacccaaacatactagagttggctgcatattttacagagactgagaagttctgtctgatttatccatacatgagaaatggaacactttttgacagattgcagtgtgtaggtgacacggccccactcccttggcacattcgaatcggtatattaataggaatatccaaagccattcactacctgcacaacgttcaaccatgctcggtcatctgtggcagtatatcaagtgcaaacatccttttggatgatcagtttcaacccaaactaactgattttgccatggcacacttccggtcccacctagaacatcagagttgtaccataaatatgaccagcagcagcagtaaacatctgtggtacatgccagaagagtacatcagacaggggaaactttccattaaaacagatgtctacagctttggaattgtaataatggaagttctaacaggatgtagagtagtgttagatgatccaaaacatatccagctgcgggatctccttagagaattgatggagaagagaggcctggattcatgtctctcatttctagataagaaagtgcctccctgccctcggaatttctctgccaagctcttctgtttggcaggccggtgtgctgcaacgcgggcaaagttaagaccatcaatggatgaagttttaaatactcttgaaagtactcaagccagcttgtattttgctgaagatcctcccacatcactaaagtccttcaggtgtccttctcctctattcctggagaatgtaccaagtattccagtggaagatgatgaaagccagaataacaatttactaccttctgatgaaggcctgaggatagacagaatgactcagaaaactccttttgaatgcagccagtctgaggttatgtttctgagcttggacaaaaagccagagagcaagagaaatgaggaagcttgcaacatgcccagttcttcttgtgaagaaagttggttcccaaagtatatagttccatcccaggacttaaggccctataaggtaaatatagatccttcttcagaagctccagggcattcttgcaggagcaggccagtggagagcagctgttcctccaaattttcctgggatgaatatgaacagtacaaaaaagaataaattctaccagaagataaagaaaaaagcaagtattgcataggcacctgagcataggtatgaccttgggaagacattggctccataagcaatgccaagagaatgatcaatagtgagtttgggtgatgcagataaacaatctggataattccatttcttttttcccaaaccctcaaacagagtgccttaaaaaattgttttatcaggataattgtctcatgaccaaatccacgctcaattagagccattcaaaattccttaagatcatgggttctgacttcagccaaacaaaacaatcaaaacctaccaaaaagggactggattgtaatgtcctctccatcatcctcagtgtgagtcctcagagcctccatctgccaagaacattcagttggattccatcgtttggtttagcttgcttgcacgggttgtaggaaatgtctaatttgtaaatgttaatagatacctttggaaagaatcaccttgttattctgattgacccctcttgttttttggttaatccctgactagcctgcttgtctgaaaatgagccaggttcacccttagctacggcatgctctgggttgaaaggggatttcttcccaagatctatcctaaactcttaggacagtttatcctgtattgactattattacagctttttaaaaacagacttagtgacctattatatcttaaggagactatgtgaaatgtccatcaagtaatttttattcctgagaaaatggctggtcaagggcctaggtcagctttttgtttaatctacacctttcaactctgggccttcattcctgctgtttcttggatctccctcttttgaaatcctaccaatcatcagagctctacaaaacagccacctcctggaagcttccctaatctctacaaccagaagtactccctttatcagtatttccacagcaatttctttgtatttctattttatatttatcactttctgaattatatcaaagctgcttgtcttatctctttttttttttgagacggagtctcgctctgtcatccaggctggagtgcagtggcacaatctcggctcaccgcaaggtctgcctcccgggttcacgccattctcctgcctcagcctcccgagtaaaggtgggactacaggcgcccgccactacgcccggctaattttttgtatttttagtagagacggggtttcaccatgttaggcaggatggtctcgatctcctgacctcatgatccgcctgcctggcctcccaaagtgctgggattacaggcgtgagccaccgcgcccagccttcatctcttttactaggttgtaaactccctatattagttttctattgtttttgtaacacattatcacaaatttagtgacttaaagtaacataaattaattattttgcagttctggaggtcagaattccttagcattctttctggaggctgttggggagaactcactgccttgccttttccagcttctagaggccacctgccttctttggctcatggcctcttcctccgtcttcaaagccagcaacgtgacatttcagatctccctctctctgtctgtctcaccgcatctcttcactaccctcttcctctcattctggcccttctgcatgtcttttataaagacctttgtgatttcactgggcccactcatataagccaggaaaatctctgtgtctcagatccttaatttaattacacctgcaaagtccgttttctcgtgtaaagtaacatattcacaggtttctggaattgggacgtggacatcttcgggggaccattactctgtctgtcatactccctgagtgtgtaagggccatctcttcagagcctaatgtgtcatcctacacagagcaggtgtttccttataaattaagttgaattaaattacccctatgaagccacataatcaataattcagctataataaacattgccgaataaattaacaaagggaggataatgactccttatgatgatggatagaaacactgaagaaaaccattttcagaggatttactgaattttcctctccaaggagcttgtaatagaagggtaaacctctagtttcttgtccagcagaggaataggctcatgtcttttgttttattttatttttttggtgagtcagtatggttgggttaatcatattcacattagattccatgttgaagaacaactaatcaaagaagaaaatcatcaggaatcagggtgagattaacagaccaaggtcagaaacatggagttacaattttccaaaaaagcacgaagtgagattaaaaccacagtaagtcttagtctgactgacaggctttatacaggccctcggtaagcagttgggagaacccatgcccaccactgctctgtacggtatctggctgctcagagctctctgattcacaaaagagatcatcaagaattgactctgtgttaaactgtttttcacttagaatatggacccccaccaatacattcaatgaagggtcattaaggaagctctgattaacaccaggcccatgcagttactccgcacatataatctgtgggtattatgttgatttgaacttgcttagctgacttaaagcagggtttctcaaactgtagtatgcatcagaatgacttggaaagctggttaaaaacgcagattgctgggtccacccagcttctgatgcaataggtctggggttagaaattttgctttctaatgagttcccaggtgatgctgatgccaatgatgtgaagcccgctcttcacatccgtgaaaatcgctgccttaaggtgctcttaaattgttatagattggtagatcctacctttccatcactggtatgttttttgagaaaaggatcctttcttttcattctgttatattcatcctattacataggatgttggttagcacagagtgggagctctagaaagattgttgaccaatcatcttattgactagaccatctttctagagtataactattttggacacctcaaagatgaagtcagataagctggcagtgacctgattaacgttgtggtaagcagatgccactgtggctgggaagtaccaaatcttctgttgagtgattcagtcttcctgactagatttgccttctagtgggtgtattaataagcgttagttgatatgaattaaatgttgcaactttctatgggtaataagaggatacctttatagtttcatgatgtggagaccaagatacataagaaagcaagaatgagtctccgggtgttccctctgatcagcaaacatgaattcataatttcatttactctcatttttgtaatgcactctgagcaatcctccaggcagatcctatttactaagcttcaggcttttgtcccattttataatgcccaaacacatggagaaaacattttgttgtttttaaaaacaggtatgggatttctgatataatcaattttattgacttcttgggagttgtaatgatctgtgactcactgcataatattgtagttttatagggtggcacatcaccctgtgtaaaacaactttaatgacctgaggactgatgagtacaggaagtgaggtttatcatgagtagcatttattaagcatctgctagaatcaaagcactgcattagctactaaggtacaaagtaagacacagtttaataaggaagacagggcatctacccaagtcaacagttcagtgacatctgttatttgaaccacacaccaatgcaaccgaagtaaatgctgaaagggtgagaagaaggaatagattactatgcatttttgagaggatgaagaaggcttcttggagaaggtttctgaaaagagatacggaattaagagaaatagaaaagagcactgacgaagcactcaggatggctattcaaggaattggggatccacagcagctgtgcacaaccatccctaatgccagaaaaatggggtaagggtgaagggaactgggtctagagctttgcatgtttttttctggttaacccttagagtcaccctgaaggtgtggatcccatcttataataaggtgaggacactgagtcaggaaactaacttgctaaaatcaagtcctcccagtcctcccatcaggtccttccagatctggaggagccaggatttgaactcacatttgtctgacttcaaaatccatgctttttcttgtgttccaaattgcacaatggagtcactgccagttcaagctcctatgaaaagggatggatgtgaaaagtcatttgttgattccacagatttttagtaggtaccatgtctcctgcctttatcactatcctactcctctgctacaacttctctgctacaggcacccactgcagttacttgatatgagttaaatgaatccatccatccaaacttccattcattgaataaatacttagcaatggcttcctttgtatcaggcactattctaggagctggggctacagtgcagatggaaaccagcaaagctcactgccctcatggagcttatatgtaagtgaataaatctcagggtggttctcctgtcataggtcctggctcctctgccagctcttccaaatgggttcagagaggttttctccttgtcctgttgtgtaactgataatcccatggtggacctcactttgctattcatatgcactaagtagtttatggtgtgctttgtggctggcaattgtgacagattctattcttctattggtatgtggtttctttggggcatttgtttggatactgatggcatcttccgggggtctgaggcacctacacaaacctcaggtcactatcacgtgatactggagttgcctgttaaattatatttcttcttccacaaaactgcaggttccctgagggaaaggtctatgtcctgctcatttttggatccctaatggctggcacagtacctggtgcataatatggttcaacaaatatttgtaaaatgaatgaatcaaatagtccttcaaagcatcttcagaatcaagattgtcatctagattgcacccgaagtttatctttctagtattcagaatataatcaatcattgcttaaattattccatttcatcattcttgaataaaagctactaattttaaatactaatatctgagatatcttcgaaaagaagattagtcgttgtatgtgttgcttataaattttctctatggtggaaaatattcccaaaccatgtctaagcaatgaaaaaccagtgttctggcaggaaataaactgatgtttgttgtgttttgtatctgtcttcccgttccaaatcatttatatatacttgatggtctgtgggcttgacttgcaagtattttcctgggagacatttttattcaaaagacctgtattgcctgccaaaccttcatttaagagactcattatggatgtcatctgcatcattgcaaacttttctggtcgtctctataaatagcaagataatatttacagagttttacattggctcttgaattttaaaatattcttatagacaaacattaattggaatggggggtaaggaggtaggaatggcttacttgcggaaatgcaggctcattgttgtgtctagtaggtgctaggtgcattcacacatctcttaagctttaaacaacctattgagccggtttccatttccttgatctattagatttaaaaaaatgaagcataaaggagttggctcttgccctaagtcatactactgatggaatgagaatacaaaccaaaaacactttattcaagtccaggaaatatctgccttgaaaaagaataacttaaaaattaaaagtgtcctctatttgaacatgaaaacagctaataaagatgtgttattttattttattattattaattttgtcctcccatattggcaaagataaagcaattgacaaaaatggaattcttgttcaatactggcaggagtgaaaattggtagaacctttctagaaggcaatttggcaacatgtatgaaaacctaaatgttgatacacctttacccagcagtttgtttaggaatttatcctaatgaataaaagttgtccaagtcttcaaacatgagcccaaaggtatatttcatgatgtttatgatattaaaacattggaaacaactgaaacatccttcagtaaaagatggattaaataaattccatgcagttgtcatttaaaaatatttagatatatgtttattgctatggatatatgttcccaaaatattattgaatcaaaaagtagactacaggatatatgttgaatatgagctcatttataacattgaatattttaagataatgtatgtttcatagagagatcttcaccaaatgttaaggatttttttttctgggctgtggtatttgggtgatctttacattcttcagactcatgtgtgtttgaaactttttataatgaacatatatcatttttattagaaaagaataaagtttttgaaaaaaaaaa

SEQ ID NO: 144166 - DNA, 1853 bp, Homo sapiens
  Payload ID: 8491
  Gene Symbol: IRAK3
  Gene Name: interleukin-1 receptor-associated kinase 3
  Uniprot ID: Q9Y616
  ENST ID: ENST00000457197
  CDS Start-End: 44-1651
gacctggactccgcctcgtccccggggctcgggcagccgagccatggcggggaactgtggggcccgcggcgcgctgtcggcgcacacgctgctgttcgacctgccgcccgcgctgctcggagagctctgcgctgttctggacagctgcgacggcgcgctgggctggcgcggcctgggagcagtgttgagtccttcagagaagagttatcaggaaggtggatttccaaatatattattcaaggaaacagccaatgtcaccgtggataatgttcttattcctgaacataatgaaaaaggaatactgcttaaatcttccatcagctttcaaaatatcatagaaggaactagaaatttccacaaagacttcctaattggagaaggagagatttttgaggtatacagagtggagattcaaaacctaacatatgctgtcaaattatttaaacaggagaaaaaaatgcagtgtaagaagcattggaagaggtttttatctgagcttgaagttttactactgtttcatcacccaaacatactagagttggctgcatattttacagagactgagaagttctgtctgatttatccatacatgagaaatggaacactttttgacagattgcagtgtgtaggtgacacggccccactcccttggcacattcgaatcggtatattaataggaatatccaaagccattcactacctgcacaacgttcaaccatgctcggtcatctgtggcagtatatcaagtgcaaacatccttttggatgatcagtttcaacccaaactaactgattttgccatggcacacttccggtcccacctagaacatcagagttgtaccataaatatgaccagcagcagcagtaaacatctgtggtacatgccagaagagtacatcagacaggggaaactttccattaaaacagatgtctacagctttggaattgtaataatggaagttctaacaggatgtagagtagtgttagatgatccaaaacatatccagctgcgggatctccttagagaattgatggagaagagaggcctggattcatgtctctcatttctagataagaaagtgcctccctgccctcggaatttctctgccaagctcttctgtttggcaggccggtgtgctgcaacgcgggcaaagttaagaccatcaatggatgaagttttaaatactcttgaaagtactcaagccagcttgtattttgctgaagatcctcccacatcactaaagtccttcaggtgtccttctcctctattcctggagaatgtaccaagtattccagtggaagatgatgaaagccagaataacaatttactaccttctgatgaaggcctgaggatagacagaatgactcagaaaactccttttgaatgcagccagtctgaggttatgtttctgagcttggacaaaaagccagagagcaagagaaatgaggaagcttgcaacatgcccagttcttcttgtgaagaaagttggttcccaaagtatatagttccatcccaggacttaaggccctataaggtaaatatagatccttcttcagaagctccagggcattcttgcaggagcaggccagtggagagcagctgttcctccaaattttcctgggatgaatatgaacagtacaaaaaagaataaattctaccagaagataaagaaaaaagcaagtattgcataggcacctgagcataggtatgaccttgggaagacattggctccataagcaatgccaagagaatgatcaatagtgagtttgggtgatgcagataaacaatctggataattccatttcttttttcccaaaccctcaaacagagtgccttaaaaaattgttttatca

SEQ ID NO: 144167 - DNA, 1579 bp, Homo sapiens
  Payload ID: 8491
  Gene Symbol: IRAK3
  Gene Name: interleukin-1 receptor-associated kinase 3
  ENST ID: ENST00000545837
  CDS Start-End: 106-387
ctgctgccgtcgtggaagcaggatttccgcggttgtgtaacggcctgtcgcaggcgtgcagggacctggactccgcctcgtccccggggctcgggcagccgagccatggcggggaactgtggggcccgcggcgcgctgtcggcgcacacgctgctgttcgacctgccgcccgcgctgctcggagagctctgcgctgttctggacagctgcgacggcgcgctgggctggcgcggcctggtgtctaaaaacaagctttgtgagaatggagtcttaattttgcaggggttttggcatgtggttgtatgcaaatacaaagattccaaatacggatgtgttgcattatttgaaaaaaccccttcagagacatatttgcatatggagacgtgatttctgcaactgaaaacagtcagtcctgcactctcaaaacagccttcaaggacttttgagcatctgatttctgaacttcttaggttgactttttggcttatgtgactccaatacgactttcaacaaagatttgtgttccaaaaaatggttttaaacaatgcttaactaacagcatgtttttcttaatttgtattttcagtttagaatgcttttaactttatcaacataattagtcattgagaacttttctctgtatttttatttgatatgtactgcgagtaaacaaagtcctatattctgaaaggggacacgtaagggagagttgaagaaaatgataaatattgaagaatgtaattaacatgttgagagtttgcattcctgttgtatcagattggagctattttatagaattggatctaaatgaagtatacattttatggatgctaaaaatactctttagcaatgtttctattcagaatgcatcatcattagagaaaagctattaaggttgcagtgtgaatcaccagttggaaaaagagaaaacatatttcatttccagtccggaagcaatccatgcatgcaggcagtattcattttaacagtctggatcagttttttaccatgaacttctgctattagaaaaaatgcctttgtctaatctagctttccttagatgtgatgcaaactcagaactatatgccccggtcaatgttagagaccctaaaaccccagctcatttggcatctgttcattcatattccagctgaatctcagaaatgtgcttaagggaaagcatctgatattagcagtttctcagccaagtcacaggacgggacatcccagagtcatggcctgctgcacttttaaaagggaaattcaggaatcaaaaaaaaaacaaacagagaatggaatttatggaaagtatggaatgaaaagctgacattccctgggacttgaaatgttaactctggatttccttaatagctataaactgtgcctttcctactgtggcaattgttgtgagctagaacatgtttatacctttttatgtataaatattttatctgagactcctgctactattgccacccgatgcatcttccaaaaggtaaagcttccatctttgcatcaccttctcagaaatctgaattggtcccattgctttcagaatgaagttaagttcatatgctaa

SEQ ID NO: 144168 - DNA, 4147 bp, Homo sapiens
  Payload ID: 8492
  Gene Symbol: IRAK4
  Gene Name: interleukin-1 receptor-associated kinase 4
  Uniprot ID: Q9NWZ3
  ENST ID: ENST00000431837
  CDS Start-End: 309-1319
cccgccccttcgcggcgcttcctagttcggctggttcttctgtcgccggcttcagcagcccgcgcccgggcaggaatagaagatgaacaaacccataacaccatcaacatatgtgcgctgcctcaatgttggactaattaggaagctgtcagattttattgatcctcaagaaggatggaagaagttagctgtagctattaaaaaaccatctggtgatgatagatacaatcagtttcacataagatgctgttcccaaaactgctaatacactaccttctaaagaagctataacagttcagcaaaaacagatgcctttctgtgacaaagacaggacattgatgacacctgtgcagaatcttgaacaaagctatatgccacctgactcctcaagtccagaaaataaaagtttagaagttagtgatacacgttttcacagtttttcattttatgaattgaagaatgtcacaaataactttgatgaacgacccatttctgttggtggtaataaaatgggagagggaggatttggagttgtatataaaggctacgtaaataacacaactgtggcagtgaagaagcttgcagcaatggttgacattactactgaagaactgaaacagcagtttgatcaagaaataaaagtaatggcaaagtgtcaacatgaaaacttagtagaactacttggtttctcaagtgatggagatgacctctgcttagtatatgtttacatgcctaatggttcattgctagacagactctcttgcttggatggtactccaccactttcttggcacatgagatgcaagattgctcagggtgcagctaatggcatcaattttctacatgaaaatcatcatattcatagagatattaaaagtgcaaatatcttactggatgaagcttttactgctaaaatatctgactttggccttgcacgggcttctgagaagtttgcccagacagtcatgactagcagaattgtgggaacaacagcttatatggcaccagaagctttgcgtggagaaataacacccaaatctgatatttacagctttggtgtggttttactagaaataataactggacttccagctgtggatgaacaccgtgaacctcagttattgctagatattaaagaagaaattgaagatgaagaaaagacaattgaagattatattgataaaaagatgaatgatgctgattccacttcagttgaagctatgtactctgttgctagtcaatgtctgcatgaaaagaaaaataagagaccagacattaagaaggttcaacagctgctgcaagagatgacagcttcttaaaactttattggaaaagactcttgactttttatatacacctatctcaaccatttttttaactgatttttttcctaaatattcttctttacctttaacaaggcataggctgttgcaggacagtggttattaaagcatgggttgaacttccaaaatataaaaatagagccaccatatcaacacttagccctacccattagtatcacccccagttcttacagtaatccctgagaaatctccttcaagcatcaccaaacacagtttgaaaattacagggttagcaaaaagagcctgggctgtatgtagggtggaaacactctgatctgaagcccagctgactccactactaatttgctgtaaagctttggacatacacttagctgctgtgagccactaataacattgggctaatatctgctgtgcttctctgacaggtagtcatgaaaatcaaatgatgcaaaatatatacaagcactttgtaaattgtaaaatgatacaaaatttaaagtttatagagccagttacaaaatcctattagtcatatatttatagattgtgttcacagcaatcatttaaccacaaataaaatatcccttgatgatactgccataatgatatgtccattattagattatgttacatgacaaagttgaaggaatttggcagatgcagttaaggttcctaaacaactcactttgagactgttgaaagggcctgacctaatcaagtgaacccttgcaagaagaattctccttgtaagccttgaagaagtatgtgagagggccacattggctaaaacctaaaggtggcctctaggagatgagacctaccttccagttgtcagcaagcaggaaaaaaaaattgggacctcagttgcaaccacaaggaactgaattctgccaaaaatctgagtcagcttagaagagtactccaagcttcagatgataaccacagcctgggctgacacctggatttcagctttgcatgatcctcagtatgagaatctatctgttctgtgctggacttctaatatatagaactgtgagataatgggtcacattggctggatgtggtggctcatacctgtaaatcccagcactttgggaggccgaggcaggcagatcacctgaggtcaagagttcaagaccggcctggccaacatggtgaaaccccgtctctactaaaaatacaaaaattagacgagcgtggtggtggacacctgtagtcccagctacttgggaggctgaggcaggagactagctggaaccagggaggtagaggttgcagtgagctgagatcgtgccactgcactccagcctgggtgacagagtgagactccatcataaataaataaataaataaatgggtcacattaagcctttaagtttgtggtaatttattattcagtaatagaaaacaaatacagatactctcccatgatgtttttcccatgatgatttcccatgatatttacaggttttgcccacatttgaggggtatgtggaaattatacagagcatgtacagcgggaggcttatagtgtacgtactgaaatgtggggttggagccccaacacagagaccccagcaggacactgcctagtagagctatgggaagggtgctgccaccctccagacttgagaattgtagagccaccagcagcttgcactctgagcttggaaaagccacaggcactcaacttcaaccatgagggaagccacgcaccctgcaaagccacaggagtggagctgcccacggcctcgagggcccaccccttgcaccagtgtgccaggatgtgggacatggaatcaaggaatatgttagggcttttttttttttttttttgagacggagtcttgctctgttgcccaggctggagtgcagtggcacgatctcggctcactgcaagctctgcctcccaggttcacgccattcccctgcctcagcctccccagtagctgggactacaggtgcccgccaccatgcccagctaattttttttgtatttttagtagagatggggtttcactgtgttagccaggatggtcttgatctcctgacctcgtgatcacccgcctcggcctcccaaagtgccagtatttaaagtttaatgtcttcccagctgggtttcagacttgccaggatcctgttgcccctttctttagccaatttctcccttttgggacaagaatgttttacttattgcctgtaccaccaactgtatcttggaaataaataacttatattttatttcagaggctcataggcggcaggaacttaccttgagtctcaaatgagacttaggacttttgagtgatgctagaatgagttaagactttgggaagggatgattatattttgcaatgtgagaaagacattagatttggggggctgggggtagaatgacattgtttagatgtttgtctccttcaaatttcatgtttaaatgtaatccccagtgttgggggtggaggtggggcctgatgggaagtgtttgggtcatggtggatgatccctcatgaatggcttagagccactggtgatgagtgagttctcactcagttcgtgtgagatctggtggcttaaaagagtctgctccccctttgccttccattgtgattgtaaccttcctggggccttcatcaaaggccaggcaaatattggtgccgtgctagtatggcctgcagaaccgtaagccaaaacaaaccttttttctttataaattacccagcctcagttattcctttatagtgatgcaaaacgggctaactatataaatttgtaatttttaagttatagattgtttttattaaacacttatgaatactgtt

SEQ ID NO: 144169 - DNA, 1381 bp, Homo sapiens
  Payload ID: 8492
  Gene Symbol: IRAK4
  Gene Name: interleukin-1 receptor-associated kinase 4
  ENST ID: ENST00000448290
  CDS Start-End: 1-657
atgaacaaacccataacaccatcaacatatgtgcgctgcctcaatgttggactaattaggaagctgtcagattttattgatcctcaagaaggatggaagaagttagctgtagctattaaaaaaccatctggtgatgatagatacaatcagtttcacataaggagatttgaagcattacttcaaactggaaaaagtcccacttctgaattactgtttgactggggcaccacaaattgcacagttggtgatcttgtggatcttttgatccaaaatgaattttttgctcctgcgagtcttttgctcccagatgctgttcccaaaactgctaatacactaccttctaaagaagctataacagttcagcaaaaacagatgcctttctgtgacaaagacaggacattgatgacacctgtgcagaatcttgaacaaagctatatgccacctgactcctcaagtccagaaaataaaagtttagaagttagtgatacacgttttcacagtttttcattttatgaattgaagaatgtcacaaataactttgatgaacgacccatttctgttggtggtaataaaatgggagagggaggatttggagttgtatataaaggctacgtaaataacaactgtggcagtgaagaagcttgcagcaatggttgacattactactgaagaactgaaacagcagtttgatcaagaaataaaagtaatggcaaagtgtcaacatgaaaacttagtagaactacttggtttctcaagtgatggagatgacctctgcttagtatatgtttacatgcctaatggttcattgctagacagactctcttgcttggatggtactccaccactttcttggcacatgagatgcaagattgctcagggtgcagctaatggcatcaattttctacatgaaaatcatcatattcatagagatattaaaagtgcaaatatcttactggatgaagcttttactgctaaaatatctgactttggccttgcacgggcttctgagaagtttgcccagacagtcatgactagcagaattgtgggaacaacagcttatatggcaccagaagctttgcgtggagaaataacacccaaatctgatatttacagctttggtgtggttttactagaaataataactggacttccagctgtggatgaacaccgtgaacctcagttattgctagatattaaagaagaaattgaagatgaagaaaagacaattgaagattatattgataaaaagatgaatgatgctgattccacttcagttgaagctatgtactctgttgctagtcaatgtctgcatgaaaagaaaaataagagaccagacattaagaaggttcaacagctgctgcaagagatgacagcttcttaa

SEQ ID NO: 144170 - DNA, 1409 bp, Homo sapiens
  Payload ID: 8492
  Gene Symbol: IRAK4
  Gene Name: interleukin-1 receptor-associated kinase 4
  Uniprot ID: Q9NWZ3
  ENST ID: ENST00000440781
  CDS Start-End: 139-1149
cccgccccttcgcggcgcttcctagttcggctggttcttctgtcgccggcttcagcagcccgcgcccgggcagatgctgttcccaaaactgctaatacactaccttctaaagaagctataacagttcagcaaaaacagatgcctttctgtgacaaagacaggacattgatgacacctgtgcagaatcttgaacaaagctatatgccacctgactcctcaagtccagaaaataaaagtttagaagttagtgatacacgttttcacagtttttcattttatgaattgaagaatgtcacaaataactttgatgaacgacccatttctgttggtggtaataaaatgggagagggaggatttggagttgtatataaaggctacgtaaataacacaactgtggcagtgaagaagcttgcagcaatggttgacattactactgaagaactgaaacagcagtttgatcaagaaataaaagtaatggcaaagtgtcaacatgaaaacttagtagaactacttggtttctcaagtgatggagatgacctctgcttagtatatgtttacatgcctaatggttcattgctagacagactctcttgcttggatggtactccaccactttcttggcacatgagatgcaagattgctcagggtgcagctaatggcatcaattttctacatgaaaatcatcatattcatagagatattaaaagtgcaaatatcttactggatgaagcttttactgctaaaatatctgactttggccttgcacgggcttctgagaagtttgcccagacagtcatgactagcagaattgtgggaacaacagcttatatggcaccagaagctttgcgtggagaaataacacccaaatctgatatttacagctttggtgtggttttactagaaataataactggacttccagctgtggatgaacaccgtgaacctcagttattgctagatattaaagaagaaattgaagatgaagaaaagacaattgaagattatattgataaaaagatgaatgatgctgattccacttcagttgaagctatgtactctgttgctagtcaatgtctgcatgaaaagaaaaataagagaccagacattaagaaggttcaacagctgctgcaagagatgacagcttcttaaaactttattggaaaagactcttgactttttatatacacctatctcaaccatttttttaactgatttttttcctaaatattcttctttacctttaacaaggcataggctgttgcaggacagtggttattaaagcatgggttgaacttccaaaatataaaaatagagccaccatatcaacacttagccctacccattagtatcacccccagttcttacagtaatccctgagaaatctccttcaagcatcaccaaacacagtt

SEQ ID NO: 144171 - DNA, 1684 bp, Homo sapiens
  Payload ID: 8492
  Gene Symbol: IRAK4
  Gene Name: interleukin-1 receptor-associated kinase 4
  Uniprot ID: Q9NWZ3
  ENST ID: ENST00000551736
  CDS Start-End: 114-1496
cttcctagttcggctggttcttctgtcgccggcttcagcagcccgcgcccgggcaggggcctggagcagtatctagcacaaagtagacactcagtaaatatttggaatagaagatgaacaaacccataacaccatcaacatatgtgcgctgcctcaatgttggactaattaggaagctgtcagattttattgatcctcaagaaggatggaagaagttagctgtagctattaaaaaaccatctggtgatgatagatacaatcagtttcacataaggagatttgaagcattacttcaaactggaaaaagtcccacttctgaattactgtttgactggggcaccacaaattgcacagttggtgatcttgtggatcttttgatccaaaatgaattttttgctcctgcgagtcttttgctcccagatgctgttcccaaaactgctaatacactaccttctaaagaagctataacagttcagcaaaaacagatgcctttctgtgacaaagacaggacattgatgacacctgtgcagaatcttgaacaaagctatatgccacctgactcctcaagtccagaaaataaaagtttagaagttagtgatacacgttttcacagtttttcattttatgaattgaagaatgtcacaaataactttgatgaacgacccatttctgttggtggtaataaaatgggagagggaggatttggagttgtatataaaggctacgtaaataacacaactgtggcagtgaagaagcttgcagcaatggttgacattactactgaagaactgaaacagcagtttgatcaagaaataaaagtaatggcaaagtgtcaacatgaaaacttagtagaactacttggtttctcaagtgatggagatgacctctgcttagtatatgtttacatgcctaatggttcattgctagacagactctcttgcttggatggtactccaccactttcttggcacatgagatgcaagattgctcagggtgcagctaatggcatcaattttctacatgaaaatcatcatattcatagagatattaaaagtgcaaatatcttactggatgaagcttttactgctaaaatatctgactttggccttgcacgggcttctgagaagtttgcccagacagtcatgactagcagaattgtgggaacaacagcttatatggcaccagaagctttgcgtggagaaataacacccaaatctgatatttacagctttggtgtggttttactagaaataataactggacttccagctgtggatgaacaccgtgaacctcagttattgctagatattaaagaagaaattgaagatgaagaaaagacaattgaagattatattgataaaaagatgaatgatgctgattccacttcagttgaagctatgtactctgttgctagtcaatgtctgcatgaaaagaaaaataagagaccagacattaagaaggttcaacagctgctgcaagagatgacagcttcttaaaactttattggaaaagactcttgactttttatatacacctatctcaaccatttttttaactgatttttttcctaaatattcttctttacctttaacaaggcataggctgttgcaggacagtggttattaaagcatgggttgaacttccaaaatataaaaatagagccaccatatcaacacttagccct

SEQ ID NO: 144172 - DNA, 547 bp, Homo sapiens
  Payload ID: 8492
  Gene Symbol: IRAK4
  Gene Name: interleukin-1 receptor-associated kinase 4
  ENST ID: ENST00000550616
  CDS Start-End: 280-547
ccttcgcggcgcttcctagttcggctggttcttctgtcgccggcttcagcagcccgcgcccgggcaggggcctggagcagtatctagcacaaagtagacactcagtaaatatttgctggattttcttcatatacatcaaccaaaacaacatgctgcagtgggttgagtgcagaagcagatacaagaattcagctctcttctattaagttaaatattgaagagattagcaaaactttaaaacaatgttgttcttctgtttttgaggaaaaggaatagaagatgaacaaacccataacaccatcaacatatgtgcgctgcctcaatgttggactaattaggaagctgtcagattttattgatcctcaagaaggatggaagaagttagctgtagctattaaaaaaccatctggtgatgatagatacaatcagtttcacataaggagatttgaagcattacttcaaactggaaaaagtcccacttctgaattactgtttgactggggcaccacaaattgcacagttggtgatcttgtggatcttttgatcc

SEQ ID NO: 144173 - DNA, 1000 bp, Homo sapiens
  Payload ID: 8492
  Gene Symbol: IRAK4
  Gene Name: interleukin-1 receptor-associated kinase 4
  ENST ID: ENST00000552309
  CDS Start-End: 108-290
agttcggctggttcttctgtcgccggcttcagcagcccgcgcccgggcaggggcctggagcagtatctagcacaaagtagacactcagtaaatatttggaatagaagatgaacaaacccataacaccatcaacatatgtgcgctgcctcaatgttggactaattaggaagctgtcagattttattgatcctcaagaaggatggaagaagttagctgtagctattaaaaaaccatctggtgatgatagatacaatcagtttcacataagatgctgttcccaaaactgctaatacactaccttctaaagaagctataacagttcagcaaaaacagatgcctttctgtgacaaagacaggacattgatgacacctgtgcagaatcttgaacaaagctatatgccacctgactcctcaagtccagaaaataaaagtttagaagttagtgatacacgttttcacagtttttcattttatgaattgaagaatgtcacaaataactttgatgaacgacccatttctgttggtgatggttgacattactactgaagaactgaaacagcagtttgatcaagaaataaaagtaatggcaaagtgtcaacatgaaaacttagtagaactacttggtttctcaagtgatggagatgacctctgcttagtatatgtttacatgcctaatggttcattgctagacagactctcttgcttggatggtactccaccactttcttggcacatgagatgcaagattgctcagggtgcagctaatggcatcaattttctacatgaaaatcatcatattcatagagatattaaaagtgcaaatatcttactggatgaagcttttactgctaaaatatctgactttggccttgcacgggcttctgagaagtttgcccagacagtcatgactagcagaattgtgggaacaacagcttatatggcaccagaagctttgcgtggagaaataacacccaaatctgatatttacagctttggtgtg

SEQ ID NO: 144174 - DNA, 1703 bp, Homo sapiens
  Payload ID: 8492
  Gene Symbol: IRAK4
  Gene Name: interleukin-1 receptor-associated kinase 4
  ENST ID: ENST00000547101
  CDS Start-End: 66-230
cttcctagttcggctggttcttctgtcgccggcttcagcagcccgcgcccgggcaggaatagaagatgaacaaacccataacaccatcaacatatgtgcgctgcctcaatgttggactaattaggaagctgtcagattttattgatcctcaagaaggatggaagaagttagctgtagctattaaaaaaccatctggtgatgatagatacaatcagtttcacataagatgatgtagcaagaaggccctaaccagatgcagcctctcgatcttggacttcccagcctccagaaccgagatttgaagcattacttcaaactggaaaaagtcccacttctgaattactgtttgactggggcaccacaaattgcacagttggtgatcttgtggatcttttgatccaaaatgaattttttgctcctgcgagtcttttgctcccagatgctgttcccaaaactgctaatacactaccttctaaagaagctataacagttcagcaaaaacagatgcctttctgtgacaaagacaggacattgatgacacctgtgcagaatcttgaacaaagctatatgccacctgactcctcaagtccagaaaataaaagtttagaagttagtgatacacgttttcacagtttttcattttatgaattgaagaatgtcacaaataactttgatgaacgacccatttctgttggtggtaataaaatgggagagggaggatttggagttgtatataaaggctacgtaaataacacaactgtggcagtgaagaagcttgcagcaatggttgacattactactgaagaactgaaacagcagtttgatcaagaaataaaagtaatggcaaagtgtcaacatgaaaacttagtagaactacttggtttctcaagtgatggagatgacctctgcttagtatatgtttacatgcctaatggttcattgctagacagactctcttgcttggatggtactccaccactttcttggcacatgagatgcaagattgctcagggtgcagctaatggcatcaattttctacatgaaaatcatcatattcatagagatattaaaagtgcaaatatcttactggatgaagcttttactgctaaaatatctgactttggccttgcacgggcttctgagaagtttgcccagacagtcatgactagcagaattgtgggaacaacagcttatatggcaccagaagctttgcgtggagaaataacacccaaatctgatatttacagctttggtgtggttttactagaaataataactggacttccagctgtggatgaacaccgtgaacctcagttattgctagatattaaagaagaaattgaagatgaagaaaagacaattgaagattatattgataaaaagatgaatgatgctgattccacttcagttgaagctatgtactctgttgctagtcaatgtctgcatgaaaagaaaaataagagaccagacattaagaaggttcaacagctgctgcaagagatgacagcttcttaaaactttattggaaaagactcttgactttttatatacacctatctcaaccatttttttaactgatttttttcctaaatattcttctttacctttaacaaggcataggctgttgcaggacagtggttattaaagcatgggttgaacttccaaaatataaaaatagagccaccatatcaacacttagccct

SEQ ID NO: 144175 - DNA, 1348 bp, Homo sapiens
  Payload ID: 8492
  Gene Symbol: IRAK4
  Gene Name: interleukin-1 receptor-associated kinase 4
  ENST ID: ENST00000550615
  CDS Start-End: 77-259
ccttcgcggcgcttcctagttcggctggttcttctgtcgccggcttcagcagcccgcgcccgggcaggaatagaagatgaacaaacccataacaccatcaacatatgtgcgctgcctcaatgttggactaattaggaagctgtcagattttattgatcctcaagaaggatggaagaagttagctgtagctattaaaaaaccatctggtgatgatagatacaatcagtttcacataagatgctgttcccaaaactgctaatacactaccttctaaagaagctataacagttcagcaaaaacagatgcctttctgtgacaaagacaggacattgatgacacctgtgcagaatcttgaacaaagctatatgccacctgactcctcaagtccagaaaataaaagtttagaagttagtgatacacgttttcacagtttttcattttatgaattgaagaatgtcacaaataactttgatgaacgacccatttctgttggtggtaataaaatgggagagggaggatttggagttgtatataaaggctacgtaaataacacaactgtggcagtgaagaagcttgcagcaatggttgacattactactgaagaactgaaacagcagtttgatcaagaaataaaagtaatggcaaagtgtcaacatgaaaacttagtagaactacttggtttctcaagtgatggagatgacctctgcttagtatatgtttacatgcctaatggttcattgctagacagactctcttgcttggatggtactccaccactttcttggcacatgagatgcaagattgctcagggtgcagctaatggcatcaattttctacatgaaaatcatcatattcatagagatattaaaagtgcaaatatcttactggatgaagcttttactgctaaaatatctgactttggccttgcacgggcttctgagaagtttgcccagacagtcatgactagcagaattgtgggaacaacagcttatatggcaccagaagctttgcgtggagaaataacacccaaatctgatatttacagctttggtgtggttttactagaaataataactggacttccagctgtggatgaacaccgtgaacctcagttattgctagatattaaagaagaaattgaagatgaagaaaagacaattgaagattatattgataaaaagatgaatgatgctgattccacttcagttgaagctatgtactctgttgctagtcaatgtctgcatgaaaagaaaaataagagaccagacattaagaaggttcaacagctgctgcaagagatgacagcttcttaaaactttattggaaaagactcttgactttttatata

SEQ ID NO: 144176 - DNA, 1757 bp, Homo sapiens
  Payload ID: 8492
  Gene Symbol: IRAK4
  Gene Name: interleukin-1 receptor-associated kinase 4
  ENST ID: ENST00000547521
  CDS Start-End: 700-882
cttcgcggcgcttcctagttcggctggttcttctgtcgccggcttcagcagcccgcgcccgggcaggtaaggcattccccgccttaatgcctcggtcaaacgtcgtccgaggtccgcttccaggcctcggcacctctgccccagggttgctggggtcggctgcggaacggaaatctctttatcatccgtgagaaaagttagagaggaagtgggttcctttgacagagcttactccagaagaaagacttgggtaggtccccggtaatcaagaagttcgtcggccctgaggaagagcctgaggcttggagggacgtcacccagctgttctggggcgcagtcggacctcaagtttctcacctctcaggccctggattccgtgaacccgactgcgaaatgaagtctcttttccccagaaccaggaagtcaggccagcacctgacagatgcctgtggcgccagcagctcgctgagcctccacacgattgtaattcgcttgtttctccggcctccaagcttccagggaattagaaagtggaggcggcttatgggatcagatgagtacattcgcagatgggggaaaaaagtgtacctgtcagcttggaagccagagggagacaaagggataaaagcaaaccctgtccaggggcctggagcagtatctagcacaaagtagacactcagtaaatatttggaatagaagatgaacaaacccataacaccatcaacatatgtgcgctgcctcaatgttggactaattaggaagctgtcagattttattgatcctcaagaaggatggaagaagttagctgtagctattaaaaaaccatctggtgatgatagatacaatcagtttcacataagatgctgttcccaaaactgctaatacactaccttctaaagaagctataacagttcagcaaaaacagatgcctttctgtgacaaagacaggacattgatgacacctgtgcagaatcttgaacaaagctatatgccacctgactcctcaagtccagaaaataaaagtttagaagttagtgatacacgttttcacagtttttcattttatgaattgaagaatgtcacaaataactttgatgaacgacccatttctgttggtggtaataaaatgggagagggaggatttggagttgtatataaaggctacgtaaataacacaactgtggcagtgaagaagcttgcagcaatggttgacattactactgaagaactgaaacagcagtttgatcaagaaataaaagtaatggcaaagtgtcaacatgaaaacttagtagaactacttggtttctcaagtgatggagatgacctctgcttagtatatgtttacatgcctaatggttcattgctagacagactctcttgcttggatggtactccaccactttcttggcacatgagatgcaagattgctcagggtgcagctaatggcatcaattttctacatgaaaatcatcatattcatagagatattaaaagtgcaaatatcttactggatgaagcttttactgctaaaatatctgactttggccttgcacgggcttctgagaagtttgcccagacagtcatgactagcagaattgtgggaacaacagcttatatggcaccagaagctttgcgtggagaaataacacccaaatctgatatttacagctttggtgtggttttactagaaataataactggacttccagctgtggatgaacaccgtgaacctcagttattgctagatattaaagaag

SEQ ID NO: 144177 - DNA, 1751 bp, Homo sapiens
  Payload ID: 8492
  Gene Symbol: IRAK4
  Gene Name: interleukin-1 receptor-associated kinase 4
  ENST ID: ENST00000550386
  CDS Start-End: 114-278
cttcctagttcggctggttcttctgtcgccggcttcagcagcccgcgcccgggcaggggcctggagcagtatctagcacaaagtagacactcagtaaatatttggaatagaagatgaacaaacccataacaccatcaacatatgtgcgctgcctcaatgttggactaattaggaagctgtcagattttattgatcctcaagaaggatggaagaagttagctgtagctattaaaaaaccatctggtgatgatagatacaatcagtttcacataagatgatgtagcaagaaggccctaaccagatgcagcctctcgatcttggacttcccagcctccagaaccgagatttgaagcattacttcaaactggaaaaagtcccacttctgaattactgtttgactggggcaccacaaattgcacagttggtgatcttgtggatcttttgatccaaaatgaattttttgctcctgcgagtcttttgctcccagatgctgttcccaaaactgctaatacactaccttctaaagaagctataacagttcagcaaaaacagatgcctttctgtgacaaagacaggacattgatgacacctgtgcagaatcttgaacaaagctatatgccacctgactcctcaagtccagaaaataaaagtttagaagttagtgatacacgttttcacagtttttcattttatgaattgaagaatgtcacaaataactttgatgaacgacccatttctgttggtggtaataaaatgggagagggaggatttggagttgtatataaaggctacgtaaataacacaactgtggcagtgaagaagcttgcagcaatggttgacattactactgaagaactgaaacagcagtttgatcaagaaataaaagtaatggcaaagtgtcaacatgaaaacttagtagaactacttggtttctcaagtgatggagatgacctctgcttagtatatgtttacatgcctaatggttcattgctagacagactctcttgcttggatggtactccaccactttcttggcacatgagatgcaagattgctcagggtgcagctaatggcatcaattttctacatgaaaatcatcatattcatagagatattaaaagtgcaaatatcttactggatgaagcttttactgctaaaatatctgactttggccttgcacgggcttctgagaagtttgcccagacagtcatgactagcagaattgtgggaacaacagcttatatggcaccagaagctttgcgtggagaaataacacccaaatctgatatttacagctttggtgtggttttactagaaataataactggacttccagctgtggatgaacaccgtgaacctcagttattgctagatattaaagaagaaattgaagatgaagaaaagacaattgaagattatattgataaaaagatgaatgatgctgattccacttcagttgaagctatgtactctgttgctagtcaatgtctgcatgaaaagaaaaataagagaccagacattaagaaggttcaacagctgctgcaagagatgacagcttcttaaaactttattggaaaagactcttgactttttatatacacctatctcaaccatttttttaactgatttttttcctaaatattcttctttacctttaacaaggcataggctgttgcaggacagtggttattaaagcatgggttgaacttccaaaatataaaaatagagccaccatatcaacacttagccct

SEQ ID NO: 144178 - DNA, 563 bp, Homo sapiens
  Payload ID: 8492
  Gene Symbol: IRAK4
  Gene Name: interleukin-1 receptor-associated kinase 4
  ENST ID: ENST00000550361
  CDS Start-End: 175-357
aatgcctcggtcaaacgtcgtccgaggtccgcttccaggcctcggcacctctgccccagggttgctggggtcggctgcggaacggaaatctctttatcatccgtgagaaaagttagagaggaagtgggttcctttgacagagcttactccagaagaaagacttgggaatagaagatgaacaaacccataacaccatcaacatatgtgcgctgcctcaatgttggactaattaggaagctgtcagattttattgatcctcaagaaggatggaagaagttagctgtagctattaaaaaaccatctggtgatgatagatacaatcagtttcacataagatgctgttcccaaaactgctaatacactaccttctaaagaagctataacagttcagcaaaaacagatgcctttctgtgacaaagacaggacattgatgacacctgtgcagaatcttgaacaaagctatatgccacctgactcctcaagtccagaaaataaaagtttagaagttagtgatacacgttttcacagtttttcattttatgaattgaagaatgtcacaaata

SEQ ID NO: 144179 - DNA, 4280 bp, Homo sapiens
  Payload ID: 8492
  Gene Symbol: IRAK4
  Gene Name: interleukin-1 receptor-associated kinase 4
  Uniprot ID: Q9NWZ3
  ENST ID: ENST00000613694
  CDS Start-End: 72-1454
gcggcgcttcctagttcggctggttcttctgtcgccggcttcagcagcccgcgcccgggcaggaatagaagatgaacaaacccataacaccatcaacatatgtgcgctgcctcaatgttggactaattaggaagctgtcagattttattgatcctcaagaaggatggaagaagttagctgtagctattaaaaaaccatctggtgatgatagatacaatcagtttcacataaggagatttgaagcattacttcaaactggaaaaagtcccacttctgaattactgtttgactggggcaccacaaattgcacagttggtgatcttgtggatcttttgatccaaaatgaattttttgctcctgcgagtcttttgctcccagatgctgttcccaaaactgctaatacactaccttctaaagaagctataacagttcagcaaaaacagatgcctttctgtgacaaagacaggacattgatgacacctgtgcagaatcttgaacaaagctatatgccacctgactcctcaagtccagaaaataaaagtttagaagttagtgatacacgttttcacagtttttcattttatgaattgaagaatgtcacaaataactttgatgaacgacccatttctgttggtggtaataaaatgggagagggaggatttggagttgtatataaaggctacgtaaataacacaactgtggcagtgaagaagcttgcagcaatggttgacattactactgaagaactgaaacagcagtttgatcaagaaataaaagtaatggcaaagtgtcaacatgaaaacttagtagaactacttggtttctcaagtgatggagatgacctctgcttagtatatgtttacatgcctaatggttcattgctagacagactctcttgcttggatggtactccaccactttcttggcacatgagatgcaagattgctcagggtgcagctaatggcatcaattttctacatgaaaatcatcatattcatagagatattaaaagtgcaaatatcttactggatgaagcttttactgctaaaatatctgactttggccttgcacgggcttctgagaagtttgcccagacagtcatgactagcagaattgtgggaacaacagcttatatggcaccagaagctttgcgtggagaaataacacccaaatctgatatttacagctttggtgtggttttactagaaataataactggacttccagctgtggatgaacaccgtgaacctcagttattgctagatattaaagaagaaattgaagatgaagaaaagacaattgaagattatattgataaaaagatgaatgatgctgattccacttcagttgaagctatgtactctgttgctagtcaatgtctgcatgaaaagaaaaataagagaccagacattaagaaggttcaacagctgctgcaagagatgacagcttcttaaaactttattggaaaagactcttgactttttatatacacctatctcaaccatttttttaactgatttttttcctaaatattcttctttacctttaacaaggcataggctgttgcaggacagtggttattaaagcatgggttgaacttccaaaatataaaaatagagccaccatatcaacacttagccctacccattagtatcacccccagttcttacagtaatccctgagaaatctccttcaagcatcaccaaacacagtttgaaaattacagggttagcaaaaagagcctgggctgtatgtagggtggaaacactctgatctgaagcccagctgactccactactaatttgctgtaaagctttggacatacacttagctgctgtgagccactaataacattgggctaatatctgctgtgcttctctgacaggtagtcatgaaaatcaaatgatgcaaaatatatacaagcactttgtaaattgtaaaatgatacaaaatttaaagtttatagagccagttacaaaatcctattagtcatatatttatagattgtgttcacagcaatcatttaaccacaaataaaatatcccttgatgatactgccataatgatatgtccattattagattatgttacatgacaaagttgaaggaatttggcagatgcagttaaggttcctaaacaactcactttgagactgttgaaagggcctgacctaatcaagtgaacccttgcaagaagaattctccttgtaagccttgaagaagtatgtgagagggccacattggctaaaacctaaaggtggcctctaggagatgagacctaccttccagttgtcagcaagcaggaaaaaaaaattgggacctcagttgcaaccacaaggaactgaattctgccaaaaatctgagtcagcttagaagagtactccaagcttcagatgataaccacagcctgggctgacacctggatttcagctttgcatgatcctcagtatgagaatctatctgttctgtgctggacttctaatatatagaactgtgagataatgggtcacattggctggatgtggtggctcatacctgtaaatcccagcactttgggaggccgaggcaggcagatcacctgaggtcaagagttcaagaccggcctggccaacatggtgaaaccccgtctctactaaaaatacaaaaattagacgagcgtggtggtggacacctgtagtcccagctacttgggaggctgaggcaggagactagctggaaccagggaggtagaggttgcagtgagctgagatcgtgccactgcactccagcctgggtgacagagtgagactccatcataaataaataaataaataaatgggtcacattaagcctttaagtttgtggtaatttattattcagtaatagaaaacaaatacagatactctcccatgatgtttttcccatgatgatttcccatgatatttacaggttttgcccacatttgaggggtatgtggaaattatacagagcatgtacagcgggaggcttatagtgtacgtactgaaatgtggggttggagccccaacacagagaccccagcaggacactgcctagtagagctatgggaagggtgctgccaccctccagacttgagaattgtagagccaccagcagcttgcactctgagcttggaaaagccacaggcactcaacttcaaccatgagggaagccacgcaccctgcaaagccacaggagtggagctgcccacggcctcgagggcccaccccttgcaccagtgtgccaggatgtgggacatggaatcaaggaatatgttagggcttttttttttttttttttgagacggagtcttgctctgttgcccaggctggagtgcagtggcacgatctcggctcactgcaagctctgcctcccaggttcacgccattcccctgcctcagcctccccagtagctgggactacaggtgcccgccaccatgcccagctaattttttttgtatttttagtagagatggggtttcactgtgttagccaggatggtcttgatctcctgacctcgtgatcacccgcctcggcctcccaaagtgccagtatttaaagtttaatgtcttcccagctgggtttcagacttgccaggatcctgttgcccctttctttagccaatttctcccttttgggacaagaatgttttacttattgcctgtaccaccaactgtatcttggaaataaataacttatattttatttcagaggctcataggcggcaggaacttaccttgagtctcaaatgagacttaggacttttgagtgatgctagaatgagttaagactttgggaagggatgattatattttgcaatgtgagaaagacattagatttggggggctgggggtagaatgacattgtttagatgtttgtctccttcaaatttcatgtttaaatgtaatccccagtgttgggggtggaggtggggcctgatgggaagtgtttgggtcatggtggatgatccctcatgaatggcttagagccactggtgatgagtgagttctcactcagttcgtgtgagatctggtggcttaaaagagtctgctccccctttgccttccattgtgattgtaaccttcctggggccttcatcaaaggccaggcaaatattggtgccgtgctagtatggcctgcagaaccgtaagccaaaacaaaccttttttctttataaattacccagcctcagttattcctttatagtgatgcaaaacgggctaactatataaatttgtaatttttaagttatagattgtttttattaaacacttatgaatactg

SEQ ID NO: 144180 - DNA, 2686 bp, Homo sapiens
  Payload ID: 8493
  Gene Symbol: IFFO1
  Gene Name: intermediate filament family orphan 1
  Uniprot ID: Q0D2I5
  ENST ID: ENST00000336604
  CDS Start-End: 43-1731
tgctcctgcaccggtctgcatctcccagcagaaggcgcagccatgaatccgttattcggccccaacctcttcctcctgcagcaggagcagcagggcctggccgggccactgggggactcactgggaggcgaccacttcgccgggggaggagacttgcccccggcgcctctctcgccggccggccctgctgcctactcgccgcccgggccgggcccggccccgcctgccgccatggccctccgcaatgacctgggctccaacatcaacgtgctcaagaccctgaacctccggttccgctgcttcctggccaaggtgcatgagctggagcgccggaaccggctgttggagaagcaactgcagcaagcgctggaggagggtaagcagggccggcggggcctgggtcgtcgcgaccaggcagtgcagaccggcttcgtcagccccatccggcccctggggctgcagctgggcgcccggccggccgctgtctgcagcccttcggcgcgcgtgctgggctcgcccgcgcgctccccggccggccccctcgcgccctccgcggccagcctctcgtcgtcctccacctccacctccaccacctattcctcgtcggcccgcttcatgcccggcaccatctggtcgttctcgcacgcccgccggctcgggccgggactggagcccactctggtgcaagggcctggcttgtcgtgggtgcacccggatggggtgggcgtccagatcgacaccatcacgcccgagatccgcgctctctacaacgtgctggccaaagtgaagcgggagcgggacgagtacaagcggaggtgggaagaggagtacacggtgcggatccagctgcaagaccgtgtaaatgagctccaggaggaagcccaggaggctgatgcctgccaggaggagctggcactgaaggtggaacagttgaaggctgagctggtggtcttcaaggggctcatgagtaacaacctgtcggagctggacaccaagatccaggagaaagccatgaaggtggatatggacatctgccgccgcatcgacatcaccgccaagctctgcgatgtggctcagcagcgcaactgcgaggacatgatccagatgttccagaagaagctggtcccatccatgggggggcggaagcgggagcgcaaggctgccgtcgaggaggacacctccctgtcggagagtgaggggccccgccagcccgatggggatgaggaggagagcacagccctcagcatcaacgaggagatgcagcgcatgctcaaccagctgagggagtatgattttgaggacgactgtgacagcctgacttgggaggagactgaggagaccctgctgctttgggaggatttctcaggctatgccatggcagctgcagaggcccagggagagcaggaagatagcctggagaaggtgattaaagatacggagtccctgttcaaaacccgggagaaggagtatcaggagaccattgaccagatagagctggagttggccacggccaagaacgacatgaaccggcacctgcacgagtacatggagatgtgcagcatgaagcgcggcctggacgtgcagatggagacctgccgccggctcatcacccagtctggagaccgaaagtctcctgctttcactgcggtcccgcttagcgacccgccgccgccgccaagcgaggctgaggactccgatcgcgatgtctcatctgacagctccatgagatagagacctgcctcccccttgcacccgaggccctcgcagcagggagctcagcgaggcagagggtggggctgcacagaggggaacatcagctgcagctctgcaccaggccggtccctggggactggggcgctcctccctcaggctttctccctcagtcttggcttctccagggctctggggtgtctggagctaggcttggccctaccattctggggccatttccaccacagttggggctctcctgccttcacgcgtgggtgtctgctacttccccatctttaaaatgctgccagagcgattgcggcccctcaccttgtccacgtatcaggaatgtgaatgtgggacctttcctccatccctgttgtccggagccagctcactgtcttccacactggtgctaactggcccaggcactggagtggaatagaatgcagctggaggctacgcatggcctctgcagcacacgcagctggagagggcttctgtccctgtcagcggcagagggcgttggggctggccggggcaccttgtccctgctatggtccacgtgctcacgctgtccacctgccaggtggagtgtatgtggctgtggccctccctcgtggaggtgccgtgctttaaagaggccttagtgcccgggatgggcacagtgttttgaagggaggtgggagctcttgctctcctggtcactgcagaatgacagagaaggtgaagctccatgcatgtgtgcgcgggtgtatgtgcgctcagggtctctgtttaagtatcagctaaagatgtgcttcctccgtgtctgtcatacactgagaccaacaggctacagtgtccctgattcttggaaaagcctggagaagctggggagatgcggttcacaatgcctcggtataggaggctgtgttgagctgacattcaaatggattctttaataataatgaaactggcgagtatttattgtgca

SEQ ID NO: 144181 - DNA, 2680 bp, Homo sapiens
  Payload ID: 8493
  Gene Symbol: IFFO1
  Gene Name: intermediate filament family orphan 1
  Uniprot ID: Q0D2I5
  ENST ID: ENST00000356896
  CDS Start-End: 45-1736
cctgctcctgcaccggtctgcatctcccagcagaaggcgcagccatgaatccgttattcggccccaacctcttcctcctgcagcaggagcagcagggcctggccgggccactgggggactcactgggaggcgaccacttcgccgggggaggagacttgcccccggcgcctctctcgccggccggccctgctgcctactcgccgcccgggccgggcccggccccgcctgccgccatggccctccgcaatgacctgggctccaacatcaacgtgctcaagaccctgaacctccggttccgctgcttcctggccaaggtgcatgagctggagcgccggaaccggctgttggagaagcaactgcagcaagcgctggaggagggtaagcagggccggcggggcctgggtcgtcgcgaccaggcagtgcagaccggcttcgtcagccccatccggcccctggggctgcagctgggcgcccggccggccgctgtctgcagcccttcggcgcgcgtgctgggctcgcccgcgcgctccccggccggccccctcgcgccctccgcggccagcctctcgtcgtcctccacctccacctccaccacctattcctcgtcggcccgcttcatgcccggcaccatctggtcgttctcgcacgcccgccggctcgggccgggactggagcccactctggtgcaagggcctggcttgtcgtgggtgcacccggatggggtgggcgtccagatcgacaccatcacgcccgagatccgcgctctctacaacgtgctggccaaagtgaagcgggagcgggacgagtacaagcggaggtgggaagaggagtacacggtgcggatccagctgcaagaccgtgtaaatgagctccaggaggaagcccaggaggctgatgcctgccaggaggagctggcactgaaggtggaacagttgaaggctgagctggtggtcttcaaggggctcatgagtaacaacctgtcggagctggacaccaagatccaggagaaagccatgaaggtggatatggacatctgccgccgcatcgacatcaccgccaagctctgcgatgtggctcagcagcgcaactgcgaggacatgatccagatgttccagaagaagctggtcccatccatgggggggcggaagcgggagcgcaaggctgccgtcgaggaggacacctccctgtcggagagtgaggggccccgccagcccgatggggatgaggaggagagcacagccctcagcatcaacgaggagatgcagcgcatgctcaaccagctgagggagtatgattttgaggacgactgtgacagcctgacttgggaggagactgaggagaccctgctgctttgggaggatttctcaggctatgccatggcagctgcagaggcccagggagagcagcaggaagatagcctggagaaggtgattaaagatacggagtccctgttcaaaacccgggagaaggagtatcaggagaccattgaccagatagagctggagttggccacggccaagaacgacatgaaccggcacctgcacgagtacatggagatgtgcagcatgaagcgcggcctggacgtgcagatggagacctgccgccggctcatcacccagtctggagaccgaaagtctcctgctttcactgcggtcccgcttagcgacccgccgccgccgccaagcgaggctgaggactccgatcgcgatgtctcatctgacagctccatgagatagagacctgcctcccccttgcacccgaggccctcgcagcagggagctcagcgaggcagagggtggggctgcacagaggggaacatcagctgcagctctgcaccaggccggtccctggggactggggcgctcctccctcaggctttctccctcagtcttggcttctccagggctctggggtgtctggagctaggcttggccctaccattctggggccatttccaccacagttggggctctcctgccttcacgcgtgggtgtctgctacttccccatctttaaaatgctgccagagcgattgcggcccctcaccttgtccacgtatcaggaatgtgaatgtgggacctttcctccatccctgttgtccggagccagctcactgtcttccacactggtgctaactggcccaggcactggagtggaatagaatgcagctggaggctacgcatggcctctgcagcacacgcagctggagagggcttctgtccctgtcagcggcagagggcgttggggctggccggggcaccttgtccctgctatggtccacgtgctcacgctgtccacctgccaggtggagtgtatgtggctgtggccctccctcgtggaggtgccgtgctttaaagaggccttagtgcccgggatgggcacagtgttttgaagggaggtgggagctcttgctctcctggtcactgcagaatgacagagaaggtgaagctccatgcatgtgtgcgcgggtgtatgtgcgctcagggtctctgtttaagtatcagctaaagatgtgcttcctccgtgtctgtcatacactgagaccaacaggctacagtgtccctgattcttggaaaagcctggagaagctggggagatgcggttcacaatgcctcggtataggaggctgtgttgagctgacattcaaatggattctttaataataatgaaactggcgagta

SEQ ID NO: 144182 - DNA, 2677 bp, Homo sapiens
  Payload ID: 8493
  Gene Symbol: IFFO1
  Gene Name: intermediate filament family orphan 1
  Uniprot ID: Q0D2I5
  ENST ID: ENST00000396840
  CDS Start-End: 43-1722
tgctcctgcaccggtctgcatctcccagcagaaggcgcagccatgaatccgttattcggccccaacctcttcctcctgcagcaggagcagcagggcctggccgggccactgggggactcactgggaggcgaccacttcgccgggggaggagacttgcccccggcgcctctctcgccggccggccctgctgcctactcgccgcccgggccgggcccggccccgcctgccgccatggccctccgcaatgacctgggctccaacatcaacgtgctcaagaccctgaacctccggttccgctgcttcctggccaaggtgcatgagctggagcgccggaaccggctgttggagaagcaactgcagcaagcgctggaggagggtaagcagggccggcggggcctgggtcgtcgcgaccaggcagtgcagaccggcttcgtcagccccatccggcccctggggctgcagctgggcgcccggccggccgctgtctgcagcccttcggcgcgcgtgctgggctcgcccgcgcgctccccggccggccccctcgcgccctccgcggccagcctctcgtcgtcctccacctccacctccaccacctattcctcgtcggcccgcttcatgcccggcaccatctggtcgttctcgcacgcccgccggctcgggccgggactggagcccactctggtgcaagggcctggcttgtcgtgggtgcacccggatggggtgggcgtccagatcgacaccatcacgcccgagatccgcgctctctacaacgtgctggccaaagtgaagcgggagcgggacgagtacaagcggaggtgggaagaggagtacacggtgcggatccagctgcaagaccgtgtaaatgagctccaggaggaagcccaggaggctgatgcctgccaggaggagctggcactgaaggtggaacagttgaaggctgagctggtggtcttcaaggggctcatgagtaacaacctgtcggagctggacaccaagatccaggagaaagccatgaaggtggatatggacatctgccgccgcatcgacatcaccgccaagctctgcgatgtggctcagcagcgcaactgcgaggacatgatccagatgttccaggtcccatccatgggggggcggaagcgggagcgcaaggctgccgtcgaggaggacacctccctgtcggagagtgaggggccccgccagcccgatggggatgaggaggagagcacagccctcagcatcaacgaggagatgcagcgcatgctcaaccagctgagggagtatgattttgaggacgactgtgacagcctgacttgggaggagactgaggagaccctgctgctttgggaggatttctcaggctatgccatggcagctgcagaggcccagggagagcaggaagatagcctggagaaggtgattaaagatacggagtccctgttcaaaacccgggagaaggagtatcaggagaccattgaccagatagagctggagttggccacggccaagaacgacatgaaccggcacctgcacgagtacatggagatgtgcagcatgaagcgcggcctggacgtgcagatggagacctgccgccggctcatcacccagtctggagaccgaaagtctcctgctttcactgcggtcccgcttagcgacccgccgccgccgccaagcgaggctgaggactccgatcgcgatgtctcatctgacagctccatgagatagagacctgcctcccccttgcacccgaggccctcgcagcagggagctcagcgaggcagagggtggggctgcacagaggggaacatcagctgcagctctgcaccaggccggtccctggggactggggcgctcctccctcaggctttctccctcagtcttggcttctccagggctctggggtgtctggagctaggcttggccctaccattctggggccatttccaccacagttggggctctcctgccttcacgcgtgggtgtctgctacttccccatctttaaaatgctgccagagcgattgcggcccctcaccttgtccacgtatcaggaatgtgaatgtgggacctttcctccatccctgttgtccggagccagctcactgtcttccacactggtgctaactggcccaggcactggagtggaatagaatgcagctggaggctacgcatggcctctgcagcacacgcagctggagagggcttctgtccctgtcagcggcagagggcgttggggctggccggggcaccttgtccctgctatggtccacgtgctcacgctgtccacctgccaggtggagtgtatgtggctgtggccctccctcgtggaggtgccgtgctttaaagaggccttagtgcccgggatgggcacagtgttttgaagggaggtgggagctcttgctctcctggtcactgcagaatgacagagaaggtgaagctccatgcatgtgtgcgcgggtgtatgtgcgctcagggtctctgtttaagtatcagctaaagatgtgcttcctccgtgtctgtcatacactgagaccaacaggctacagtgtccctgattcttggaaaagcctggagaagctggggagatgcggttcacaatgcctcggtataggaggctgtgttgagctgacattcaaatggattctttaataataatgaaactggcgagtatttattgtgca

SEQ ID NO: 144183 - DNA, 3101 bp, Homo sapiens
  Payload ID: 8493
  Gene Symbol: IFFO1
  Gene Name: intermediate filament family orphan 1
  ENST ID: ENST00000436152
  CDS Start-End: 561-1331
gatgagacatgacaaagctggctctgggaagcatgccctacctaggaccctgccctgtggcccagggtgtcgtccggcccacttgcagtcttaatctctgaattctgggccctggaacaggctgtgtctagttctcatttgccgtactcaccgggcccctttacatactctactttctctttccctctgggtttgagtgctagtaaccccaggctcgtgtgtccactgctgtcatgctgctgtgggacttccggcctctgagccagtctggtcacctctctgtgactcccttagaggaggctctggatgcttttacagggttaaatgataccacaagaggcagggcagcgggctcgacgagctctgttctggtgcgggcaggaggcgggagcccggatctgtgcgactgaaggtgggaagaggagtacacggtgcggatccagctgcaagaccgtgtaaatgagctccaggaggaagcccaggaggctgatgcctgccaggaggagctggcactgaaggtggaacagttgaaggctgagctggtggtcttcaaggggctcatgagtaacaacctgtcggagctggacaccaagatccaggagaaagccatgaaggtggatatggacatctgccgccgcatcgacatcaccgccaagctctgcgatgtggctcagcagcgcaactgcgaggacatgatccagatgttccagaagaagctggtcccatccatgggggggcggaagcgggagcgcaaggctgccgtcgaggaggacacctccctgtcggagagtgaggggccccgccagcccgatggggatgaggaggagagcacagccctcagcatcaacgaggagatgcagcgcatgctcaaccagctgagggagtatgattttgaggacgactgtgacagcctgacttgggaggagactgaggagaccctgctgctttgggaggatttctcaggctatgccatggcagctgcagaggcccagggagagcagcaggaagatagcctggagaaggtgattaaagatacggagtccctgttcaaaacccgggagaaggagtatcaggagaccattgaccagatagagctggagttggccacggccaagaacgacatgaaccggcacctgcacgagtacatggagatgtgcagcatgaagcgcggcctggacgtgcagatggagacctgccgccggctcatcacccagtctggagaccgaaagtctcctgctttcactgcggtcccgcttagcgacccgccgccgccgccaagcgaggctgaggactccgatcgcgatgtctcatctgacagctccatgagatagagacctgcctcccccttgcacccgaggccctcgcagcagggagctcagcgaggcagagggtggggctgcacagaggggaacatcagctgcagctctgcaccaggccggtccctggggactggggcgctcctccctcaggctttctccctcagtcttggcttctccagggctctggggtgtctggagctaggcttggccctaccattctggggccatttccaccacagttggggctctcctgccttcacgcgtgggtgtctgctacttccccatctttaaaatgctgccagagcgattgcggcccctcaccttgtccacgtatcaggaatgtgaatgtgggacctttcctccatccctgttgtccggagccagctcactgtcttccacactggtgctaactggcccaggcactggagtggaatagaatgcagctggaggctacgcatggcctctgcagcacacgcagctggagagggcttctgtccctgtcagcggcagagggcgttggggctggccggggcaccttgtccctgctatggtccacgtgctcacgctgtccacctgccaggtggagtgtatgtggctgtggccctccctcgtggaggtgccgtgctttaaagaggccttagtgcccgggatgggcacagtgttttgaagggaggtgggagctcttgctctcctggtcactgcagaatgacagagaaggtgaagctccatgcatgtgtgcgcgggtgtatgtgcgctcagggtctctgtttaagtatcagctaaagatgtgcttcctccgtgtctgtcatacactgagaccaacaggctacagtgtccctgattcttggaaaagcctggagaagctggggagatgcggttcacaatgcctcggtataggaggctgtgttgagctgacattcaaatggattctttaataataatgaaactggcgagtatttattgtgcactttggtgtcactgtctcaagcacttcctaatattcactagtttgaactctgaggtaggtactttttttttttttgagatggagtctcatactctgttgcctaggctggagtgcagtggtgtggtctcagctcactgcagcctctgcctccggggtgcaagcgattctcctgcttcagcatgcctgtagctgggactataggcatgtgccatgaagcctggctgatttttgtaattttagtagagacggagtttcaccatgttggccaggctggtctcaaactcctgacctcaggtgatacacccaccttggcctcccaaagtgctggggttacaggcgtgcgcgctctaccgaggtatgtacttttgtctccactaggtaagcacacgtgcaaagtgaggcccgggagtaactgcccaaagcaactgagccgttcagtggcagagccaggggtctggacctaggtcccagctacacgccttgcccctacccaagttcccctaaggacgatgatggaaataagtcaccctgacacatctcagttcatcttcctcaaaactatgcgagatagcctaggactggagcgaggagaggaaaaggccttgttctctgaagtagtggtgccagcttcctgtagcactcaagacgtctgagcgggaagcaaatggttctcgaagcaagcaaggctgtttggaggccctaccctcagtctgaggagaacataccaggtccctccccagcaagaatgtctcaccttgacacaagcccagcttccctcccctctgccccagaccctagaataagacaggacaagt

SEQ ID NO: 144184 - DNA, 2786 bp, Homo sapiens
  Payload ID: 8493
  Gene Symbol: IFFO1
  Gene Name: intermediate filament family orphan 1
  Uniprot ID: Q0D2I5
  ENST ID: ENST00000487279
  CDS Start-End: 43-837
tgctcctgcaccggtctgcatctcccagcagaaggcgcagccatgaatccgttattcggccccaacctcttcctcctgcagcaggagcagcagggcctggccgggccactgggggactcactgggaggcgaccacttcgccgggggaggagacttgcccccggcgcctctctcgccggccggccctgctgcctactcgccgcccgggccgggcccggccccgcctgccgccatggccctccgcaatgacctgggctccaacatcaacgtgctcaagaccctgaacctccggttccgctgcttcctggccaaggtgcatgagctggagcgccggaaccggctgttggagaagcaactgcagcaagcgctggaggagggtaagcagggccggcggggcctgggtcgtcgcgaccaggcagtgcagaccggcttcgtcagccccatccggcccctggggctgcagctgggcgcccggccggccgctgtctgcagcccttcggcgcgcgtgctgggctcgcccgcgcgctccccggccggccccctcgcgccctccgcggccagcctctcgtcgtcctccacctccacctccaccacctattcctcgtcggcccgcttcatgcccggcaccatctggtcgttctcgcacgcccgccggctcgggccgggactggagcccactctggtgcaagggcctggcttgtcgtgggtgcacccggatggggtgggcgtccagatcgacaccatcacgcccgagatccgcgctctctacaacgtgctggccaaagtgaagcgggagcgggacgagtacaagcggagatgcttttacagggttaaatgataccacaagaggcagggcagcgggctcgacgagctctgttctggtgcgggcaggaggcgggagcccggatctgtgcgactgaaggtgggaagaggagtacacggtgcggatccagctgcaagaccgtgtaaatgagctccaggaggaagcccaggaggctgatgcctgccaggaggagctggcactgaaggtggaacagttgaaggctgagctggtggtcttcaaggggctcatgagtaacaacctgtcggagctggacaccaagatccaggagaaagccatgaaggtggatatggacatctgccgccgcatcgacatcaccgccaagctctgcgatgtggctcagcagcgcaactgcgaggacatgatccagatgttccaggtcccatccatgggggggcggaagcgggagcgcaaggctgccgtcgaggaggacacctccctgtcggagagtgaggggccccgccagcccgatggggatgaggaggagagcacagccctcagcatcaacgaggagatgcagcgcatgctcaaccagctgagggagtatgattttgaggacgactgtgacagcctgacttgggaggagactgaggagaccctgctgctttgggaggatttctcaggctatgccatggcagctgcagaggcccagggagagcagcaggaagatagcctggagaaggtgattaaagatacggagtccctgttcaaaacccgggagaaggagtatcaggagaccattgaccagatagagctggagttggccacggccaagaacgacatgaaccggcacctgcacgagtacatggagatgtgcagcatgaagcgcggcctggacgtgcagatggagacctgccgccggctcatcacccagtctggagaccgaaagtctcctgctttcactgcggtcccgcttagcgacccgccgccgccgccaagcgaggctgaggactccgatcgcgatgtctcatctgacagctccatgagatagagacctgcctcccccttgcacccgaggccctcgcagcagggagctcagcgaggcagagggtggggctgcacagaggggaacatcagctgcagctctgcaccaggccggtccctggggactggggcgctcctccctcaggctttctccctcagtcttggcttctccagggctctggggtgtctggagctaggcttggccctaccattctggggccatttccaccacagttggggctctcctgccttcacgcgtgggtgtctgctacttccccatctttaaaatgctgccagagcgattgcggcccctcaccttgtccacgtatcaggaatgtgaatgtgggacctttcctccatccctgttgtccggagccagctcactgtcttccacactggtgctaactggcccaggcactggagtggaatagaatgcagctggaggctacgcatggcctctgcagcacacgcagctggagagggcttctgtccctgtcagcggcagagggcgttggggctggccggggcaccttgtccctgctatggtccacgtgctcacgctgtccacctgccaggtggagtgtatgtggctgtggccctccctcgtggaggtgccgtgctttaaagaggccttagtgcccgggatgggcacagtgttttgaagggaggtgggagctcttgctctcctggtcactgcagaatgacagagaaggtgaagctccatgcatgtgtgcgcgggtgtatgtgcgctcagggtctctgtttaagtatcagctaaagatgtgcttcctccgtgtctgtcatacactgagaccaacaggctacagtgtccctgattcttggaaaagcctggagaagctggggagatgcggttcacaatgcctcggtataggaggctgtgttgagctgacattcaaatggattctttaataataatgaaactggcgagtatttattgtgca

SEQ ID NO: 144185 - DNA, 2850 bp, Homo sapiens
  Payload ID: 8493
  Gene Symbol: IFFO1
  Gene Name: intermediate filament family orphan 1
  ENST ID: ENST00000465801
  CDS Start-End: 561-1328
gatgagacatgacaaagctggctctgggaagcatgccctacctaggaccctgccctgtggcccagggtgtcgtccggcccacttgcagtcttaatctctgaattctgggccctggaacaggctgtgtctagttctcatttgccgtactcaccgggcccctttacatactctactttctctttccctctgggtttgagtgctagtaaccccaggctcgtgtgtccactgctgtcatgctgctgtgggacttccggcctctgagccagtctggtcacctctctgtgactcccttagaggaggctctggatgcttttacagggttaaatgataccacaagaggcagggcagcgggctcgacgagctctgttctggtgcgggcaggaggcgggagcccggatctgtgcgactgaaggtgggaagaggagtacacggtgcggatccagctgcaagaccgtgtaaatgagctccaggaggaagcccaggaggctgatgcctgccaggaggagctggcactgaaggtggaacagttgaaggctgagctggtggtcttcaaggggctcatgagtaacaacctgtcggagctggacaccaagatccaggagaaagccatgaaggtggatatggacatctgccgccgcatcgacatcaccgccaagctctgcgatgtggctcagcagcgcaactgcgaggacatgatccagatgttccagaagaagctggtcccatccatgggggggcggaagcgggagcgcaaggctgccgtcgaggaggacacctccctgtcggagagtgaggggccccgccagcccgatggggatgaggaggagagcacagccctcagcatcaacgaggagatgcagcgcatgctcaaccagctgagggagtatgattttgaggacgactgtgacagcctgacttgggaggagactgaggagaccctgctgctttgggaggatttctcaggctatgccatggcagctgcagaggcccagggagagcaggaagatagcctggagaaggtgattaaagatacggagtccctgttcaaaacccgggagaaggagtatcaggagaccattgaccagatagagctggagttggccacggccaagaacgacatgaaccggcacctgcacgagtacatggagatgtgcagcatgaagcgcggcctggacgtgcagatggagacctgccgccggctcatcacccagtctggagaccgaaagtctcctgctttcactgcggtcccgcttagcgacccgccgccgccgccaagcgaggctgaggactccgatcgcgatgtctcatctgacagctccatgagatagagacctgcctcccccttgcacccgaggccctcgcagcagggagctcagcgaggcagagggtggggctgcacagaggggaacatcagctgcagctctgcaccaggccggtccctggggactggggcgctcctccctcaggctttctccctcagtcttggcttctccagggctctggggtgtctggagctaggcttggccctaccattctggggccatttccaccacagttggggctctcctgccttcacgcgtgggtgtctgctacttccccatctttaaaatgctgccagagcgattgcggcccctcaccttgtccacgtatcaggaatgtgaatgtgggacctttcctccatccctgttgtccggagccagctcactgtcttccacactggtgctaactggcccaggcactggagtggaatagaatgcagctggaggctacgcatggcctctgcagcacacgcagctggagagggcttctgtccctgtcagcggcagagggcgttggggctggccggggcaccttgtccctgctatggtccacgtgctcacgctgtccacctgccaggtggagtgtatgtggctgtggccctccctcgtggaggtgccgtgctttaaagaggccttagtgcccgggatgggcacagtgttttgaagggaggtgggagctcttgctctcctggtcactgcagaatgacagagaaggtgaagctccatgcatgtgtgcgcgggtgtatgtgcgctcagggtctctgtttaagtatcagctaaagatgtgcttcctccgtgtctgtcatacactgagaccaacaggctacagtgtccctgattcttggaaaagcctggagaagctggggagatgcggttcacaatgcctcggtataggaggctgtgttgagctgacattcaaatggattctttaataataatgaaactggcgagtatttattgtgcactttggtgtcactgtctcaagcacttcctaatattcactagtttgaactctgaggtaggtactttttttttttttgagatggagtctcatactctgttgcctaggctggagtgcagtggtgtggtctcagctcactgcagcctctgcctccggggtgcaagcgattctcctgcttcagcatgcctgtagctgggactataggcatgtgccatgaagcctggctgatttttgtaattttagtagagacggagtttcaccatgttggccaggctggtctcaaactcctgacctcaggtgatacacccaccttggcctcccaaagtgctggggttacaggcgtgcgcgctctaccgaggtatgtacttttgtctccactaggtaagcacacgtgcaaagtgaggcccgggagtaactgcccaaagcaactgagccgttcagtggcagagccaggggtctggacctaggtcccagctacacgccttgcccctacccaagttcccctaaggacgatgatggaaataagtcaccctgacacatctcagttcatcttcctcaaaactatgcgag

SEQ ID NO: 144186 - DNA, 2724 bp, Homo sapiens
  Payload ID: 8493
  Gene Symbol: IFFO1
  Gene Name: intermediate filament family orphan 1
  ENST ID: ENST00000619571
  CDS Start-End: 55-1770
gccttccatccctgctcctgcaccggtctgcatctcccagcagaaggcgcagccatgaatccgttattcggccccaacctcttcctcctgcagcaggagcagcagggcctggccgggccactgggggactcactgggaggcgaccacttcgccgggggaggagacttgcccccggcgcctctctcgccggccggccctgctgcctactcgccgcccgggccgggcccggccccgcctgccgccatggccctccgcaatgacctgggctccaacatcaacgtgctcaagaccctgaacctccggttccgctgcttcctggccaaggtgcatgagctggagcgccggaaccggctgttggagaagcaactgcagcaagcgctggaggagggtaagcagggccggcggggcctgggtcgtcgcgaccaggcagtgcagaccggcttcgtcagccccatccggcccctggggctgcagctgggcgcccggccggccgctgtctgcagcccttcggcgcgcgtgctgggctcgcccgcgcgctccccggccggccccctcgcgccctccgcggccagcctctcgtcgtcctccacctccacctccaccacctattcctcgtcggcccgcttcatgcccggcaccatctggtcgttctcgcacgcccgccggctcgggccgggactggagcccactctggtgcaagggcctggcttgtcgtgggtgcacccggatggggtgggcgtccagatcgacaccatcacgcccgagatccgcgctctctacaacgtgctggccaaagtgaagcgggagcgggacgagtacaagcggaggtgggaagaggagtacacggtgcggatccagctgcaagaccgtgtaaatgagctccaggaggaagcccaggaggctgatgcctgccaggaggagctggcactgaaggtggaacagttgaaggctgagctggtggtcttcaaggggctcatgagtaacaacctgtcggagctggacaccaagatccaggagaaagccatgaaggtggatatggacatctgccgccgcatcgacatcaccgccaagctctgcgatgtggctcagcagcgcaactgcgaggacatgatccagatgttccagaagaagctgtctctgcacttgtctcccattaaggtcccatccatgggggggcggaagcgggagcgcaaggctgccgtcgaggaggacacctccctgtcggagagtgaggggccccgccagcccgatggggatgaggaggagagcacagccctcagcatcaacgaggagatgcagcgcatgctcaaccagctgagggagtatgattttgaggacgactgtgacagcctgacttgggaggagactgaggagaccctgctgctttgggaggatttctcaggctatgccatggcagctgcagaggcccagggagagcagcaggaagatagcctggagaaggtgattaaagatacggagtccctgttcaaaacccgggagaaggagtatcaggagaccattgaccagatagagctggagttggccacggccaagaacgacatgaaccggcacctgcacgagtacatggagatgtgcagcatgaagcgcggcctggacgtgcagatggagacctgccgccggctcatcacccagtctggagaccgaaagtctcctgctttcactgcggtcccgcttagcgacccgccgccgccgccaagcgaggctgaggactccgatcgcgatgtctcatctgacagctccatgagatagagacctgcctcccccttgcacccgaggccctcgcagcagggagctcagcgaggcagagggtggggctgcacagaggggaacatcagctgcagctctgcaccaggccggtccctggggactggggcgctcctccctcaggctttctccctcagtcttggcttctccagggctctggggtgtctggagctaggcttggccctaccattctggggccatttccaccacagttggggctctcctgccttcacgcgtgggtgtctgctacttccccatctttaaaatgctgccagagcgattgcggcccctcaccttgtccacgtatcaggaatgtgaatgtgggacctttcctccatccctgttgtccggagccagctcactgtcttccacactggtgctaactggcccaggcactggagtggaatagaatgcagctggaggctacgcatggcctctgcagcacacgcagctggagagggcttctgtccctgtcagcggcagagggcgttggggctggccggggcaccttgtccctgctatggtccacgtgctcacgctgtccacctgccaggtggagtgtatgtggctgtggccctccctcgtggaggtgccgtgctttaaagaggccttagtgcccgggatgggcacagtgttttgaagggaggtgggagctcttgctctcctggtcactgcagaatgacagagaaggtgaagctccatgcatgtgtgcgcgggtgtatgtgcgctcagggtctctgtttaagtatcagctaaagatgtgcttcctccgtgtctgtcatacactgagaccaacaggctacagtgtccctgattcttggaaaagcctggagaagctggggagatgcggttcacaatgcctcggtataggaggctgtgttgagctgacattcaaatggattctttaataataatgaaactggcgagtatttattgtgc

SEQ ID NO: 144187 - DNA, 2775 bp, Homo sapiens
  Payload ID: 8493
  Gene Symbol: IFFO1
  Gene Name: intermediate filament family orphan 1
  ENST ID: ENST00000615885
  CDS Start-End: 1062-1832
caccggtctgcatctcccagcagaaggcgcagccatgaatccgttattcggccccaacctcttcctcctgcagcaggagcagcagggcctggccgggccactgggggactcactgggaggcgaccacttcgccgggggaggagacttgcccccggcgcctctctcgccggccggccctgctgcctactcgccgcccgggccgggcccggccccgcctgccgccatggccctccgcaatgacctgggctccaacatcaacgtgctcaagaccctgaacctccggttccgctgcttcctggccaaggtgcatgagctggagcgccggaaccggctgttggagaagcaactgcagcaagcgctggaggagggtaagcagggccggcggggcctgggtcgtcgcgaccaggcagtgcagaccggcttcgtcagccccatccggcccctggggctgcagctgggcgcccggccggccgctgtctgcagcccttcggcgcgcgtgctgggctcgcccgcgcgctccccggccggccccctcgcgccctccgcggccagcctctcgtcgtcctccacctccacctccaccacctattcctcgtcggcccgcttcatgcccggcaccatctggtcgttctcgcacgcccgccggctcgggccgggactggagcccactctggtgcaagggcctggcttgtcgtgggtgcacccggatggggtgggcgtccagatcgacaccatcacgcccgagatccgcgctctctacaacgtgctggccaaagtgaagcgggagcgggacgagtacaagcggagatgcttttacagggttaaatgataccacaagaggcagggcagcgggctcgacgagctctgttctggtgcgggcaggaggcgggagcccggatctgtgcgactgaaggtgggaagaggagtacacggtgcggatccagctgcaagaccgtgtaaatgagctccaggaggaagcccaggaggctgatgcctgccaggaggagctggcactgaaggtggaacagttgaaggctgagctggtggtcttcaaggggctcatgagtaacaacctgtcggagctggacaccaagatccaggagaaagccatgaaggtggatatggacatctgccgccgcatcgacatcaccgccaagctctgcgatgtggctcagcagcgcaactgcgaggacatgatccagatgttccagaagaagctggtcccatccatgggggggcggaagcgggagcgcaaggctgccgtcgaggaggacacctccctgtcggagagtgaggggccccgccagcccgatggggatgaggaggagagcacagccctcagcatcaacgaggagatgcagcgcatgctcaaccagctgagggagtatgattttgaggacgactgtgacagcctgacttgggaggagactgaggagaccctgctgctttgggaggatttctcaggctatgccatggcagctgcagaggcccagggagagcagcaggaagatagcctggagaaggtgattaaagatacggagtccctgttcaaaacccgggagaaggagtatcaggagaccattgaccagatagagctggagttggccacggccaagaacgacatgaaccggcacctgcacgagtacatggagatgtgcagcatgaagcgcggcctggacgtgcagatggagacctgccgccggctcatcacccagtctggagaccgaaagtctcctgctttcactgcggtcccgcttagcgacccgccgccgccgccaagcgaggctgaggactccgatcgcgatgtctcatctgacagctccatgagatagagacctgcctcccccttgcacccgaggccctcgcagcagggagctcagcgaggcagagggtggggctgcacagaggggaacatcagctgcagctctgcaccaggccggtccctggggactggggcgctcctccctcaggctttctccctcagtcttggcttctccagggctctggggtgtctggagctaggcttggccctaccattctggggccatttccaccacagttggggctctcctgccttcacgcgtgggtgtctgctacttccccatctttaaaatgctgccagagcgattgcggcccctcaccttgtccacgtatcaggaatgtgaatgtgggacctttcctccatccctgttgtccggagccagctcactgtcttccacactggtgctaactggcccaggcactggagtggaatagaatgcagctggaggctacgcatggcctctgcagcacacgcagctggagagggcttctgtccctgtcagcggcagagggcgttggggctggccggggcaccttgtccctgctatggtccacgtgctcacgctgtccacctgccaggtggagtgtatgtggctgtggccctccctcgtggaggtgccgtgctttaaagaggccttagtgcccgggatgggcacagtgttttgaagggaggtgggagctcttgctctcctggtcactgcagaatgacagagaaggtgaagctccatgcatgtgtgcgcgggtgtatgtgcgctcagggtctctgtttaagtatcagctaaagatgtgcttcctccgtgtctgtcatacactgagaccaacaggctacagtgtccctgattcttggaaaagcctggagaagctggggagatgcggttcacaatgcctcggtataggaggctgtgttgagctgacattcaaatggattctttaataataatgaaactggcgagt

SEQ ID NO: 144188 - DNA, 537 bp, Homo sapiens
  Payload ID: 8494
  Gene Symbol: IFFO2
  Gene Name: intermediate filament family orphan 2
  ENST ID: ENST00000355609
  CDS Start-End: 1-267
tgcaatccgaccatcgacctgcagggcgagctcgagctggccacagccaaaagtgacatgaaccgacacctgcacgagtacatggagatgtgcagcatgaagcgaggcctggacgtgcagatggagacctgccgccggctcatcaaaggctccgcagacaggaattcaccgtcccccagctccgtggccagcagcgactcaggaagtacagatgagatccaggatgagttcgagcgcgaggcggatgtggagcccatggtcagctgatgactgaggccctgcgagcctggtggtcttggtgatggggccctgccacctctcctcatggggccaggaaggcccctcggagtggggttcgaagccacaccacacagactttctctgccctcccttctctggaggccctgagggactgctgcttccttccttccttccacaccaccaacgggtgccccgtctccatcccccacccacccaaggaatggtgctgtcaatttctattgttctccacattacaaatgcagacttctgtgcgga

SEQ ID NO: 144189 - DNA, 6188 bp, Homo sapiens
  Payload ID: 8494
  Gene Symbol: IFFO2
  Gene Name: intermediate filament family orphan 2
  Uniprot ID: Q5TF58
  ENST ID: ENST00000455833
  CDS Start-End: 355-1908
cagaaggggcagtgccggccgagagtcctctgcgtgcggctgccgcggcccctccacagcgtctctgacagcccgggcggtgagacccgcgacccttctggccccgcgcagataccgcggcctccaccgcgtcccgaggagcggccgagtgccctctctcgcctcggcgcccgcatccggggccatccgtcctgccgtctctgcggaggccgcatctggcgcgcatctggaaccgcccggccggccgcgctggagcccgcgcccaccctggcccggccgcgccgggagccctgcccggagctggagccgcacctggagccgcgggcccggggccctgagccgcgcagccggcgcatggtgaactcgctgctgttcggggagatggccttggccttcggctgcccgccgggcggcggcggcgggggctgccctggcgggggcggcggcggcggcggggcagggccgggtccgtcgccggtgacggcggcgctgcgggacgacctgggctccaacatccacctcttgaaggggctcaacgtgcgcttccgctgcttcctggctaaggtgcacgagctggagcggcgcaaccggctgctggagaagcagctggagcagcagcagagcgagcgcgagcggcggctgcgctacaagaccttctcccgcgagcaggccgtgcagaccgggcccgagttgctgcggcccccggcgcccggcggcgggcacggcctcagcagtggcgcggcggccggcgccaacgccaatgccgtggccctgggcggcctgccccccggcggcggctcgcacccgcagcactacggccgcctgcccgggaccatctggagctacacgcaggtgcggcgcacgggcggcggcggcgtggagaccgtgcagggccccggcgtgtcgtgggtgcaccccgacggcgtgggcgtgcagatcgacaccatcacgccggagatccgcgcgctctacaacgtgctggccaaggtgaagcgcgagcgcgacgagtataagcggaggtgggaggaggagctcgccaagcgcatgaaccttcagaccatggtggacacgctgcaggaggcagcacaggaggctgatgccatccaggaggagatgaatgagaagatcgagcggctcaaggccgagctggtggtgtttaaggggcttatgagtgaccccatgacagacctggacacaaagatccaagaaaaggccatgaaggtggacatggacatctgccgccgaatcgatatcacggccaagctgtgcgatgtcgcacagcagcggaactcagaagacgtgtccaagatcttccaggtggtccccaaaaagaaagagcgtaaggtggcttccgatgatgacatctctgagcaggacggggaggtgaaccggttctcggacgatgaggtcggctccatgaacatcaccgatgagatgaagcgcatgtttaaccagctgcgggagacctttgactttgacgacgactgtgacagcctgacgtgggaagagaatgaagacacgctgctgctctgggaggatttcaccaactgcaatccgaccatcgacctgcagggcgagcaagaggaaaacttgggcaacttgatccatgagaccgaatccttcttcaagacgagagacaaggagtaccaggaaacgataggtcagatcgagctcgagctggccacagccaaaagtgacatgaaccgacacctgcacgagtacatggagatgtgcagcatgaagcgaggcctggacgtgcagatggagacctgccgccggctcatcaaaggctccgcagacaggaattcaccgtcccccagctccgtggccagcagcgactcaggaagtacagatgagatccaggatgagttcgagcgcgaggcggatgtggagcccatggtcagctgatgactgaggccctgcgagcctggtggtcttggtgatggggccctgccacctctcctcatggggccaggaaggcccctcggagtggggttcgaagccacaccacacagactttctctgccctcccttctctggaggccctgagggactgctgcttccttccttccttccacaccaccaacgggtgccccgtctccatcccccacccacccaaggaatggtgctgtcaatttctattgttctccacattacaaatgcagacttctgtgcggactttgcagtgttaactgtgccttctcccttaagctgagccactttgagctccaaagaattattcctagcaggtgtttttatacagaactctaagctgagggccgggccaaccggccgtggtgtaatgtggtttctgccgtccgtcccacctgctcctctgattggccatgggctatgccctcccttcctcctgagccagcccagactcggcctggagcttggggtgctctgccaacccccaggaaggagccgcttgcctctgtgagctttctaggcctgggtagggaccaccccaattttctcactccctgaaggagagaaaggtggaaggaagggaaggaggacacattttaattttttggggggatcgagtggcaaagttgaagggacaaggcactgtgaggggaaggcagagcctcactgtgtttaaactactatgcaaaaaacaaaacaaacaacaaaagcagcttgccttatatcattgtggaaggcaggacctctcctgggctcctggcttccccctggagctgggagagaggccggggttagggtgatctgtgtggcagcactgactgggtagtgtgggtttggccgaggttggtcatgaggctggggttcccgcaaggcactggcctccctgaccgcttgcttccttccggacctctgggttcagggcgggggcggagggatccttgatttccctgataacttgatgttcttccctccctcgccagccaacaatagaggcttagagatctgtaatttctctgtgagaaagtctgaaggggccaggcctggtctctgctcccttctacccgccttgggttaggactgtccggcagttgcctgcttttggctgctggcaggagagaagcagggtgggctgctggcagtgcaggagctggagtgagggccatcctctttctgctcctcgacacacgcaagccgctctcagcagttccctcgactggccagtcggggtattgatctgagccagcatcccccaagacttgaatggcttgagtgggactgcgttgaagggcactgtgtggcccccttccaaatctcagcttggagccagctgagcaggctttgctttattattattttttaagcctactgcagtgggtctgttgccaattttaattttttattgtcccaggagctccctctagtggtcaaggtagcaaaatgtgcccaaggactagaacttgggtccctctgccttgcctggaggcagaaggagggggctctgggtttgactgggattgtggtccccaggggtccgtggcctttaaggctcttctctcttttctgtttcccccacctgtgttacagtcttaaaaatactgtacataaaagatatatgtagagagagagagagagcgtgagaatgtgttagtgactatgtgtgatgtaatttatcacgatttggtggccttcgtcatgagttttttcctttgttttcttttgctgggggcacctcccacgggtcccctgtggcagtctggctgtgacacttccatagtcagcatctcttgttagccaaacagttccctttgacaggtacttggagggacaatggttttggaagagagacggcccttctctctcctcactcacccttgttctaaaggttacagggttcaaacatacctgattcttgttgttattgttgttgaatttttattttaaccaaaggttatcagagccagttgggcttggacctcagctgctaaaaagattttccgtttcctcgagggcaggaaaacatccaccctcgtgggtctcctccgtccagggccgagggaggcattggacaatgtggtatgggagtttcgtgggcagcgtggaagccggccctgggttgttccccaaggtggtgggagggtgacagatatatctttagacttaagactgtaaggcagcagtgttagcatgggagtaactaaggttactgtggttatcggtgtccggcggtattatttttactttcctccttgtatacataggtcatttgtctttgaggactagggtactctagggagtttgaaaactgcaggagccagaaagagatcctggcctgagagtcccttctggctggcttttaatatctgctctcctcttgggagtgaggacttggggcaggtgggtaggagagggaaagccagagtgtgatgggcctgcctcctgggctggttcctgggtccggcctgcctgcctgcctgcctgcctctccaccacatgcttttttcagttaatgtcagtgggccctgcttgtcccctcaccatgagcccacagcttgccaagaaagaccccaacgctcgctggggcagcaccagtcctagctgggacgaattggtccatcctttgtaaagctgtaaatacttaattttgactttctatttctaagcccagtgtcatattgacactggtattttagaattttctcagatgggctctcctgcgctgccctctgtctcctgtttttgggggttttatacaaacagaggattggggagggataggaagactagcatccttttggctccctggttggttgtgaaatacacacacacacacacacacacacacacacactcgcactcctctgagactccgaacagagaaaaaaattattggcaaatcaacacatttttctttctcgtcttgagaaaatgtcttgaggtccctgaagggccaaatccatcgtggactaactctgtgggtagagctcagatgacctagggagaattaaaccacttaagcttggagtgggaggagagggggtggggtgggggagaatataagatgtaacttaagctaaatgtaatctatttataaagcaagagactctcatctatttttatgaaaggaagggttttttaatctagggtaggcagttgtggtagcccagcattttcctgtggacgagacatggtgcatgttgttgctggattgaatggaacccattcctgtcccccggcctcgtcttctgtcctcacttttggtcatccacacccatgagcagcttcagcagagtgtaggtcccacttcaccccattctcctctcctctgacccctcagctccttggaagtcttggggtggggatctgagggggtgggtgggctgcaggaaattcagaaatgtggtgggtgggggaagggacaaggcgcattagggagggaacaagctgggctctggggataggctctgattaattagttactctgactctggtctgccgagatccatttccaacccagttgcgttgggagagggttgggaggcagcagagcatgggtgacagtgggagcacacgacttccttggagcctgggcctttgcgggtcccaggtggtcaggcagctggagcagaagtggaaatggcttaagatgctcatagcccagccccggctgtgtctactccaggccaagcctgggctgcagtccttgctatgttccccccagggccctggggggagggatcagggtgctgggggtttcctaggacaggggtcttcccccttgagacaccaagctctggctctagaagagctctctcctggagtggggagtctggaggggactgggtgggtgcaggtaaagccagattctctctggaagggaattttctatgaatggatgatttccaggctcagggtgggctgtgtgttagttctgagcaaatccctcaccaagacccttccctcccaagccctcaaagaaatgaggcaaagcccttccctgcaagaccccttgtggatgtttttgcatctacctgatttttagccccacccagggagactttataccccatgatcctgccccaccgttgctgttgtctgccagctgggtctagcatcacagggaagggggggatttatactcatggaaagactactgatcctaccggaaaccaacctgtttactgtactgttgtaaatatcatgccctttatatcctgtatattggcttcttttaaataaagtgaaatgtcttagaactg

SEQ ID NO: 144190 - DNA, 1000 bp, Homo sapiens
  Payload ID: 8494
  Gene Symbol: IFFO2
  Gene Name: intermediate filament family orphan 2
  ENST ID: ENST00000416166
  CDS Start-End: 1-779
tgaagcgcgagcgcgacgagtataagcggaggtgggaggaggagctcgccaagcgcatgaaccttcagaccatggtggacacgctgcaggaggcagcacaggaggctgatgccatccaggaggagatgaatgagaagatcgagcggctcaaggccgagctggtggtgtttaaggggcttatgagtgacgtggtccccaaaaagaaagagcgtaaggtggcttccgatgatgacatctctgagcaggacggggaggtgaaccggttctcggacgatgaggtcggctccatgaacatcaccgatgagatgaagcgcatgtttaaccagctgcgggagacctttgactttgacgacgactgtgacagcctgacgtgggaagagaatgaagacacgctgctgctctgggaggatttcaccaactgcaatccgaccatcgacctgcagggcgagcaagaggaaaacttgggcaacttgatccatgagaccgaatccttcttcaagacgagagacaaggagtaccaggaaacgataggtcagatcgagctcgagctggccacagccaaaagtgacatgaaccgacacctgcacgagtacatggagatgtgcagcatgaagcgaggcctggacgtgcagatggagacctgccgccggctcatcaaaggctccgcagacaggaattcaccgtcccccagctccgtggccagcagcgactcaggaagtacagatgagatccaggatgagttcgagcgcgaggcggatgtggagcccatggtcagctgatgactgaggccctgcgagcctggtggtcttggtgatggggccctgccacctctcctcatggggccaggaaggcccctcggagtggggttcgaagccacaccacacagactttctctgccctcccttctctggaggccctgagggactgctgcttccttccttccttccacaccaccaacgggtgccccgtctccatcccccacccacccaaggaatggtgc

SEQ ID NO: 144191 - DNA, 3231 bp, Homo sapiens
  Payload ID: 8495
  Gene Symbol: INA
  Gene Name: internexin neuronal intermediate filament protein, alpha
  Uniprot ID: Q16352
  ENST ID: ENST00000369849
  CDS Start-End: 50-1549
cttctgtagctcgcgttgaagccgcacgtccggccccgatcccggcaccatgagcttcggctcggagcactacctgtgctcctcctcctcctaccgcaaggtgttcggggatggctctcgcctgtccgcccgcctctctggggccggcggcgcgggcggcttccgctcgcagtcgctgtcccgcagcaatgtggcctcctcggccgcctgctcctcggcctcgtcgctcggcctcggcctggcctatcgccggccgccggcgtccgacgggctggacctgagccaggcggcggcgcgcaccaacgagtacaagatcatccgcaccaacgagaaggagcagctgcagggcctcaacgaccgcttcgccgtgttcatcgagaaggtgcatcagctggagacgcagaaccgcgcgttggaggccgagctggccgcgctgcgacagcgccacgctgagccgtcgcgcgtcggcgagctcttccagcgcgagctgcgcgacctgcgcgcgcagctggaggaggccagctcggctcgctcgcaggccctgctggagcgcgacgggctggcggaggaggtgcagcggctgcgggcgcgctgcgaggaggagagccgcggacgcgaaggcgccgagcgcgccctgaaggcgcagcagcgcgacgtggacggcgccacgctggcccgcctggacctggagaagaaggtggagtcgctgctggacgagctggccttcgtacgccaggtgcacgacgaggaggtagccgagctgctggccacgctgcaggcgtcgtcgcaggccgcggccgaggtggacgtgactgtggctaaaccagacctgacctcggctctgagggagatccgcgcccagtatgagtccctggccgctaagaacctgcagtccgcggaagaatggtacaagtccaagtttgccaacctgaacgagcaggcggcgcgcagcaccgaggccatccgggccagccgcgaggagatccacgagtatcggcgccagctgcaggcgcgcaccatcgagatcgagggcctgcgcggggccaacgagtccttggagaggcagatcctggagctggaggagcggcacagtgccgaggtagctggctaccaggatagcattgggcagctggagaatgatctgaggaacaccaagagtgagatggcacgccaccttcgggaataccaggacttgctcaatgtcaaaatggctcttgacattgagatagcagcttacaggaaactgctggaaggcgaggagacacgttttagcaccagtgggttaagcatttcggggctgaatccacttcccaatccaagttacctgctcccacctagaatcctcagtgctacaacctccaaagtctcatccactgggctatcacttaagaaagaggaggaggaggaggaggcatctaaggtagcctctaagaaaacctcccagataggggaaagttttgaagaaatattagaggagacagtaatatctactaagaaaaccgagaaatcaaatatagaagaaaccaccatttcaagccaaaaaatataattccattgctttgaaaaagttaatgcttaagagggaatgatatgcatttgacttgttaaacagcctattcctgaactataacacctgccaccactataaaatgtcttcaaggcttcagtctcatatttagtattgaatacttacattctctaataagaaaaccaccccttagattgaagtaaactgcagtcctggagcaatcacagatgagttatctaagaatacagctttctgaccttcagctcacgcttcacagtgatcgatgattcaggtgcagaggaagtacaaactaaggtgctaaatctgcgatcatcgtcatttgctgtgaactgaaattaaaactattcatgctacccagccattacccagctaaataatcttactctagatacctaaaacataagatcactgccagagataaactaatggtccacacccaattccactctgatagaattatttcacaaataataggtgtttgtttaatggacacttttcacctccttcaattccatatatccttttcttctatgtaggaaaaaaatagtctagtgtagtattcttcccttttaaacacattttggttcttctcaaaagaacttacccccattcgcgctctgctcagtgggtaaaattagatgcatgttgaccatgtctatgattcgtgtaattacttatccctgcccatttcatattctttcaattctgtaggttaaaaaaatggcagtgatgaattttaagggtttcccccaacatataaaataatgcaaagaatccctagactttaggctttcagcttacacaaatctatttaattaggaaaaaaactattaaggatgtagcttttcacctttactttagaagcacagtaaatatcccaaactgtgatgaagccgaccttagatttagtagtgtaagctagaagaagtgagtgtttctatgagtggaaaaagccaaggtgtcatttatgtgtcagttcatttgtggtgatatagaattagctttttcatccccttacccttagaatccacgtattccccttcccactagcctaggtcataaagaggcgttgctttcactctcctatgccttttacgagtgctaagtgtaggatattttgtcaccagaacacaatgctaccgccccaaagtaaaagaaaccacttctggtcaatcaacactaccagcgtatatataagaaagacatctttctcttttctaaaagacttccctaacacttaccccatggctgcacagttggtggggtcctgccggagaggaagagacactcagaccagagaaggggtgtgcatgcgcctactcgcttgctagaagtagattctggacagtcagctcttcatctgcccaactgtgtagcatctgcattgcccagtctttcatgtgtgccaaggctgatgcaggatttgttctctgtccagcagtcacttcggccagagctgaagagttgccccgtctctgttccatgtctcctttaagagctctggtgataaggacatgatgcttttactgaactttcttatcctagcacatgcttcaatagttcaaggaacttgaaaaatacttttccttacctttaccccatccctgtctttactcctcacacttactgtaagacattagtaacataataaattaaaagtcacacgaatctcaccaacataa

SEQ ID NO: 144192 - DNA, 3209 bp, Homo sapiens
  Payload ID: 8495
  Gene Symbol: INA
  Gene Name: internexin neuronal intermediate filament protein, alpha
  ENST ID: ENST00000616853
  CDS Start-End: 46-1536
tgtagctcgcgttgaagccgcacgtccggccccgatcccggcaccatgagcttcggctcggagcactacctgtgctcctcctcctcctaccgcaaggtgttcggggatggctctcgcctgtccgcccgcctctctggggccggcggcgcgggcgcttccgctcagtcgctgtcccgcagcaatgtggcctcctcggccgcctgctcctcggcctcgtcgctcggcctcggcctggcctatcgccggccgccggcgtccgacgggctggacctgagccaggcggcggcgcgcaccaacgagtacaagatcatccgcaccaacgagaaggagcagctgcagggcctcaacgaccgcttcgccgtgttcatcgagaaggtgcatcagctggagacgcagaaccgcgcgttggaggccgagctggcccgctgcgacagccacgctgagccgtcgcgcgtcggcgagctcttccagcgcgagctgcgcgacctgcgcgcgcagctggaggaggccagctcggctcgctcgcaggccctgctggagcgcgacgggctggcggaggaggtgcagcggctgcgggcgcgctgcgaggaggagagccgcggacgcgaacgccgagcgcgcctgaaggcgcagcagcgcgacgtggacggcgccacgctggcccgcctggacctggagaagaaggtggagtcgctgctggacgagctggccttcgtacgccaggtgcacgacgaggaggtagccgagctgctggccacgctgcaggcgtcgtcgcaggccgcggccgaggtggacgtgactgtggctaaaccagacctgacctcggctctgagggagatccgcgcccagtatgagtccctggccgctaagaacctgcagtccgcggaagaatggtacaagtccaagtttgccaacctgaacgagcaggcggcgcgcagcaccgaggccatccgggccagccgcgaggagatccacgagtatcggcgccagctgcaggcgcgcaccatcgagatcgagggcctgcgcggggccaacgagtccttggagaggcagatcctggagctggaggagcggcacagtgccgaggtagctggctaccaggatagcattgggcagctggagaatgatctgaggaacaccaagagtgagatggcacgccaccttcgggaataccaggacttgctcaatgtcaaaatggctcttgacattgagatagcagcttacaggaaactgctggaaggcgaggagacacgttttagcaccagtgggttaagcatttcggggctgaatccacttcccaatccaagttacctgctcccacctagaatcctcagtgctacaacctccaaagtctcatccactgggctatcacttaagaaagaggaggaggaggaggaggcatctaaggtagcctctaagaaaacctcccagataggggaaagttttgaagaaatattagaggagacagtaatatctactaagaaaaccgagaaatcaaatatagaagaaaccaccatttcaagccaaaaaatataattccattgctttgaaaaagttaatgcttaagagggaatgatatgcatttgacttgttaaacagcctattcctgaactataacacctgccaccactataaaatgtcttcaaggcttcagtctcatatttagtattgaatacttacattctctaataagaaaaccaccccttagattgaagtaaactgcagtcctggagcaatcacagatgagttatctaagaatacagctttctgaccttcagctcacgcttcacagtgatcgatgattcaggtgcagaggaagtacaaactaaggtgctaaatctgcgatcatcgtcatttgctgtgaactgaaattaaaactattcatgctacccagccattacccagctaaataatcttactctagatacctaaaacataagatcactgccagagataaactaatggtccacacccaattccactctgatagaattatttcacaaataataggtgtttgtttaatggacacttttcacctccttcaattccatatatccttttcttctatgtaggaaaaaaatagtctagtgtagtattcttcccttttaaacacattttggttcttctcaaaagaacttacccccattcgcgctctgctcagtgggtaaaattagatgcatgttgaccatgtctatgattcgtgtaattacttatccctgcccatttcatattctttcaattctgtaggttaaaaaaatggcagtgatgaattttaagggtttcccccaacatataaaataatgcaaagaatccctagactttaggctttcagcttacacaaatctatttaattaggaaaaaaactattaaggatgtagcttttcacctttactttagaagcacagtaaatatcccaaactgtgatgaagccgaccttagatttagtagtgtaagctagaagaagtgagtgtttctatgagtggaaaaagccaaggtgtcatttatgtgtcagttcatttgtggtgatatagaattagctttttcatccccttacccttagaatccacgtattccccttcccactagcctaggtcataaagaggcgttgctttcactctcctatgccttttacgagtgctaagtgtaggatattttgtcaccagaacacaatgctaccgccccaaagtaaaagaaaccacttctggtcaatcaacactaccagcgtatatataagaaagacatctttctcttttctaaaagacttccctaacacttaccccatggctgcacagttggtggggtcctgccggagaggaagagacactcagaccagagaaggggtgtgcatgcgcctactcgcttgctagaagtagattctggacagtcagctcttcatctgcccaactgtgtagcatctgcattgcccagtctttcatgtgtgccaaggctgatgcaggatttgttctctgtccagcagtcacttcggccagagctgaagagttgccccgtctctgttccatgtctcctttaagagctctggtgataaggacatgatgcttttactgaactttcttatcctagcacatgcttcaatagttcaaggaacttgaaaaatacttttccttacctttaccccatccctgtctttactcctcacacttactgtaagacattagtaacataataaattaaaagtcacacgaatctca

SEQ ID NO: 144193 - DNA, 3558 bp, Homo sapiens
  Payload ID: 8496
  Gene Symbol: IMPG1
  Gene Name: interphotoreceptor matrix proteoglycan 1
  Uniprot ID: Q17R60
  ENST ID: ENST00000369950
  CDS Start-End: 191-2584
agattattccagaaacagacactgctacatgttcttcataaattaacaccctcataaaggtaaaccaagaaggttatcctcaatcatctggtatcaatatataattatttttcacatttctgttactttttaatgagatttgaggttgttctgtgattgttatcagaattaccaatgcacaaaagccagaatgtatttggaaactagaagagctatttttgttttttggatttttctccaagttcaaggaaccaaagatatctccattaacatataccattctgaaactaaagacatagacaatcccccaagaaatgaaacaactgaaagtactgaaaaaatgtacaaaatgtcaactatgagacgaatattcgatttggcaaagcatcgaacaaaaagatccgcatttttcccaacgggggttaaagtctgtccacaggaatccatgaaacagattttagacagtcttcaagcttattatagattgagagtgtgtcaggaagcagtatgggaagcatatcggatctttctggatcgcatccctgacacaggggaatatcaggactgggtcagcatctgccagcaggagaccttctgcctctttgacattggaaaaaacttcagcaattcccaggagcacctggatcttctccagcagagaataaaacagagaagtttccctgacagaaaagatgaaatatctgcagagaagacattgggagagcctggtgaaaccattgtcatttcaacagatgttgccaacgtctcacttgggcctttccctctcactcctgatgacaccctcctcaatgaaattctcgataatacactcaacgacaccaagatgcctacaacagaaagagaaacagaattcgctgtgttggaggagcagagggtggagctcagcgtctctctggtaaaccagaagttcaaggcagagctcgctgactcccagtccccatattaccaggagctagcaggaaagtcccaacttcagatgcaaaagatatttaagaaacttccaggattcaaaaaaatccatgtgttaggatttagaccaaagaaagaaaaagatggctcaagctccacagagatgcaacttacggccatctttaagagacacagtgcagaagcaaaaagccctgcaagtgacctcctgtcttttgattccaacaaaattgaaagtgaggaagtctatcatggaaccatggaggaggacaagcaaccagaaatctatctcacagctacagacctcaaaaggctgatcagcaaagcactagaggaagaacaatctttggatgtggggacaattcagttcactgatgaaattgctggatcactgccagcctttggtcctgacacccaatcagagctgcccacatcttttgctgttataacagaggatgctactttgagtccagaacttcctcctgttgaaccccagcttgagacagtggacggagcagagcatggtctacctgacacttcttggtctccacctgctatggcctctacctccctgtcagaagctccacctttctttatggcatcaagcatcttctctctgactgatcaaggcaccacagatacaatggccactgaccagacaatgctagtaccagggctcaccatccccaccagtgattattctgcaatcagccaactggctctgggaatttcacatccacctgcatcttcagatgacagccgatcaagtgcaggtggcgaagatatggtcagacacctagatgaaatggatctgtctgacactcctgccccatctgaggtaccagagctcagcgaatatgtttctgtcccagatcatttcttggaggataccactcctgtctcagctttacagtatatcaccactagttctatgaccattgcccccaagggccgagagctggtagtgttcttcagtctgcgtgttgctaacatggccttctccaacgacctgttcaacaagagctctctggagtaccgagctctggagcaacaattcacacagctgctggttccatatctacgatccaatcttacaggatttaagcaacttgaaatacttaacttcagaaacgggagtgtgattgtgaatagcaaaatgaagtttgctaagtcagtgccgtataacctcaccaaggctgtgcacggggtcttggaggattttcgttctgctgcagcccaacaactccatctggaaatagacagctactctctcaacattgaaccagctgatcaagcagatccctgcaagttcctggcctgcggcgaatttgcccaatgtgtaaagaacgaacggactgaggaagcggagtgtcgctgcaaaccaggatatgacagccaggggagcctggacggtctggaaccaggcctctgtggccctggcacaaaggaatgcgaggtcctccagggaaagggagctccatgcaggttgccagatcactctgaaaatcaagcatacaaaactagtgttaaaaagttccaaaatcaacaaaataacaaggtaatcagtaaaagaaattctgaattactgaccgtagaatatgaagaatttaaccatcaagattgggaaggaaattaaaaactgaaaatgtacaattatcatttaggctatctcaagagagatgatttgccttctcaaggaaaatggagacaggcatattcatgggtcatcaaaatccagacatacagtcaacactgagaatcagcacacaccatatttcaaatatagaagagtcatgtacttggcaaccagtaaattctgaagaaaaagacacttacttattattaaaaccccaaatgcaatcagcgaaacatatttttactattcttggatgatagtcaaaatgatcataagccaggtttgcttccaccttccctgaaaattttactcacagatcatttgcaacaagcatagcttacttattgtttagggactgaacaatttattgggaagcaaactctttatatgctagaaagtacatttaaaagatgactacttacgcagggagatgcaggtctctctaaacgcatgaatgtatgtagtgtgtaggcactgtagtgagtgtatatatgctccacactacgtctgataaacacaaacctcagtattcagttattaggcacactagttttatacgcaactactgcttacatagtagactgttttgttgccaataatctttgaattgttctttaaaagaaactgaggttcagatacacataccatggaaaaatcttacttttcttgttactacacaaagctattttaaagaagatgctatgttgggagaagggcgaagttgtactatatgacataatcaattcctgtcttccaccacagatgaacaatgtcttcctataataacttcagaatatttcctcacaccaactttagtgtgtgtatacctagactggcatcaatgtaatccaattcagtccattttttatgtgctgcttaatgaaaatgaatctgtctctatctctttcaaatgttctaatatcagatatatttgctacaaaccttaatttcaataaagtaaaagtgatatactc

SEQ ID NO: 144194 - DNA, 835 bp, Homo sapiens
  Payload ID: 8496
  Gene Symbol: IMPG1
  Gene Name: interphotoreceptor matrix proteoglycan 1
  ENST ID: ENST00000369952
  CDS Start-End: 1-477
gagagacccaacgggacctcagcccagccagcccaggtgaagcctgaattttataggcaagctgagctgaaaccttgcccttggacaggatccaatcaaaggagatgtatcactttctgtccaacacctgatcaagcagatccctgcaagttcctggcctgcggcgaatttgcccaatgtgtaaagaacgaacggactgaggaagcggagtgtcgctgcaaaccaggatatgacagccaggggagcctggacggtctggaaccaggcctctgtggccctggcacaaaggaatgcgaggtcctccagggaaagggagctccatgcaggttgccagatcactctgaaaatcaagcatacaaaactagtgttaaaaagttccaaaatcaacaaaataacaaggtaatcagtaaaagaaattctgaattactgaccgtagaatatgaagaatttaaccatcaagattgggaaggaaattaaaaactgaaaatgtacaattatcatttaggctatctcaagagagatgatttgccttctcaaggaaaatggagacaggcatattcatgggtcatcaaaatccagacatacagtcaacactgagaatcagcacacaccatatttcaaatatagaagagtcatgtacttggcaaccagtaaattctgaagaaaaagacacttacttattattaaaaccccaaatgcaatcagcgaaacatatttttactattcttggatgatagtcaaaatgatcataagccaggtttgcttccaccttccctgaaaattttactcacagatcatttgcaacaagcatagcttacttattgtttagggactg

SEQ ID NO: 144195 - DNA, 868 bp, Homo sapiens
  Payload ID: 8496
  Gene Symbol: IMPG1
  Gene Name: interphotoreceptor matrix proteoglycan 1
  ENST ID: ENST00000369963
  CDS Start-End: 446-868
agattattccagaaacagacactgctacatgttcttcataaattaacaccctcataaaggtaaaccaagaaggttatcctcaatcatctggtatcaatatataattatttttcacatttctgttactttttaatgagatttgaggttgttctgtgattgttatcagaattaccaatgcacaaaagccagaatgtatttggaaactagaagagctatttttgttttttggatttttctccaagttcaaggaaccaaagatatctccattaacatataccattctgaaactaaagacatagacaatcccccaagaaatgaaacaactgaaagtactgaaaaaatgtacaaaatgtcaactatgagacgaatattcgatttggcaaagcatcgaacaaaaagatccgcatttttcccaacgggggttaaagtctgtccacaggaatccatgaaacagattttagacagtcttcaagcttattatagattgagagtgtgtcaggaagcagtatgggaagcatatcggatctttctggatcgcatccctgacacaggggaatatcaggactgggtcagcatctgccagcaggagaccttctgcctctttgacattggaaaaaacttcagcaattcccaggagcacctggatcttctccagcagagaataaaacagagaagtttccctgacagaaaagatgaaatatctgcagagaagacattgggagagcctggtgaaaccattgtcatttcaacagaaaagaataaaggtaaaaccaaaccattcaatatcttacagtttggaaacaaccatcatgaacatttactgcctattttctgccttctttcttctattatatacacatattactga

SEQ ID NO: 144196 - DNA, 3324 bp, Homo sapiens
  Payload ID: 8496
  Gene Symbol: IMPG1
  Gene Name: interphotoreceptor matrix proteoglycan 1
  ENST ID: ENST00000611179
  CDS Start-End: 191-2350
agattattccagaaacagacactgctacatgttcttcataaattaacaccctcataaaggtaaaccaagaaggttatcctcaatcatctggtatcaatatataattatttttcacatttctgttactttttaatgagatttgaggttgttctgtgattgttatcagaattaccaatgcacaaaagccagaatgtatttggaaactagaagagctatttttgttttttggatttttctccaagttcaaggaaccaaagtgtgtcaggaagcagtatgggaagcatatcggatctttctggatcgcatccctgacacaggggaatatcaggactgggtcagcatctgccagcaggagaccttctgcctctttgacattggaaaaaacttcagcaattcccaggagcacctggatcttctccagcagagaataaaacagagaagtttccctgacagaaaagatgaaatatctgcagagaagacattgggagagcctggtgaaaccattgtcatttcaacagatgttgccaacgtctcacttgggcctttccctctcactcctgatgacaccctcctcaatgaaattctcgataatacactcaacgacaccaagatgcctacaacagaaagagaaacagaattcgctgtgttggaggagcagagggtggagctcagcgtctctctggtaaaccagaagttcaaggcagagctcgctgactcccagtccccatattaccaggagctagcaggaaagtcccaacttcagatgcaaaagatatttaagaaacttccaggattcaaaaaaatccatgtgttaggatttagaccaaagaaagaaaaagatggctcaagctccacagagatgcaacttacggccatctttaagagacacagtgcagaagcaaaaagccctgcaagtgacctcctgtcttttgattccaacaaaattgaaagtgaggaagtctatcatggaaccatggaggaggacaagcaaccagaaatctatctcacagctacagacctcaaaaggctgatcagcaaagcactagaggaagaacaatctttggatgtggggacaattcagttcactgatgaaattgctggatcactgccagcctttggtcctgacacccaatcagagctgcccacatcttttgctgttataacagaggatgctactttgagtccagaacttcctcctgttgaaccccagcttgagacagtggacggagcagagcatggtctacctgacacttcttggtctccacctgctatggcctctacctccctgtcagaagctccacctttctttatggcatcaagcatcttctctctgactgatcaaggcaccacagatacaatggccactgaccagacaatgctagtaccagggctcaccatccccaccagtgattattctgcaatcagccaactggctctgggaatttcacatccacctgcatcttcagatgacagccgatcaagtgcaggtggcgaagatatggtcagacacctagatgaaatggatctgtctgacactcctgccccatctgaggtaccagagctcagcgaatatgtttctgtcccagatcatttcttggaggataccactcctgtctcagctttacagtatatcaccactagttctatgaccattgcccccaagggccgagagctggtagtgttcttcagtctgcgtgttgctaacatggccttctccaacgacctgttcaacaagagctctctggagtaccgagctctggagcaacaattcacacagctgctggttccatatctacgatccaatcttacaggatttaagcaacttgaaatacttaacttcagaaacgggagtgtgattgtgaatagcaaaatgaagtttgctaagtcagtgccgtataacctcaccaaggctgtgcacggggtcttggaggattttcgttctgctgcagcccaacaactccatctggaaatagacagctactctctcaacattgaaccagctgatcaagcagatccctgcaagttcctggcctgcggcgaatttgcccaatgtgtaaagaacgaacggactgaggaagcggagtgtcgctgcaaaccaggatatgacagccaggggagcctggacggtctggaaccaggcctctgtggccctggcacaaaggaatgcgaggtcctccagggaaagggagctccatgcaggttgccagatcactctgaaaatcaagcatacaaaactagtgttaaaaagttccaaaatcaacaaaataacaaggtaatcagtaaaagaaattctgaattactgaccgtagaatatgaagaatttaaccatcaagattgggaaggaaattaaaaactgaaaatgtacaattatcatttaggctatctcaagagagatgatttgccttctcaaggaaaatggagacaggcatattcatgggtcatcaaaatccagacatacagtcaacactgagaatcagcacacaccatatttcaaatatagaagagtcatgtacttggcaaccagtaaattctgaagaaaaagacacttacttattattaaaaccccaaatgcaatcagcgaaacatatttttactattcttggatgatagtcaaaatgatcataagccaggtttgcttccaccttccctgaaaattttactcacagatcatttgcaacaagcatagcttacttattgtttagggactgaacaatttattgggaagcaaactctttatatgctagaaagtacatttaaaagatgactacttacgcagggagatgcaggtctctctaaacgcatgaatgtatgtagtgtgtaggcactgtagtgagtgtatatatgctccacactacgtctgataaacacaaacctcagtattcagttattaggcacactagttttatacgcaactactgcttacatagtagactgttttgttgccaataatctttgaattgttctttaaaagaaactgaggttcagatacacataccatggaaaaatcttacttttcttgttactacacaaagctattttaaagaagatgctatgttgggagaagggcgaagttgtactatatgacataatcaattcctgtcttccaccacagatgaacaatgtcttcctataataacttcagaatatttcctcacaccaactttagtgtgtgtatacctagactggcatcaatgtaatccaattcagtccattttttatgtgctgcttaatgaaaatgaatctgtctctatctctttcaaatgttctaatatcagatatatttgctacaaaccttaatttcaataaagtaaaagtgatatactc

SEQ ID NO: 144197 - DNA, 8337 bp, Homo sapiens
  Payload ID: 8497
  Gene Symbol: IMPG2
  Gene Name: interphotoreceptor matrix proteoglycan 2
  Uniprot ID: Q9BZV3
  ENST ID: ENST00000193391
  CDS Start-End: 189-3914
gctactttgaaaggacaaccatttttctttccgctaatttataatggttttgaagtggttgttcattctcaaacatagacttttaaatgttaggtctttcctataactctttgttattggaagtttcaaggatttggacactcaattaaggattctgtcctctcctcattcctttggttttggcccaaatgattatgtttcctctttttgggaagatttctctgggtattttgatatttgtcctgatagaaggagactttccatcattaacagcacaaacctacttatctatagaggagatccaagaacccaagagtgcagtttcttttctcctgcctgaagaatcaacagacctttctctagctaccaaaaagaaacagcctctggaccgcagagaaactgaaagacagtggttaatcagaaggcggagatctattctgtttcctaatggagtgaaaatctgcccagatgaaagtgttgcagaggctgtggcaaatcatgtgaagtattttaaagtccgagtgtgtcaggaagctgtctgggaagccttcaggactttttgggatcgacttcctgggcgtgaggaatatcattactggatgaatttgtgtgaggatggagtcacaagtatatttgaaatgggcacaaattttagtgaatctgtggaacatagaagcttaatcatgaagaaactgacttatgcaaaggaaactgtaagcagctctgaactgtcttctccagttcctgttggtgatacttcaacattgggagacactactctcagtgttccacatccagaggtggacgcctatgaaggtgcctcagagagcagcttggaaaggccagaggagagtattagcaatgaaattgagaatgtgatagaagaagccacaaaaccagcaggtgaacagattgcagaattcagtatccaccttttggggaagcagtacagggaagaactacaggattcctccagctttcaccaccagcaccttgaagaagaatttatttcagaggttgaaaatgcatttactgggttaccaggctacaaggaaattcgtgtacttgaatttaggtcccccaaggaaaatgacagtggcgtagatgtttactatgcagttaccttcaatggtgaggccatcagcaataccacctgggacctcattagccttcactccaacaaggtggaaaaccatggccttgtggaactggatgataaacccactgttgtttatacaatcagtaacttcagagattatattgctgagacattgcagcagaattttttgctggggaactcttccttgaatccagatcctgattccctgcagcttatcaatgtgagaggagttttgcgtcaccaaactgaagatctagtttggaacacccaaagttcaagtcttcaggcaacgccgtcatctattctggataatacctttcaagctgcatggccctcagcagatgaatccatcaccagcagtattccaccacttgatttcagctctggtcctccctcagccactggcagggaactctggtcagaaagtcctttgggtgatttagtgtctacacacaaattagcctttccctcgaagatgggcctcagctcttccccagaggttttagaggttagcagcttgactcttcattctgtcaccccggcagtgcttcagactggcttgcctgtggcttctgaggaaaggacttctggatctcacttggtagaagatggattagccaatgttgaagagtcagaagattttctttctattgattcattgccttcaagttcattcactcaacctgtgccaaaagaaacaataccatccatggaagactctgatgtgtccttaacatcttcaccatatctgacctcttctataccttttggcttggactccttgacctccaaagtcaaagaccaattaaaagtgagccctttcctgccagatgcatccatggaaaaagagttaatatttgacggtggtttaggttcagggtctgggcaaaaggtagatctgattacttggccatggagtgagacttcatcagagaagagcgctgaaccactgtccaagccgtggcttgaagatgatgattcacttttgccagctgagattgaagacaagaaactagttttagttgacaaaatggattccacagaccaaattagtaagcactcaaaatatgaacatgatgacagatccacacactttccagaggaagagcctcttagtgggcctgctgtgcccatcttcgcagatactgcagctgaatctgcgtctctaaccctccccaagcacatatcagaagtacctggtgttgatgattactcagttaccaaagcacctcttatactgacatctgtagcaatctctgcctctactgataaatcagatcaggcagatgccatcctaagggaggatatggaacaaattactgagtcatccaactatgaatggtttgacagtgaggtttcaatggtaaagccagatatgcaaactttgtggactatattgccagaatcagagagagtttggacaagaacttcttccctagagaaattgtccagagacatattggcaagtacaccacagagtgctgacaggctctggttatctgtgacacagtctaccaaattgcctccaaccacaatctccaccctgctagaggatgaagtaattatgggtgtacaggatatttcgttagaactggaccggataggcacagattactatcagcctgagcaagtccaagagcaaaatggcaaggttggtagttatgtggaaatgtcaacaagtgttcactccacagagatggttagtgtggcttggcccacagaaggaggagatgacttgagttatacccagacttcaggagctttggtggttttcttcagcctccgagtgactaacatgatgttttcagaagatctgtttaataaaaactccttggagtataaagccctggagcaaagattcttagaattgctggttccctatctccagtcaaatctcacggggttccagaacttagaaatcctcaacttcagaaatggcagcattgtggtgaacagtcgaatgaagtttgccaattctgtccctcctaacgtcaacaatgcggtgtacatgattctggaagacttttgtaccactgcctacaataccatgaacttggctattgataaatactctcttgatgtggaatcaggtgatgaagccaacccttgcaagtttcaggcctgtaatgaattttcagagtgtctggtcaacccctggagtggagaagcaaagtgcagatgcttccctggatacctgagtgtggaagaacggccctgtcagagtctctgtgacctacagcctgacttctgcttgaatgatggaaagtgtgacattatgcctgggcacggggccatttgtaggtgccgggtgggtgagaactggtggtaccgaggcaagcactgtgaggaatttgtgtctgagcccgtgatcataggcatcactattgcctccgtggttggacttcttgtcatcttttctgctatcatctacttcttcatcaggactctccaagcacaccatgacaggagtgaaagagagagtcccttcagtggctccagcaggcagcctgacagcctctcatctattgagaatgctgtgaagtacaaccccgtgtatgaaagtcacagggctggatgtgagaagtatgagggaccctatcctcagcatcccttctacagctctgctagcggagacgtgattggtgggctgagcagagaagaaatcagacagatgtatgagagcagtgagctttccagagaggaaattcaagagagaatgagagttttggaactgtatgccaatgatcctgagtttgcagcttttgtgagagagcaacaagtggaagaggtttaaccaaaactcctgttctgaaactgattagaagcctggagaagatggagattacttgttacttatgtcatataattaacctggattttaaacactgttggaagaagagttttctatgaaaaaattaaatatagggcacactgtttttttttcagcttaagttttcagaatgtagtaagagatgttaccatttttatttctataaagactgaatgctgtgtttaaataaattgaaaactacgtaaactctggaaagtattctataagaaaaagctggacctaggatttagggctgcagttgctgtctgcttctgaatcactgggggtgtctcctaagaactgtgcctcgggtttttcaataggaaaataaggtgagactcttccatggagaagtctggcttagtaagggaatattttggagcatatttgttattgttgggtagaaggggaaacctttgaaatagtcttaatggatagtttataatcaggcattcatctaaataaaattctttcttttttttgatcaaactgctaaagaaaaagcaaacttttttgctgcaggatagaattcgggttgtatttttatgcttctatcagtgtcttgcatttcctgagcatattaatcaagaccatgttattgttatgttaactatgttaatatcctttttttcttagttttcaggatgaatgcatatatatatatatatatatatatatatatatatatatatatatatatatatataaagtttagaagattcccattaatctaaagacaaatttaatcacatgggcagggagggagtgagtgtcgggtcaagaccccagtgctgagaatatattttgtttcttgattgctggactgaggttccctgattgcttctgaaatctaaagatgtcttgggcaaatcctgtctctcctctagttcctggtgtattaatttggaaaacagcacttaactacctcacataatatagatgagctcattttcattgcttctcctttgtgtaatacctcctgtctaaattaactcctgcttatacaaaacagggcaaagcttttattacaattaaaatattttaaaaactgaacagataggaagtccataccttatataaattttgacagaaaatggaaattttcctctttccccctagtgttttttttgaatgggttgctttggagggggagaggaggaggccaaatcatcatcatcatgatattaaattgcatatgcaataggttattattaatgcagatactttatgctagatgtcttcatgcttgccaaaaccaattctgaacattttgatttatttctgaccagatataaataaccagtataaactgaccataagataaaatacttggttcacttttttttttctcaacttgatgactgccaattctgctcattatgaggacaccggaaactaaatatctgggctcagtgcatgccacagtaaagctagtgaaagccttgaagatggccaggtattttgcaaagtatgtatggataacaggttgtgtgtgtgtatgtgtgaatgtgtgtgtgcgtgtatgtgtgtgtgcgtgtgcgcgctaatgcgcatgtgcgcccgcgccaaggtggctcccttatcctagcatttcctttcattccctactcacataatggatcctctaacagttcagtataggtacactttccactattttattgacatgttctagtcttaatattggataattagacactttccactgggcccatttgaaaagtaattgataattacctttaagacattttaagtgttaatgatatttgtcactactaagtgcttagttttatttataaaactttcaaagttttctgtttaagactgtaaactgttttcctatactacgtgttagatgaaagtgtattttatcacaaattaaccttagaatgcaactctttgaatgtgtgcttgctggaagaattccagatggacacaaatccctctagggcaggtcaccatgcagaacacttaggagaagcacgaactgagccagaggagggttgttgttttccacaaactaagcagtgaagtgggaatttgggaattctgacacacgtcaccatctctgatttccttttgcgtgaccttttcatgcaagagcaaaacacttagctcttcatgaatgtctgctccacaccaatgaaatggaagagtaaaggagcccctcaactatcagggaaagaacaggaggcctcagttgaggaatacaacttttgtcctgcctttgctatagctgaaccactgttgaaaggttgaagaacacagtttgcccagcaaagatccatccactcatgtacaaagcaaagcactaaaggagctattagtttgatggaaaaaactacccctaaagagcttctttctaaaagaccttcctcgaaggtgatttaatggcatgtcatcatttaaaagtcttaggctgaactgtcatttacactgcacaattgaggaatgaaattttctgagtattagaacgttcttcttaacctagcaatataatattcaacaagactatcaccttatgtgaaaatactaaaatgcagttagcaataaaatgcatggtaaataaccattttaaaaatgttattataaaaggttgtaagatactgtggtgttttacagatgtagcctttataattgaattatatacactatccttttttatgggttatggataaaggggaatttatttgataaatagggctccattttcaccattgcaatggtttaagggtgtttgttcacgtttatgtggcctgaagtcccatttttatcactattattatttgagatggagtctcgctctgtcacccaggctggagtgcaatggggcgatctcagctcctggcaacctctgcctcctgggttcaagcgattctcgtgcttcagcttcctgagtagctggggttacagacacccaccaccatgcccagctaatttttatatttttagtagagatggggtttcaccgtcaccatgttggccagcctggtctcaaactcctgacctcaggtgatccacctgccttggcctcccaaagtgctgggattacaggcatgagccaccgcacctggccccatttaatttatataataaaacaagtgcaggctttacctgattttattctcaccttctgttttcttcttctgcattatctgtcaccatgggttggctcctccccactttctcttttttattcttttctctcttttttgccacactaaattgtaatgtgtttgaacaactctgacttaatattacctctaacaaaaagctggaaactgcacaaatattctttgtaggctctaaaagtaggttggctgaagtatgatacctgaactaattattcatttgtatgcttgttttataagtttgacttccatttcatgatttttttggtagctttatgttatttctgttttcagcaatgggtactttgacatctttctgtctctgaattgaattttcattttgcaacggaagagaagacaacatatttattccataatgaaagagctaatgaagtagaataactattaaattgagatgttttagcaaaaaaacaaaaacacaaaccccaaacgggttgttttgttttatttttttctaaaacatttctaacaattcccagtaggaatgggtggggccagccttcctcatttacaatccagctgcagtgagtcaagatcctagcttattctcccaattgtgtaataaatgcagaaaaatgatgtgacggtcactattctcaaatccattgcattgtattccacaaaggatatcctggcggaaggtggaaatatgggagggtaccatgatgtaaagaattgcctggaaatttccttgagtcatgcattttgtaaaaccttacattactgctatgagttaataagagacaggttaaaccactcccctcaggatagtaagactggttaaaaacactgctctcagcccacacagttatagctacagcctaggttaaatgattcctcatcctggtgtttttattctcatgtttaattacttctttaaagattaagattatatatagaaaaaataattgtggtatcagagaatacaggtataatttttcatatatcaggactatgtgatgatacttaagcaatagtgtacatacagtaatatatgtttaatatcgagtatggataatgaaggacttttctttttcaccttgtttataatgacattttatccagggtttgaatcaaataaattcatgttaactgtactattttattgaaatgttctagtcttattattggataattagaaataaacattttaaagtctttatgaataaataaggatgttttcctatgtatacaactgtactattttcattagtaataaacatcactttcaagaa

SEQ ID NO: 144198 - DNA, 3026 bp, Homo sapiens
  Payload ID: 8498
  Gene Symbol: ITSN1
  Gene Name: intersectin 1 (SH3 domain protein)
  ENST ID: ENST00000379960
  CDS Start-End: 39-752
ggatgtgaatggtgttgagctgttttttcttcataggtatgggaggtatcgccagcatgccaccgcttacagctgttgctccagtgccaatgggatccattccagttgttggaatgtctccaaccctagtatcttctgttcccacagcagctgtgccccccctggctaacggggctccccctgttatacaacctctgcctgcatttgctcatcctgcagccacattgccaaagagttcttcctttagtagatctggtccagggtcacaactaaacactaaattacaaaaggcacagtcatttgatgtggccagtgtcccaccagtggcagagtgggctgttcctcagtcatcaagactgaaatacaggcaattattcaatagtcatgacaaaactatgagtggacacttaacaggtccccaagcaagaactattcttatgcagtcaagtttaccacaggctcagctggcttcaatatggaatctttctgacattgatcaagatggaaaacttacagcagaggaatttatcctggcaatgcacctcattgatgtagctatgtctggccaaccactgccacctgtcctgcctccagaatacattccaccttcttttagaagagttcgatctggcagtggtatatctgtcataagctcaacatctgtagatcagaggctaccagaggaaccagttttagaagatgaacaacaacaattagaaaagaaattacctgttgctgtgttccttgtctgaagtaacgtttgaagataagaagcgggagaactttgaacgtggcaacctggaactggagaaacgaaggcaagctctcctggaacagcagcgcaaggagcaggagcgcctggcccagctggagcgggcggagcaggagaggaaggagcgtgagcgccaggagcaagagcgcaaaagacaactggaactggagaagcaactggaaaagcagcgggagctagaacggcagagagaggaggagaggaggaaagaaattgagaggcgagaggctgcaaaacgggaacttgaaaggcaacgacaacttgagtgggaacggaatcgaaggcaagaactactaaatcaaagaaacaaagaacaagaggacatagttgtactgaaagcaaagaaaaagactttggaatttgaattagaagctctaaatgataaaaagcatcaactagaagggaaacttcaagatatcagatgtcgattgaccacccaaaggcaagaaattgagagcacaaacaaatctagagagttgagaattgccgaaatcacccatctacagcaacaattacaggaatctcagcaaatgcttggaagacttattccagaaaaacagatactcaatgaccaattaaaacaagttcagcagaacagtttgcacagagattcacttgttacacttaaaagagccttagaagcaaaagaactagctcggcagcacctacgagaccaactggatgaagtggagaaagaaactagatcaaaactacaggagattgatattttcaataatcagctgaaggaactaagagaaatacacaataagcaacaactccagaagcaaaagtccatggaggctgaacgactgaaacagaaagaacaagaacgaaagatcatagaattagaaaaacaaaaagaagaagcccaaagacgagctcaggaaagggacaagcagtggctggagcatgtgcagcaggaggacgagcatcagagaccaagaaaactccacgaagaggaaaaactgaaaagggaggagagtgtcaaaaagaaggatggcgaggaaaaaggcaaacaggaagcacaagacaagctgggtcggcttttccatcaacaccaagaaccagctaagccagctgtccaggcaccctggtccactgcagaaaaaggtccacttaccatttctgcacaggaaaatgtaaaagtggtgtattaccgggcactgtacccctttgaatccagaagccatgatgaaatcactatccagccaggagacatagtcatggtggatgaaagccaaactggagaacccggctggcttggaggagaattaaaaggaaagacagggtggttccctgcaaactatgcagagaaaatcccagaaaatgaggttcccgctccagtgaaaccagtgactgattcaacatctgcccctgcccccaaactggccttgcgtgagacccccgcccctttggcagtaacctcttcagagccctccacgacccctaataactgggccgacttcagctccacgtggcccaccagcacgaatgagaaaccagaaacggataactgggatgcatgggcagcccagccctctctcaccgttccaagtgccggccagttaaggcagaggtccgcctttactccagccacggccactggctcctccccgtctcctgtgctaggccagggtgaaaaggtggaggggctacaagctcaagccctatatccttggagagccaaaaaagacaaccacttaaattttaacaaaaatgatgtcatcaccgtcctggaacagcaagacatgtggtggtttggagaagttcaaggtcagaagggttggttccccaagtcttacgtgaaactcatttcagggcccataaggaagtctacaagcatggattctggttcttcagagagtcctgctagtctaaagcgagtagcctctccagcagccaagccggtcgtttcgggagaaggcacgtgggaaaaagcgccagataggctggttcccagctaattatgtaaagcttctaagccctgggacgagcaaaatcactccaacagagccacctaagtcaacagcattagcggcagtgtgccaggtgattgggatgtacgactacaccgcgcagaatgacgatgagctggccttcaacaagggccagatcatcaacgtcctcaacaaggaggaccctgactggtggaaaggagaagtcaatggacaagtggggctcttcccatccaattatgtgaagctgaccacagacatggacccaagccagcaatgta

SEQ ID NO: 144199 - DNA, 1116 bp, Homo sapiens
  Payload ID: 8498
  Gene Symbol: ITSN1
  Gene Name: intersectin 1 (SH3 domain protein)
  ENST ID: ENST00000381283
  CDS Start-End: 33-1116
gcgtcgattagcaaggtaaaagtaacagaaccatggctcagtttccaacaccttttggtggcagcctggatatctgggccataactgtagaggaaagagcgaagcatgatcagcagttccatagtttaaagccaatatctggattcattactggtgatcaagctagaaactttttttttcaatctgggttacctcaacctgttttagcacagatatgggcactagctgacatgaataatgatggaagaatggatcaagtggagttttccatagctatgaaacttatcaaactgaagctacaaggatatcagctaccctctgcacttccccctgtcatgaaacagcaaccagttgctatttctagcgcaccagcatttgcagccacattgccaaagagttcttcctttagtagatctggtccagggtcacaactaaacactaaattacaaaaggcacagtcatttgatgtggccagtgtcccaccagtggcagagtgggctgttcctcagtcatcaagactgaaatacaggcaattattcaatagtcatgacaaaactatgagtggacacttaacaggtccccaagcaagaactattcttatgcagtcaagtttaccacaggctcagctggcttcaatatggaatctttctgacattgatcaagatggaaaacttacagcagaggaatttatcctggcaatgcacctcattgatgtagctatgtctggccaaccactgccacctgtcctgcctccagaatacattccaccttcttttagaagagttcgatctggcagtggtatatctgtcataagctcaacatctgtagatcagaggctaccagaggaaccagttttagaagatgaacaacaacaattagaaaagaaattacctgtaacgtttgaagataagaagcgggagaactttgaacgtggcaacctggaactggagaaacgaaggcaagctctcctggaacagcagcgcaaggagcaggagcgcctggcccagctggagcgggcggagcaggagaggaaggagcgtgagcgccaggagcaagagcgcaaaagacaactggaactggagaagcaactggaaaagcagcgggagctagaacggc

SEQ ID NO: 144200 - DNA, 949 bp, Homo sapiens
  Payload ID: 8498
  Gene Symbol: ITSN1
  Gene Name: intersectin 1 (SH3 domain protein)
  ENST ID: ENST00000381284
  CDS Start-End: 1-949
acccctgatggagtctgagctgctgacagaaaaagaggttgctatgatttttgtgaactggaaggagctgattatgtgtaatatcaaactactaaaagcgctgagagtccgcaagaagatgtccggggagaagatgcctgtgaagatgattggagacatcctgagcgcacagctgccgcacatgcagccctacatccgcttctgcagccgccagctcaacggggctgccctgatccagcagaagacggatgaggccccagacttcaaggagttcgtcaaaagattggcaatggatcctcggtgtaaagggatgccactctctagttttatactgaagcctatgcaacgggtaacaagatacccactgatcattaaaaatcaacttgtgttcaattcagtgaccaattgcttggggccgcgcaaatttctgcacagtgggaagctctacaaggccaagagcaacaaggagctgtatggcttccttttcaacgacttcctcctgctgactcagatcacgaagcctttggggtcttctggcaccgacaaagtcttcagccccaaatcaaacctgcagtataaaatgtataaaacacctattttcctaaatgaggttctagtaaaattacccaccgacccttctggagacgagcccatcttccacatctcccacattgaccgcgtctatactctccgagcagaaagcataaatgaaaggactgcctgggtgcagaaaatcaaagctgcttctgaactctacatagagactgagaaaaagaagcgcgagaaagcgtacctggtccgttcccaaagggcaacaggcattggaaggttgatggtgaacgtggttgaaggcatcgagttgaaaccctgtcggtcacatggaaagagcaacccgtactgtgaggtgaccatgggttcccagtgccacatcaccaagacgatccaggac

SEQ ID NO: 144201 - DNA, 6107 bp, Homo sapiens
  Payload ID: 8498
  Gene Symbol: ITSN1
  Gene Name: intersectin 1 (SH3 domain protein)
  ENST ID: ENST00000381285
  CDS Start-End: 269-2902
gagcgagggagggagcgaaggaggtagagaagagtggaggcgccaggggagggagcgtagcttggttgctccgtagtacggcggctcgcgaggaagaatcccgagcgggctccgggacggacagagaggcgggcggggatggtgtgcggggctgcggctcctgcgtccctcccagcggcgcgtgagcggcactgatttgtccctggggcggcagcgcggacccgcccggagatgaggcgtcgattagcaaggtaaaagtaacagaaccatggctcagtttccaacaccttttggtggcagcctggatatctgggccataactgtagaggaaagagcgaagcatgatcagcagttccatagtttaaagccaatatctggattcattactggtgatcaagctagaaactttttttttcaatctgggttacctcaacctgttttagcacagatatgggcactagctgacatgaataatgatggaagaatggatcaagtggagttttccatagctatgaaacttatcaaactgaagctacaaggatatcagctaccctctgcacttccccctgtcatgaaacagcaaccagttgctatttctagcgcaccagcatttgcagctgtgccccccctggctaacggggctccccctgttatacaacctctgcctgcatttgctcatcctgcagccacattgccaaagagttcttcctttagtagatctggtccagggtcacaactaaacactaaattacaaaaggcacagtcatttgatgtggccagtgtcccaccagtggcagagtgggctgttcctcagtcatcaagactgaaatacaggcaattattcaatagtcatgacaaaactatgagtggacacttaacaggtccccaagcaagaactattcttatgcagtcaagtttaccacaggctcagctggcttcaatatggaatctttctgacattgatcaagatggaaaacttacagcagaggaatttatcctggcaatgcacctcattgatgtagctatgtctggccaaccactgccacctgtcctgcctccagaatacattccaccttcttttagaagagttcgatctggcagtggtatatctgtcataagctcaacatctgtagatcagaggctaccagaggaaccagttttagaagatgaacaacaacaattagaaaagaaattacctgtaacgtttgaagataagaagcgggagaactttgaacgtggcaacctggaactggagaaacgaaggcaagctctcctggaacagcagcgcaaggagcaggagcgcctggcccagctggagcgggcggagcaggagaggaaggagcgtgagcgccaggagcaagagcgcaaaagacaactggaactggagaagcaactggaaaagcagcgggagctagaacggcagagagaggaggagaggaggaaagaaattgagaggcgagaggctgcaaaacgggaacttgaaaggcaacgacaacttgagtgggaacggaatcgaaggcaagaactactaaatcaaagaaacaaagaacaagaggacatagttgtactgaaagcaaagaaaaagactttggaatttgaattagaagctctaaatgataaaaagcatcaactagaagggaaacttcaagatatcagatgtcgattgaccacccaaaggcaagaaattgagagcacaaacaaatctagagagttgagaattgccgaaatcacccatctacagcaacaattacaggaatctcagcaaatgcttggaagacttattccagaaaaacagatactcaatgaccaattaaaacaagttcagcagaacagtttgcacagagattcacttgttacacttaaaagagccttagaagcaaaagaactagctcggcagcacctacgagaccaactggatgaagtggagaaagaaactagatcaaaactacaggagattgatattttcaataatcagctgaaggaactaagagaaatacacaataagcaacaactccagaagcaaaagtccatggaggctgaacgactgaaacagaaagaacaagaacgaaagatcatagaattagaaaaacaaaaagaagaagcccaaagacgagctcaggaaagggacaagcagtggctggagcatgtgcagcaggaggacgagcatcagagaccaagaaaactccacgaagaggaaaaactgaaaagggaggagagtgtcaaaaagaaggatggcgaggaaaaaggcaaacaggaagcacaagacaagctgggtcggcttttccatcaacaccaagaaccagctaagccagctgtccaggcaccctggtccactgcagaaaaaggtccacttaccatttctgcacaggaaaatgtaaaagtggtgtattaccgggcactgtacccctttgaatccagaagccatgatgaaatcactatccagccaggagacatagtcatggtggatgaaagccaaactggagaacccggctggcttggaggagaattaaaaggaaagacagggtggttccctgcaaactatgcagagaaaatcccagaaaatgaggttcccgctccagtgaaaccagtgactgattcaacatctgcccctgcccccaaactggccttgcgtgagacccccgcccctttggcagtaacctcttcagagccctccacgacccctaataactgggccgacttcagctccacgtggcccaccagcacgaatgagaaaccagaaacggataactgggatgcatgggcagcccagccctctctcaccgttccaagtgccggccagttaaggcagaggtccgcctttactccagccacggccactggctcctccccgtctcctgtgctaggccagcatggattctggttcttcagagagtcctgctagtctaaagcgagtagcctctccagcagccaagccggtcgtttcgggagaagaatttattgccatgtacacttacgagagttctgagcaaggagatttaacctttcagcaaggggatgtgattttggttaccaagaaagatggtgactggtggacaggaacagtgggcgacaaggccggagtcttcccttctaactatgtgaggcttaaagattcagagggctctggaactgctgggaaaacagggagtttaggaaaaaaacctgaaattgcccaggttattgcctcatacaccgccaccggccccgagcagctcactctcgcccctggtcagctgattttgatccgaaaaaagaacccaggtggatggtgggaaggagagctgcaagcacgtgggaaaaagcgccagataggctggttcccagctaattatgtaaagcttctaagccctgggacgagcaaaatcactccaacagagccacctaagtcaacagcattagcggcagtgtgccaggtgattgggatgtacgactacaccgcgcagaatgacgatgagctggccttcaacaagggccagatcatcaacgtcctcaacaaggaggaccctgactggtggaaaggagaagtcaatggacaagtggggctcttcccatccaattatgtgaagctgaccacagacatggacccaagccagcaatggtgttcagacttacatctcttggatatgttgaccccaactgaaagaaagcgacaaggatacatccacgagctcattgtcaccgaggagaactatgtgaatgacctgcagctggtcacagagatttttcaaaaacccctgatggagtctgagctgctgacagaaaaagaggttgctatgatttttgtgaactggaaggagctgattatgtgtaatatcaaactactaaaagcgctgagagtccgcaagaagatgtccggggagaagatgcctgtgaagatgattggagacatcctgagcgcacagctgccgcacatgcagccctacatccgcttctgcagccgccagctcaacggggctgccctgatccagcagaagacggatgaggccccagacttcaaggagttcgtcaaaagattggcaatggatcctcggtgtaaagggatgccactctctagttttatactgaagcctatgcaacgggtaacaagatacccactgatcattaaaaatatcctggaaaacacccctgaaaaccacccggaccacagccacttgaagcacgccctggagaaggcggaagagctctgttcccaggtgaacgaaggggtgcgggagaaggagaactctgaccggctggagtggatccaggcccacgtgcagtgtgaaggcctgtctgagcaacttgtgttcaattcagtgaccaattgcttggggccgcgcaaatttctgcacagtgggaagctctacaaggccaagagcaacaaggagctgtatggcttccttttcaacgacttcctcctgctgactcagatcacgaagcctttggggtcttctggcaccgacaaagtcttcagccccaaatcaaacctgcagtataaaatgtataaaacacctattttcctaaatgaggttctagtaaaattacccaccgacccttctggagacgagcccatcttccacatctcccacattgaccgcgtctatactctccgagcagaaagcataaatgaaaggactgcctgggtgcagaaaatcaaagctgcttctgaactctacatagagactgagaaaaagaagcgcgagaaagcgtacctggtccgttcccaaagggcaacaggcattggaaggttgatggtgaacgtggttgaaggcatcgagttgaaaccctgtcggtcacatggaaagagcaacccgtactgtgaggtgaccatgggttcccagtgccacatcaccaagacgatccaggacactctgaaccccaagtggaattccaactgccagttcttcatccgagacctggagcaggaagtcctctgcatcactgtgttcgagagggaccagttctcaccagatgattttttgggtcggacggagatccgtgtggcggacatcaagaaagaccagggctccaaaggtccagttacgaagtgtcttctgctgcacgaagtccccacgggagagattgtggtccgcttggacctgcagttgtttgatgagccgtaggcagcgggctcagggtgtgctcagcagggtcccagcccacggccacacatgctgtctggaaattgtattccttttctaagaaaccaccatttggtattcagtcacagggatatgggatggcaaagacaggcccctcaaagctcctaggaatcattctcgacaatcctccctgccccgaaacaatttcctgtttcatgaaacaaagctgtgttttcctttgtcctcactacaggtctcattatggcttctagggtcgctgaaatcccatagccctcaacagggtgcagctgggagtctagccccttcccgggcttgagggatgggtctggttactataaaatagatttataaatgcaatgtctatatttttggagaactcatgtaaccctcctgtttcttacatccaccagtccccaagtagacttcttggcctacaatgcccagtccttggtgtgagtttagaaacaattatgacggtcctgtcattgcttcagaatcccatctctcctgcagggaaatgctgcctagagctgatcactcggtgagacggtctgatcaggccctggcttagctctttgaagagctggtctatggaagtttccagcatgtgcaccgttatagccgttccttccccctctaggccttgtattaatatatgtcaatgaaaacacactggtgtattgttgcgtggattcagttctgattcccagcatgcttagaatatggtcacagaaagtcattatctagaaagtcacccctctgctggatcagatcactacaggtcactggaaaggcaactttacaatgttgggtcactgggtctcggttggcagccatgttggaaaaatctcttttggctcggaggcctgtgatatttcatagcagcagtcgttgctggtgacctgttctgtgcttgaatgtgctgaatcctgattgttgtaggacatttcaacagctctttttggtacgttccccaaaaagccatgtcctagatccccaaggcgt

SEQ ID NO: 144202 - DNA, 5437 bp, Homo sapiens
  Payload ID: 8498
  Gene Symbol: ITSN1
  Gene Name: intersectin 1 (SH3 domain protein)
  Uniprot ID: Q15811
  ENST ID: ENST00000381291
  CDS Start-End: 269-3931
gagcgagggagggagcgaaggaggtagagaagagtggaggcgccaggggagggagcgtagcttggttgctccgtagtacggcggctcgcgaggaagaatcccgagcgggctccgggacggacagagaggcgggcggggatggtgtgcggggctgcggctcctgcgtccctcccagcggcgcgtgagcggcactgatttgtccctggggcggcagcgcggacccgcccggagatgaggcgtcgattagcaaggtaaaagtaacagaaccatggctcagtttccaacaccttttggtggcagcctggatatctgggccataactgtagaggaaagagcgaagcatgatcagcagttccatagtttaaagccaatatctggattcattactggtgatcaagctagaaactttttttttcaatctgggttacctcaacctgttttagcacagatatgggcactagctgacatgaataatgatggaagaatggatcaagtggagttttccatagctatgaaacttatcaaactgaagctacaaggatatcagctaccctctgcacttccccctgtcatgaaacagcaaccagttgctatttctagcgcaccagcatttggtatgggaggtatcgccagcatgccaccgcttacagctgttgctccagtgccaatgggatccattccagttgttggaatgtctccaaccctagtatcttctgttcccacagcagctgtgccccccctggctaacggggctccccctgttatacaacctctgcctgcatttgctcatcctgcagccacattgccaaagagttcttcctttagtagatctggtccagggtcacaactaaacactaaattacaaaaggcacagtcatttgatgtggccagtgtcccaccagtggcagagtgggctgttcctcagtcatcaagactgaaatacaggcaattattcaatagtcatgacaaaactatgagtggacacttaacaggtccccaagcaagaactattcttatgcagtcaagtttaccacaggctcagctggcttcaatatggaatctttctgacattgatcaagatggaaaacttacagcagaggaatttatcctggcaatgcacctcattgatgtagctatgtctggccaaccactgccacctgtcctgcctccagaatacattccaccttcttttagaagagttcgatctggcagtggtatatctgtcataagctcaacatctgtagatcagaggctaccagaggaaccagttttagaagatgaacaacaacaattagaaaagaaattacctgtaacgtttgaagataagaagcgggagaactttgaacgtggcaacctggaactggagaaacgaaggcaagctctcctggaacagcagcgcaaggagcaggagcgcctggcccagctggagcgggcggagcaggagaggaaggagcgtgagcgccaggagcaagagcgcaaaagacaactggaactggagaagcaactggaaaagcagcgggagctagaacggcagagagaggaggagaggaggaaagaaattgagaggcgagaggctgcaaaacgggaacttgaaaggcaacgacaacttgagtgggaacggaatcgaaggcaagaactactaaatcaaagaaacaaagaacaagaggacatagttgtactgaaagcaaagaaaaagactttggaatttgaattagaagctctaaatgataaaaagcatcaactagaagggaaacttcaagatatcagatgtcgattgaccacccaaaggcaagaaattgagagcacaaacaaatctagagagttgagaattgccgaaatcacccatctacagcaacaattacaggaatctcagcaaatgcttggaagacttattccagaaaaacagatactcaatgaccaattaaaacaagttcagcagaacagtttgcacagagattcacttgttacacttaaaagagccttagaagcaaaagaactagctcggcagcacctacgagaccaactggatgaagtggagaaagaaactagatcaaaactacaggagattgatattttcaataatcagctgaaggaactaagagaaatacacaataagcaacaactccagaagcaaaagtccatggaggctgaacgactgaaacagaaagaacaagaacgaaagatcatagaattagaaaaacaaaaagaagaagcccaaagacgagctcaggaaagggacaagcagtggctggagcatgtgcagcaggaggacgagcatcagagaccaagaaaactccacgaagaggaaaaactgaaaagggaggagagtgtcaaaaagaaggatggcgaggaaaaaggcaaacaggaagcacaagacaagctgggtcggcttttccatcaacaccaagaaccagctaagccagctgtccaggcaccctggtccactgcagaaaaaggtccacttaccatttctgcacaggaaaatgtaaaagtggtgtattaccgggcactgtacccctttgaatccagaagccatgatgaaatcactatccagccaggagacatagtcatggttaaaggggaatgggtggatgaaagccaaactggagaacccggctggcttggaggagaattaaaaggaaagacagggtggttccctgcaaactatgcagagaaaatcccagaaaatgaggttcccgctccagtgaaaccagtgactgattcaacatctgcccctgcccccaaactggccttgcgtgagacccccgcccctttggcagtaacctcttcagagccctccacgacccctaataactgggccgacttcagctccacgtggcccaccagcacgaatgagaaaccagaaacggataactgggatgcatgggcagcccagccctctctcaccgttccaagtgccggccagttaaggcagaggtccgcctttactccagccacggccactggctcctccccgtctcctgtgctaggccagggtgaaaaggtggaggggctacaagctcaagccctatatccttggagagccaaaaaagacaaccacttaaattttaacaaaaatgatgtcatcaccgtcctggaacagcaagacatgtggtggtttggagaagttcaaggtcagaagggttggttccccaagtcttacgtgaaactcatttcagggcccataaggaagtctacaagcatggattctggttcttcagagagtcctgctagtctaaagcgagtagcctctccagcagccaagccggtcgtttcgggagaagaatttattgccatgtacacttacgagagttctgagcaaggagatttaacctttcagcaaggggatgtgattttggttaccaagaaagatggtgactggtggacaggaacagtgggcgacaaggccggagtcttcccttctaactatgtgaggcttaaagattcagagggctctggaactgctgggaaaacagggagtttaggaaaaaaacctgaaattgcccaggttattgcctcatacaccgccaccggccccgagcagctcactctcgcccctggtcagctgattttgatccgaaaaaagaacccaggtggatggtgggaaggagagctgcaagcacgtgggaaaaagcgccagataggctggttcccagctaattatgtaaagcttctaagccctgggacgagcaaaatcactccaacagagccacctaagtcaacagcattagcggcagtgtgccaggtgattgggatgtacgactacaccgcgcagaatgacgatgagctggccttcaacaagggccagatcatcaacgtcctcaacaaggaggaccctgactggtggaaaggagaagtcaatggacaagtggggctcttcccatccaattatgtgaagctgaccacagacatggacccaagccagcaatgaatcatatgttgtccatccccccctcaggcttgaaagtcctcaaagagacccactatcccatatcactgcccagagggatgatgggagatgcagccttgatcatgtgacttccagcatgatcacctactgccttctgagtagaagaactcactgcagagcagtttacctcattttaccttagttgcatgtgatcgcaatgtttgagttattacttgcagagataggagcaaaaattacaaaaacacacagggtagtgggtccttttgtggctttcctagttactcaaattgactttcccccacctttgcacaggtgctttcaatagttttaaaattatttttaaatatatattttagctttttaataaacaaaataaataaatgacttctttgctattttggttttgcaaaaagacccactatcaaggaatgctgcatgtgctattaaaaattgttccaaatgtccataaatctgagacttgatgtattttttcattttgtccagtgttaccaactaaattgtgcagtttggggcttttcccccttaccatagaagtgcagaggagttcagtatctctgttttaaagacgtatagaatgagcccaattaaagcgaaggtgtttgtgcttgtttgtgtgtatcagctgtaccttgttgagcatgtaatacatcctgtacataagaaattagttctttccatggcaaagctattaccttgtacgatgctctaatcatattgcatttaattttattttgcacagtgaccttgtagccacatgagaaagcactctgtgtttttgttcggtctcagatttatctggttgagttggtgttttgtttggggtttttaattttgcgtgtttgcatagcataaaatcagtagacaacaccactgaggtcgttacgatcaacgatatccacagtctctttttagtctctgttacatgaagttttattccagttacttttcatggaatgacctattttgaacaagtaattttcttgacaagaaagaatgtatagaagtctccctgcaattaatttccaatgtttacattttttaactagactgtggaatttctacagattaatatgaaatggagctcatggtccgtttgtgtgttagatatgctgtagctgaagccctgtttgtcttttaaacactagttggaagctctcaataaaaatgcctgctgctcacagcacagaaaatggggcagggggagcctcaagcacaatctagctgtcctcctaaagactctgtaatgctcactcccctcgcgttctcccggcgctgtcgggaggctgtgctggtggtcgtgtagaggtccttctcctttcacatggtgcagagagcgaggacctctcctcctcgttcagttgcacttcagtattttcacggatatgaatgtaaaatatataaatatataaacctgcggctttaacaactgtaatacaaccttttgaattagttccgtgtatagataattaaattcttcatacaaaa

SEQ ID NO: 144203 - DNA, 17015 bp, Homo sapiens
  Payload ID: 8498
  Gene Symbol: ITSN1
  Gene Name: intersectin 1 (SH3 domain protein)
  Uniprot ID: Q15811
  ENST ID: ENST00000381318
  CDS Start-End: 289-5454
ggagataggcgggagcgagggagcgagggagggagcgaaggaggtagagaagagtggaggcgccaggggagggagcgtagcttggttgctccgtagtacggcggctcgcgaggaagaatcccgagcgggctccgggacggacagagaggcgggcggggatggtgtgcggggctgcggctcctgcgtccctcccagcggcgcgtgagcggcactgatttgtccctggggcggcagcgcggacccgcccggagatgaggcgtcgattagcaaggtaaaagtaacagaaccatggctcagtttccaacaccttttggtggcagcctggatatctgggccataactgtagaggaaagagcgaagcatgatcagcagttccatagtttaaagccaatatctggattcattactggtgatcaagctagaaactttttttttcaatctgggttacctcaacctgttttagcacagatatgggcactagctgacatgaataatgatggaagaatggatcaagtggagttttccatagctatgaaacttatcaaactgaagctacaaggatatcagctaccctctgcacttccccctgtcatgaaacagcaaccagttgctatttctagcgcaccagcatttggtatgggaggtatcgccagcatgccaccgcttacagctgttgctccagtgccaatgggatccattccagttgttggaatgtctccaaccctagtatcttctgttcccacagcagctgtgccccccctggctaacggggctccccctgttatacaacctctgcctgcatttgctcatcctgcagccacattgccaaagagttcttcctttagtagatctggtccagggtcacaactaaacactaaattacaaaaggcacagtcatttgatgtggccagtgtcccaccagtggcagagtgggctgttcctcagtcatcaagactgaaatacaggcaattattcaatagtcatgacaaaactatgagtggacacttaacaggtccccaagcaagaactattcttatgcagtcaagtttaccacaggctcagctggcttcaatatggaatctttctgacattgatcaagatggaaaacttacagcagaggaatttatcctggcaatgcacctcattgatgtagctatgtctggccaaccactgccacctgtcctgcctccagaatacattccaccttcttttagaagagttcgatctggcagtggtatatctgtcataagctcaacatctgtagatcagaggctaccagaggaaccagttttagaagatgaacaacaacaattagaaaagaaattacctgtaacgtttgaagataagaagcgggagaactttgaacgtggcaacctggaactggagaaacgaaggcaagctctcctggaacagcagcgcaaggagcaggagcgcctggcccagctggagcgggcggagcaggagaggaaggagcgtgagcgccaggagcaagagcgcaaaagacaactggaactggagaagcaactggaaaagcagcgggagctagaacggcagagagaggaggagaggaggaaagaaattgagaggcgagaggctgcaaaacgggaacttgaaaggcaacgacaacttgagtgggaacggaatcgaaggcaagaactactaaatcaaagaaacaaagaacaagaggacatagttgtactgaaagcaaagaaaaagactttggaatttgaattagaagctctaaatgataaaaagcatcaactagaagggaaacttcaagatatcagatgtcgattgaccacccaaaggcaagaaattgagagcacaaacaaatctagagagttgagaattgccgaaatcacccatctacagcaacaattacaggaatctcagcaaatgcttggaagacttattccagaaaaacagatactcaatgaccaattaaaacaagttcagcagaacagtttgcacagagattcacttgttacacttaaaagagccttagaagcaaaagaactagctcggcagcacctacgagaccaactggatgaagtggagaaagaaactagatcaaaactacaggagattgatattttcaataatcagctgaaggaactaagagaaatacacaataagcaacaactccagaagcaaaagtccatggaggctgaacgactgaaacagaaagaacaagaacgaaagatcatagaattagaaaaacaaaaagaagaagcccaaagacgagctcaggaaagggacaagcagtggctggagcatgtgcagcaggaggacgagcatcagagaccaagaaaactccacgaagaggaaaaactgaaaagggaggagagtgtcaaaaagaaggatggcgaggaaaaaggcaaacaggaagcacaagacaagctgggtcggcttttccatcaacaccaagaaccagctaagccagctgtccaggcaccctggtccactgcagaaaaaggtccacttaccatttctgcacaggaaaatgtaaaagtggtgtattaccgggcactgtacccctttgaatccagaagccatgatgaaatcactatccagccaggagacatagtcatggttaaaggggaatgggtggatgaaagccaaactggagaacccggctggcttggaggagaattaaaaggaaagacagggtggttccctgcaaactatgcagagaaaatcccagaaaatgaggttcccgctccagtgaaaccagtgactgattcaacatctgcccctgcccccaaactggccttgcgtgagacccccgcccctttggcagtaacctcttcagagccctccacgacccctaataactgggccgacttcagctccacgtggcccaccagcacgaatgagaaaccagaaacggataactgggatgcatgggcagcccagccctctctcaccgttccaagtgccggccagttaaggcagaggtccgcctttactccagccacggccactggctcctccccgtctcctgtgctaggccagggtgaaaaggtggaggggctacaagctcaagccctatatccttggagagccaaaaaagacaaccacttaaattttaacaaaaatgatgtcatcaccgtcctggaacagcaagacatgtggtggtttggagaagttcaaggtcagaagggttggttccccaagtcttacgtgaaactcatttcagggcccataaggaagtctacaagcatggattctggttcttcagagagtcctgctagtctaaagcgagtagcctctccagcagccaagccggtcgtttcgggagaagaatttattgccatgtacacttacgagagttctgagcaaggagatttaacctttcagcaaggggatgtgattttggttaccaagaaagatggtgactggtggacaggaacagtgggcgacaaggccggagtcttcccttctaactatgtgaggcttaaagattcagagggctctggaactgctgggaaaacagggagtttaggaaaaaaacctgaaattgcccaggttattgcctcatacaccgccaccggccccgagcagctcactctcgcccctggtcagctgattttgatccgaaaaaagaacccaggtggatggtgggaaggagagctgcaagcacgtgggaaaaagcgccagataggctggttcccagctaattatgtaaagcttctaagccctgggacgagcaaaatcactccaacagagccacctaagtcaacagcattagcggcagtgtgccaggtgattgggatgtacgactacaccgcgcagaatgacgatgagctggccttcaacaagggccagatcatcaacgtcctcaacaaggaggaccctgactggtggaaaggagaagtcaatggacaagtggggctcttcccatccaattatgtgaagctgaccacagacatggacccaagccagcaatggtgttcagacttacatctcttggatatgttgaccccaactgaaagaaagcgacaaggatacatccacgagctcattgtcaccgaggagaactatgtgaatgacctgcagctggtcacagagatttttcaaaaacccctgatggagtctgagctgctgacagaaaaagaggttgctatgatttttgtgaactggaaggagctgattatgtgtaatatcaaactactaaaagcgctgagagtccgcaagaagatgtccggggagaagatgcctgtgaagatgattggagacatcctgagcgcacagctgccgcacatgcagccctacatccgcttctgcagccgccagctcaacggggctgccctgatccagcagaagacggatgaggccccagacttcaaggagttcgtcaaaagattggcaatggatcctcggtgtaaagggatgccactctctagttttatactgaagcctatgcaacgggtaacaagatacccactgatcattaaaaatatcctggaaaacacccctgaaaaccacccggaccacagccacttgaagcacgccctggagaaggcggaagagctctgttcccaggtgaacgaaggggtgcgggagaaggagaactctgaccggctggagtggatccaggcccacgtgcagtgtgaaggcctgtctgagcaacttgtgttcaattcagtgaccaattgcttggggccgcgcaaatttctgcacagtgggaagctctacaaggccaagagcaacaaggagctgtatggcttccttttcaacgacttcctcctgctgactcagatcacgaagcctttggggtcttctggcaccgacaaagtcttcagccccaaatcaaacctgcagtataaaatgtataaaacacctattttcctaaatgaggttctagtaaaattacccaccgacccttctggagacgagcccatcttccacatctcccacattgaccgcgtctatactctccgagcagaaagcataaatgaaaggactgcctgggtgcagaaaatcaaagctgcttctgaactctacatagagactgagaaaaagaagcgcgagaaagcgtacctggtccgttcccaaagggcaacaggcattggaaggttgatggtgaacgtggttgaaggcatcgagttgaaaccctgtcggtcacatggaaagagcaacccgtactgtgaggtgaccatgggttcccagtgccacatcaccaagacgatccaggacactctgaaccccaagtggaattccaactgccagttcttcatccgagacctggagcaggaagtcctctgcatcactgtgttcgagagggaccagttctcaccagatgattttttgggtcggacggagatccgtgtggcggacatcaagaaagaccagggctccaaaggtccagttacgaagtgtcttctgctgcacgaagtccccacgggagagattgtggtccgcttggacctgcagttgtttgatgagccgtaggcagcgggctcagggtgtgctcagcagggtcccagcccacggccacacatgctgtctggaaattgtattccttttctaagaaaccaccatttggtattcagtcacagggatatgggatggcaaagacaggcccctcaaagctcctaggaatcattctcgacaatcctccctgccccgaaacaatttcctgtttcatgaaacaaagctgtgttttcctttgtcctcactacaggtctcattatggcttctagggtcgctgaaatcccatagccctcaacagggtgcagctgggagtctagccccttcccgggcttgagggatgggtctggttactataaaatagatttataaatgcaatgtctatatttttggagaactcatgtaaccctcctgtttcttacatccaccagtccccaagtagacttcttggcctacaatgcccagtccttggtgtgagtttagaaacaattatgacggtcctgtcattgcttcagaatcccatctctcctgcagggaaatgctgcctagagctgatcactcggtgagacggtctgatcaggccctggcttagctctttgaagagctggtctatggaagtttccagcatgtgcaccgttatagccgttccttccccctctaggccttgtattaatatatgtcaatgaaaacacactggtgtattgttgcgtggattcagttctgattcccagcatgcttagaatatggtcacagaaagtcattatctagaaagtcacccctctgctggatcagatcactacaggtcactggaaaggcaactttacaatgttgggtcactgggtctcggttggcagccatgttggaaaaatctcttttggctcggaggcctgtgatatttcatagcagcagtcgttgctggtgacctgttctgtgcttgaatgtgctgaatcctgattgttgtaggacatttcaacagctctttttggtacgttccccaaaaagccatgtcctagatccccaaggcgtgaaaaggaaaaatatcaagctggaggttgggaaagaaaatgaaggcagtccattatgtggtgggtgaaagaccctaggaggatgcaagccccgcacatcccggggcaaagacctaagacacttttccaccctccaccaccccaacctcacataatatgcttgttgcaagagtcaggactttatgactatgtgccaagctgtttggtttgagttctttaatttttttttcccttaaatgccaggagatcatctggttagttagatagtaacttgatttgctaatgaaaagtgggggccgtgttttgtttgcatgttaatattctcataatcctagtttgttgtggtcatgaaatgtcctttgcatgttctgttggtactggagtctagctttcctgtactagatggtgttctctttgattgtaggtccttagactttaattagggttatcaaagtgctttctaaatgatagcatcagcgttgtggcagagtacctcctttgctgggaactgaatgtgtagtgttatcatttcccatgagagcccggtcatacttcaagcaatttttttaaaagtgtgtgttggaaaggacaacaaagtttacatttcatacttttaagaaatactttattatttatttattgaagatagtgtagaattttgtatcaagaacaacagacataagtattttttgaaacaagcaaatataccctgtagttagaaactttcaactgaacatgttagagaccaagtttaacttcaggcatgcatttgtttaccatttcccagcagaaaacatggttaaaatactttaagtttatattttttgatgttgttaagaaacttttaaattaaatctataaatagacatgcaactcatgctttcctatttctataaccaacaccgtttgtttagtgtatttatgaaagatatgctaccatggtagaaagaaaagtattcaatgtgtaaatggggtagtgtgggtcaccattccgatctctttttgttttctgtcctgtcttttcttcattgactttatttgcgtgttaatgttggacatcattgttcatgtaggtagcgtatggtatgcacaatgacaaacaatcgttttaggtcccaggtcacccactcatagtgtcctattattggaattaatgtagcatgagaaagcaatatgtgactctttttcctcaagtgactctgttgagcatccttgagatgctcctgccatgtagcaagttctggattagtgtccttgtatttactggtgtaatttgtaatgtaaccaattgtccgtatggaggagtcgggctggccctcggacccagctgtgattcatgagttgtgtcacagggattgagaaacatgggtgatgcatggagtctcaaaccattgggcctctctgttccttcacctctaccttcttgaccacctgggctatatttcatagaaattaaatgctccttgccaacaaggagtctgtctcctagctctttgttttctaaatataggagttctctaggccactgcatcccggcatcctgatcccagccttttagacacccctgcaagcgttcctctgctctgagccacactgctagcttctcctgcacactctgatctcctttagcccaagaaggggctgtgctggtcatagggttatgctgtaaccctcagtcttccctgagaactgaactatcctgggacctcttgggctgagccttcttcacagagcagttctctagaaggcagagtccacatcctggtccctctggggcagggcctgtctggctgctggcatcaccctggcaggtggatggacagcatcatctcctggaaccaggtttgctgtgaccatgagagcctgaagatgtggctcattcggatccaggcctggactaatctggaaagagggactttctaggtgcaggtcaccagggatgcttgagaaactagagccagacttccttgtttgtttggataatatgtccctgtcctctgatagcagaggaaagagctctgctcccaaagaacattcatgtaagaggaggcatttttttcttctttgctttttttaaacaacctaaagtatgacctaagtgtatgaaactaactgatttctttgggtagagtagccctgaatttaactggggaaaaaatcccatcagactatgagtaaattgaccacccacattaagtcttatctcggtgacctggtaccaaagcccaggtgtcctccaggggagtattctggggtggcagggggattaggtgctagcgccagcagggaaggacacttgcaggtctgccttccaaggctaagcaggccggctgtctctccaggaactggctaggacaagtgtaaagccactgaccacacagaaccaggatgttctagaatctgatggggctgaagatgaagggagaaatggacaaggcacttctggctttattgaaaaggtgaagctcttggagtatattttagagtaggccagtaccttgtataagcagaaaaagacttctctatctccactccaagtcgtttttttctagttgattgggcctttttgattgataagaagaaaatgtgttttgtacgtgtaacaactttaagaatttccattggaaacaaagtatgatttgatttgatttgatttctaagttctcccttccttttcaaggttagcgatgtgctttatagcagacactagcacttttacatgaatacctggtgtgctttggatgtaacagggtcattttgggctcgaggtgagtgtgcaattagcagcaggtctgcttggtccagatatgcttgtttacaagtttagagcatcctatgccagaaagtgagatgaaaacaaaggcacctggattgctttgttttgcttttagataaaagagctttagctcacaccaggcagaagcataaccagtagccccagaaaccggtagcatgatgaagccctcagacagtatagtctgagccaccataagaggcattagggaaaactaacacctccttctttttgcaccgtggggtgctgaaattcctgctagagacttccccttacttccatgaatggcccaggggctgcttagtatatcattagaatgttcattctcctccttttccctggagtggaccagtgagaccaaatgcttgtgtttctctatgttttcagttcatttgttcaaatgacccagaagatgaatccatttctgggaaggctgagctcagatgaggattgctaggccagcctaggttctggggcggatctcagggacagaaacaggcttgtattaagtatgagtggcaggtacttctctagaacagccctaacctgcactagtgaggggggctcaggaattcccatgacattgatctagcagcctcctgcacgtagacactcagttcattttagggacgttcaatgcttgatcaaatggggggcattttctttctttctttttttccccagctacagtgtaattgcctacctgcctgggccccttctagaggaaggtgggctttccttgtccgtcaggctgcactcatgaggtgatatcgtaaagcagcagaaagactgagggtgcaaagaaaccacagctgccattcacggggcagctccctctagctcttctgcccagtgaccttacaggctttagaggagcctgatgagagctatcctgggggccaagggatgcattccctgcagcttcctcctgggggacccacaggtcagcccattccaggagaagcagtcttaggcccgtttgcatcccctgccactgccatgtgcctgccagcccggtttctgatgaagacgtggctcagtccctgctctccttgtcgcagtggcttgtacttcatgtgcagtagcccagggcccgccttctagagtgaatgtttccctcgagcccttggatatttttattctattttgaatggttccgatcaattaatgttgctttgtgtggggttcttcagagaaataatgcaaaccggccaggtgcggtggctcacacctgtaatcccaacactttgaggggctgaggcaggtggatcacctgaggtcaggagttcgagaacagcctggccaacgtggcgaaaccttgtctctactaaaaatacaaaaattagccaggggtggtggcaggcacctgtaatcccagctactcaggaggctgaggcaggagaatcactcgaacctgggaggcggaggttgcagtgagccgagatcacgccactgcactccagcctgggtaacagagcgagagtccttctcaaaacaaacaaaaaaagagctaatgcagacctcttctggttagacctgacacggaggaagtaattggctggtcaacttaatggcgccccacagcttcctctggatcctgcttctttgtacttggaacacagtttatttgagctagaggaaaggaaagttctagaattcctgtttcctcagcctgcactgtatcagatccaggatatgtctgcatttcatcaggatcaagtaagatacataaccttatatctgtaggagccagaaaaaaaaaaatctattcctgataggcatggaaacttagtccacatgaaagacagaagacatctaacagctgtctgtcttgggagcattaaaacccagacaccaagacacactagacagtccatctctgggttgtgatctctcagaaacatcttagtagttaatgcactgttcatttagggagtccccatcctggtccaggccaccctcctagaagctgggcggcagctggacgggcctgccttggtggcattcaagcaagcctaattggattaggttggtgcaaaagtgattgcggtttttgccattgcttttgatggcaaactaactttaagtcattaaaataagacccaacgcttataaaagagttcatatccacctcccaataacttctttagttccatgcagcctcaatcagttcctccattcaaaggaaccctctttaccctggccctgggggagccatattacacccacatcataatttttctgacactatgtgtgcttgtcaaatttcagggtcagtttccccttattggatgtcaggggtgttttgtgagttgtgttttaataggattctgttcgattttctataccagcctatattgttactatcatctgcctagtatgaatattttagtattcaaagcccaccagataaagctgtgttcagaagtggactttttggtcagccttgaaaaaaaaaaaatcagcatttctctgatatttcctgaggattaaccagaaactaaggtttctttttaggcagtggtaagaatgcgtattttcttcttccagaagttctggttttatacttttatcttttgaaagaataacattcctgtgcgactctgcttctcttcgcttttgcatttctcttttttaactcaaatctcttatttcctgccgttcctgtatctaaacagaatgggggcctcaggcagacaggaaccaaagaaagggtgtagtggctttgcagcgttgggtgagcagcagccgctgccattctgtgcactgtcaccggcgggggtggagggtctccctgtaggaggaggaaactcgctgttttcactggcagatttcaaggtgccggctccacctaccgcagctgctaggcattgctcttgtgtagatcgcagaaggagttattggtgatgtggggtgtaggggaagacaggaaaacggactcagagctaggaatgtgggcctggcagagaccgaaggctgggtgggaaggaagctcgcggcgagcctagggttcaagcctagcgcgccaggggtctccagtgagaccttgctcttccctgccgctgaggctggggctgcacggaggtcctcaggcttcccaccctttctgcatcagctttagtgtctgtcggctgggtggactgcagggcaggtgacctggaggaggccctgctccccagcaagcgttctaggagttacggtgtgctctattgggattggattacagtctctacttgtagactttgacttctggaattttaggtggaagggaatttttgttggtgggacgcagcagctcagtgcgtggtgtgtgcatgcgtgtttgtgcgtgcgtgtgcatgtatgtgtttgtgcgtgcacgtgtgcgtgtgtgtgcatgggtttgcgtgcatgcatgtgtgtgcgtgcgcgtgtttgtgtgtgcatgtgtgtgtgtctacgtgtgtgtgcacgcatgtgtgtgcgtgtatgtgtgcgtgtgtgcatgtttgtgagtgcatgtgtttgtgcgtgtgtgcgtatttgtgtgtgtgcgtgtgtgtgcgtgtgtatgtgcgtgtatgcatgtgcatgtttgtgtgtgcgtgcatatgtgtatgtgtgtgcgcgtgcgtgtgcgtgcatgtgtgcgcatgcgtgtgtacctacccacacctagggggatgcatggctctgtgccttggagagggaaacaggaaatacgttgctccacagtcctgtcatcctggtcaggactagtcgcgtggtttgcggacagagtgcaaaatgaaaatgcgaggccccttgttcaggtgatgaagcatttctagacagtgagaggagagcattaagccaagctcaggtcccttctgagtgcatagccccttgtggctgccaggcagcacacccaggaggccggccctgaccacactgttctctgctggttcccgaagctgatgggctctgtcttaggtcttcttactttgaaaggtctcccggcaggctgtggcaagctgcgcggatacacttttctaaacgtctgcatttatttcctaaaagcacaaatggcctggactagctagtgggtgtggaaccgagcccctagttcacagctgtaccccaaggctggagagggggttgccggtggtggcaggagctctgggctcccagttcaggatgggccacagggcgtcaagcagctgtgagcctttaccattgagctcactgcttggaaataaaacccttcctctgggccttgggcatccactgggagcttttctcccctttcctgggaggacagcaagccttttccaaccttctgccttcaaagagaagcagggtcatagaagtgctcagtgtcccttccccagtggctggacacttgctcctccagccttcaccccctggagagaaggggagtctgcggagccagtgcctccctgcccagctgggccacacgatctggtctgcgggtgtctgggaggaacctgcttcggagaggctgcgacctcccagctagactctccccttaggatcccatgtatggggatggtaggagagaaaagatccctctgtgtaagtagcctcaagttctagaagaccatggccccgggaggcagctgaccatgaagctgggcttcctgttgttgctttctttcacgagcttttacttttcctgggctggacgctccaaaatgtttgcagttccatttgctttttgcaagtaggtccccatctccatatacattgagcaataatcctcactatgtttcctgattctgtctgggattatatttgctaagtaaaaatgttgacagaaattgcaaactcatctcacctggatttgattgagtcaccttgaatgacataacaaattatggctttgttttcatgcgtcatgcaatcttccggactacgggaagttctgcaagtgttctccaggggcatttcattaatagcgtgtcagcattagttttaatgaatgaacatttgaggtacattctataaatcaatatccttaaaatgtcatctgctaaacattcactgtgacagaaagtagatattttagcaagatctatgttaatgctacttaattttagacatgcatttaaagcctacatggccaatagcccaagtatctttgaactgtgaaatcaacctcagatctcatctgctgtagccccgcaagccggagtctgtgccctccatgacccttcttatcccttggtggccctgcatagataggggagttggcccctgcccaccccgtgttgtattgccttagctccatcagctttgtaccctcacacgtataggtggtgaacttatgtgtaaatacatgtgtacagatgagaaactgcaacaaaaatgtcctgtggatgataatcagctcagtttccggttttctacattctgtgctgtttccagctaagaaaaaggcgaactcccactatataaagggaaaaggttgtattcatttcatgttcctcatgaaatctctgctgtatgtttatggaatggccatgactaaatgtatatatggtatgtaagaggccatgctgttaaatgttgcataaactaacacagattctgtagtcaaaaatatttaacttgttattgtaaaatgtgatttgtcattgagagattatttttctgtatgtatatgagagtattttaggaatctaatttaagtgcataaaactatagaaaaaaatttaaaacctattccaagagtagaaaatgcttaatgagattacttgggttcaactcaactaaatttcttatattaaaaaaaaattccaagttgtatatgttagaaatcaaatgagtcattttttttcctgcaggaaatatgataaatttcagtgtaatggatggtggcgtgatcaaatgaaaagtatcctgtagctatgacctcgcatgggaccttggtgttgcattaaaaatggatttttgcagatcacatatctgagagggtacttgtgtcaggaaggatgagaggatagggagcctgtttttcatcagatccatgtgccacgcaggcttccttgggttctagtggatttgttagggatctggggctgacgcagctatcccactagagaggccactctctgacttccaggtcgccctttctacttctgtatctggattgattcagtttatccctaattagcgtttgcgttttccatgaaatttcctgatgcatcctcactgtcttcaactgttgcatagccaggtgggtggatggatggtttagggtttctgagttaagccgttttggggcaggcttctggatgcccatgtttccatggagaccccagggggaagatgccttcctcccgtctgcattcccagaaaaggatcagaagtccaggctgcttctggggcacagactttctgtacttggccaccagaagtgccccttaggccacctaaggaggattctgtgaaactcaatgtctaaacccctgagaaaggcattcagaaatgatttcaggagggggcaaccccaggagtccagcctcccctggcagcctggaaatactgcagtaacaaaaagagctggtttctggtgatctgaatgcattgtgtttgggggtgacaccgctggtggaaggttgagggcctgtggtctgaaaagacatctgaagaatgtgttaggttttcaacatttctttgaacaggctgcgtgcatcttaatgctgtcaaccagcaactggagccccttttttgagaggcccgaaccagtaaagctgctgacttcaggagtatgggaagctgtgatttctggaagcttcctggaatctatttaggtgcatgaataatctgcaaatcacttagaggcactgtccatgtggtccataactggctttattcccaaagatggagctgttcagagatttctttgttcaggcgcagccttggaaggccacctaaggcctgccagcagaggagatgagctctggtctaccaaccccaaacaggccctgactctccttccttagaacgatgccctctggctggggtggcaagagggctgtgagtggaaacaagtcagccagtcaactgtcccttgggccttggttgtttcaaaaaagtctggggacaagaaaagctagaacatggggccctcccttcccaggagtgctagcgaaccctcccagatagcctttgcctgtttggaaaagaatgtaatccatcagaacgtgagctccttgtgcttccagtgacaagcgggccacagtgctggtggcatgttgcttccctcacagccctgcccaggggtaggaccaggcccgccccttgatggatgtgctgttgattgtaatatacttctgttgccaaataatggtactgtttaattttccataaaagagagactatattgtctgatatgtaatgttaatggaattctaagaattactagacactattataaattgtagacttacgtatttgtctaaaggtttgatgaagcagggccaaaacattgtttcttcttttttgtttgaaagaagctgaggtttgtttttgctgtttgagtgttcctttggcaacttattatgtgtgaaatgttaaattttaccgattaagatgatggtaactgagacctttctttaaaccagtagcaacatcagtacaaattgctcttcctgtgtatcttgaacctaaaaagaacaatctcttcaaaaacaaaaacaaaaacaaaaaacaactctttggtcattttgacctgtgtggtttaaattcaaatagttcatgaataaaaggagaaaagccaa

SEQ ID NO: 144204 - DNA, 3115 bp, Homo sapiens
  Payload ID: 8498
  Gene Symbol: ITSN1
  Gene Name: intersectin 1 (SH3 domain protein)
  Uniprot ID: Q15811
  ENST ID: ENST00000399338
  CDS Start-End: 20-3082
aggtaaaagtaacagaaccatggctcagtttccaacaccttttggtggcagcctggatatctgggccataactgtagaggaaagagcgaagcatgatcagcagttccatagtttaaagccaatatctggattcattactggtgatcaagctagaaactttttttttcaatctgggttacctcaacctgttttagcacagatatgggcactagctgacatgaataatgatggaagaatggatcaagtggagttttccatagctatgaaacttatcaaactgaagctacaaggatatcagctaccctctgcacttccccctgtcatgaaacagcaaccagttgctatttctagcgcaccagcatttggtatgggaggtatcgccagcatgccaccgcttacagctgttgctccagtgccaatgggatccattccagttgttggaatgtctccaaccctagtatcttctgttcccacagcagctgtgccccccctggctaacggggctccccctgttatacaacctctgcctgcatttgctcatcctgcagccacattgccaaagagttcttcctttagtagatctggtccagggtcacaactaaacactaaattacaaaaggcacagtcatttgatgtggccagtgtcccaccagtggcagagtgggctgttcctcagtcatcaagactgaaatacaggcaattattcaatagtcatgacaaaactatgagtggacacttaacaggtccccaagcaagaactattcttatgcagtcaagtttaccacaggctcagctggcttcaatatggaatctttctgacattgatcaagatggaaaacttacagcagaggaatttatcctggcaatgcacctcattgatgtagctatgtctggccaaccactgccacctgtcctgcctccagaatacattccaccttcttttagaagagttcgatctggcagtggtatatctgtcataagctcaacatctgtagatcagaggctaccagaggaaccagttttagaagatgaacaacaacaattagaaaagaaattacctgtaacgtttgaagataagaagcgggagaactttgaacgtggcaacctggaactggagaaacgaaggcaagctctcctggaacagcagcgcaaggagcaggagcgcctggcccagctggagcgggcggagcaggagaggaaggagcgtgagcgccaggagcaagagcgcaaaagacaactggaactggagaagcaactggaaaagcagcgggagctagaacggcagagagaggaggagaggaggaaagaaattgagaggcgagaggctgcaaaacgggaacttgaaaggcaacgacaacttgagtgggaacggaatcgaaggcaagaactactaaatcaaagaaacaaagaacaagaggacatagttgtactgaaagcaaagaaaaagactttggaatttgaattagaagctctaaatgataaaaagcatcaactagaagggaaacttcaagatatcagatgtcgattgaccacccaaaggcaagaaattgagagcacaaacaaatctagagagttgagaattgccgaaatcacccatctacagcaacaattacaggaatctcagcaaatgcttggaagacttattccagaaaaacagatactcaatgaccaattaaaacaagttcagcagaacagtttgcacagagattcacttgttacacttaaaagagccttagaagcaaaagaactagctcggcagcacctacgagaccaactggatgaagtggagaaagaaactagatcaaaactacaggagattgatattttcaataatcagctgaaggaactaagagaaatacacaataagcaacaactccagaagcaaaagtccatggaggctgaacgactgaaacagaaagaacaagaacgaaagatcatagaattagaaaaacaaaaagaagaagcccaaagacgagctcaggaaagggacaagcagtggctggagcatgtgcagcaggaggacgagcatcagagaccaagaaaactccacgaagaggaaaaactgaaaagggaggagagtgtcaaaaagaaggatggcgaggaaaaaggcaaacaggaagcacaagacaagctgggtcggcttttccatcaacaccaagaaccagctaagccagctgtccaggcaccctggtccactgcagaaaaaggtccacttaccatttctgcacaggaaaatgtaaaagtggtgtattaccgggcactgtacccctttgaatccagaagccatgatgaaatcactatccagccaggagacatagtcatggtggatgaaagccaaactggagaacccggctggcttggaggagaattaaaaggaaagacagggtggttccctgcaaactatgcagagaaaatcccagaaaatgaggttcccgctccagtgaaaccagtgactgattcaacatctgcccctgcccccaaactggccttgcgtgagacccccgcccctttggcagtaacctcttcagagccctccacgacccctaataactgggccgacttcagctccacgtggcccaccagcacgaatgagaaaccagaaacggataactgggatgcatgggcagcccagccctctctcaccgttccaagtgccggccagttaaggcagaggtccgcctttactccagccacggccactggctcctccccgtctcctgtgctaggccagcctgacttcctcctccacccctccatgagactaggccacatgcagccccggattgtgcttctcttcccggaccccctgcagtgttccacctcgaggcttttgcccatgctgcgccctcggcctggagtgcccttcctccgaagccctagctgtcaaagtccttctcatccttcaaggcccatctcagatgctgccccctctgtgaaatttacgctgatgcccccaggcagaattcatccctgttttctctttattcctgcagtgaatagtaggaactcctttttagtatatttcattctgccaggtggtacacttggttgtttttatctctgtcttccccattacttgtgaattacctgctagtaatactgcccatctttatag

SEQ ID NO: 144205 - DNA, 5191 bp, Homo sapiens
  Payload ID: 8498
  Gene Symbol: ITSN1
  Gene Name: intersectin 1 (SH3 domain protein)
  Uniprot ID: Q15811
  ENST ID: ENST00000399349
  CDS Start-End: 249-3683
gaggtagagaagagtggaggcgccaggggagggagcgtagcttggttgctccgtagtacggcggctcgcgaggaagaatcccgagcgggctccgggacggacagagaggcgggcggggatggtgtgcggggctgcggctcctgcgtccctcccagcggcgcgtgagcggcactgatttgtccctggggcggcagcgcggacccgcccggagatgaggcgtcgattagcaaggtaaaagtaacagaaccatggctcagtttccaacaccttttggtggcagcctggatatctgggccataactgtagaggaaagagcgaagcatgatcagcagttccatagtttaaagccaatatctggattcattactggtgatcaagctagaaactttttttttcaatctgggttacctcaacctgttttagcacagatatgggcactagctgacatgaataatgatggaagaatggatcaagtggagttttccatagctatgaaacttatcaaactgaagctacaaggatatcagctaccctctgcacttccccctgtcatgaaacagcaaccagttgctatttctagcgcaccagcatttggtatgggaggtatcgccagcatgccaccgcttacagctgttgctccagtgccaatgggatccattccagttgttggaatgtctccaaccctagtatcttctgttcccacagcagctgtgccccccctggctaacggggctccccctgttatacaacctctgcctgcatttgctcatcctgcagccacattgccaaagagttcttcctttagtagatctggtccagggtcacaactaaacactaaattacaaaaggcacagtcatttgatgtggccagtgtcccaccagtggcagagtgggctgttcctcagtcatcaagactgaaatacaggcaattattcaatagtcatgacaaaactatgagtggacacttaacaggtccccaagcaagaactattcttatgcagtcaagtttaccacaggctcagctggcttcaatatggaatctttctgacattgatcaagatggaaaacttacagcagaggaatttatcctggcaatgcacctcattgatgtagctatgtctggccaaccactgccacctgtcctgcctccagaatacattccaccttcttttagaagagttcgatctggcagtggtatatctgtcataagctcaacatctgtagatcagaggctaccagaggaaccagttttagaagatgaacaacaacaattagaaaagaaattacctgtaacgtttgaagataagaagcgggagaactttgaacgtggcaacctggaactggagaaacgaaggcaagctctcctggaacagcagcgcaaggagcaggagcgcctggcccagctggagcgggcggagcaggagaggaaggagcgtgagcgccaggagcaagagcgcaaaagacaactggaactggagaagcaactggaaaagcagcgggagctagaacggcagagagaggaggagaggaggaaagaaattgagaggcgagaggctgcaaaacgggaacttgaaaggcaacgacaacttgagtgggaacggaatcgaaggcaagaactactaaatcaaagaaacaaagaacaagaggacatagttgtactgaaagcaaagaaaaagactttggaatttgaattagaagctctaaatgataaaaagcatcaactagaagggaaacttcaagatatcagatgtcgattgaccacccaaaggcaagaaattgagagcacaaacaaatctagagagttgagaattgccgaaatcacccatctacagcaacaattacaggaatctcagcaaatgcttggaagacttattccagaaaaacagatactcaatgaccaattaaaacaagttcagcagaacagtttgcacagagattcacttgttacacttaaaagagccttagaagcaaaagaactagctcggcagcacctacgagaccaactggatgaagtggagaaagaaactagatcaaaactacaggagattgatattttcaataatcagctgaaggaactaagagaaatacacaataagcaacaactccagaagcaaaagtccatggaggctgaacgactgaaacagaaagaacaagaacgaaagatcatagaattagaaaaacaaaaagaagaagcccaaagacgagctcaggaaagggacaagcagtggctggagcatgtgcagcaggaggacgagcatcagagaccaagaaaactccacgaagaggaaaaactgaaaagggaggagagtgtcaaaaagaaggatggcgaggaaaaaggcaaacaggaagcacaagacaagctgggtcggcttttccatcaacaccaagaaccagctaagccagctgtccaggcaccctggtccactgcagaaaaaggtccacttaccatttctgcacaggaaaatgtaaaagtggtgtattaccgggcactgtacccctttgaatccagaagccatgatgaaatcactatccagccaggagacatagtcatggtggatgaaagccaaactggagaacccggctggcttggaggagaattaaaaggaaagacagggtggttccctgcaaactatgcagagaaaatcccagaaaatgaggttcccgctccagtgaaaccagtgactgattcaacatctgcccctgcccccaaactggccttgcgtgagacccccgcccctttggcagtaacctcttcagagccctccacgacccctaataactgggccgacttcagctccacgtggcccaccagcacgaatgagaaaccagaaacggataactgggatgcatgggcagcccagccctctctcaccgttccaagtgccggccagttaaggcagaggtccgcctttactccagccacggccactggctcctccccgtctcctgtgctaggccagggtgaaaaggtggaggggctacaagctcaagccctatatccttggagagccaaaaaagacaaccacttaaattttaacaaaaatgatgtcatcaccgtcctggaacagcaagacatgtggtggtttggagaagttcaaggtcagaagggttggttccccaagtcttacgtgaaactcatttcagggcccataaggaagtctacaagcatggattctggttcttcagagagtcctgctagtctaaagcgagtagcctctccagcagccaagccggtcgtttcgggagaagaaattgcccaggttattgcctcatacaccgccaccggccccgagcagctcactctcgcccctggtcagctgattttgatccgaaaaaagaacccaggtggatggtgggaaggagagctgcaagcacgtgggaaaaagcgccagataggctggttcccagctaattatgtaaagcttctaagccctgggacgagcaaaatcactccaacagagccacctaagtcaacagcattagcggcagtgtgccaggtgattgggatgtacgactacaccgcgcagaatgacgatgagctggccttcaacaagggccagatcatcaacgtcctcaacaaggaggaccctgactggtggaaaggagaagtcaatggacaagtggggctcttcccatccaattatgtgaagctgaccacagacatggacccaagccagcaatgaatcatatgttgtccatccccccctcaggcttgaaagtcctcaaagagacccactatcccatatcactgcccagagggatgatgggagatgcagccttgatcatgtgacttccagcatgatcacctactgccttctgagtagaagaactcactgcagagcagtttacctcattttaccttagttgcatgtgatcgcaatgtttgagttattacttgcagagataggagcaaaaattacaaaaacacacagggtagtgggtccttttgtggctttcctagttactcaaattgactttcccccacctttgcacaggtgctttcaatagttttaaaattatttttaaatatatattttagctttttaataaacaaaataaataaatgacttctttgctattttggttttgcaaaaagacccactatcaaggaatgctgcatgtgctattaaaaattgttccaaatgtccataaatctgagacttgatgtattttttcattttgtccagtgttaccaactaaattgtgcagtttggggcttttcccccttaccatagaagtgcagaggagttcagtatctctgttttaaagacgtatagaatgagcccaattaaagcgaaggtgtttgtgcttgtttgtgtgtatcagctgtaccttgttgagcatgtaatacatcctgtacataagaaattagttctttccatggcaaagctattaccttgtacgatgctctaatcatattgcatttaattttattttgcacagtgaccttgtagccacatgagaaagcactctgtgtttttgttcggtctcagatttatctggttgagttggtgttttgtttggggtttttaattttgcgtgtttgcatagcataaaatcagtagacaacaccactgaggtcgttacgatcaacgatatccacagtctctttttagtctctgttacatgaagttttattccagttacttttcatggaatgacctattttgaacaagtaattttcttgacaagaaagaatgtatagaagtctccctgcaattaatttccaatgtttacattttttaactagactgtggaatttctacagattaatatgaaatggagctcatggtccgtttgtgtgttagatatgctgtagctgaagccctgtttgtcttttaaacactagttggaagctctcaataaaaatgcctgctgctcacagcacagaaaatggggcagggggagcctcaagcacaatctagctgtcctcctaaagactctgtaatgctcactcccctcgcgttctcccggcgctgtcgggaggctgtgctggtggtcgtgtagaggtccttctcctttcacatggtgcagagagcgaggacctctcctcctcgttcagttgcacttcagtattttcacggatatgaatgtaaaatatataaatatataaacctgcggctttaacaactgtaatacaaccttttgaattagttccgtgtatagataattaaattcttcatacaaaagt

SEQ ID NO: 144206 - DNA, 5408 bp, Homo sapiens
  Payload ID: 8498
  Gene Symbol: ITSN1
  Gene Name: intersectin 1 (SH3 domain protein)
  Uniprot ID: Q15811
  ENST ID: ENST00000399352
  CDS Start-End: 251-3898
aggaggtagagaagagtggaggcgccaggggagggagcgtagcttggttgctccgtagtacggcggctcgcgaggaagaatcccgagcgggctccgggacggacagagaggcgggcggggatggtgtgcggggctgcggctcctgcgtccctcccagcggcgcgtgagcggcactgatttgtccctggggcggcagcgcggacccgcccggagatgaggcgtcgattagcaaggtaaaagtaacagaaccatggctcagtttccaacaccttttggtggcagcctggatatctgggccataactgtagaggaaagagcgaagcatgatcagcagttccatagtttaaagccaatatctggattcattactggtgatcaagctagaaactttttttttcaatctgggttacctcaacctgttttagcacagatatgggcactagctgacatgaataatgatggaagaatggatcaagtggagttttccatagctatgaaacttatcaaactgaagctacaaggatatcagctaccctctgcacttccccctgtcatgaaacagcaaccagttgctatttctagcgcaccagcatttggtatgggaggtatcgccagcatgccaccgcttacagctgttgctccagtgccaatgggatccattccagttgttggaatgtctccaaccctagtatcttctgttcccacagcagctgtgccccccctggctaacggggctccccctgttatacaacctctgcctgcatttgctcatcctgcagccacattgccaaagagttcttcctttagtagatctggtccagggtcacaactaaacactaaattacaaaaggcacagtcatttgatgtggccagtgtcccaccagtggcagagtgggctgttcctcagtcatcaagactgaaatacaggcaattattcaatagtcatgacaaaactatgagtggacacttaacaggtccccaagcaagaactattcttatgcagtcaagtttaccacaggctcagctggcttcaatatggaatctttctgacattgatcaagatggaaaacttacagcagaggaatttatcctggcaatgcacctcattgatgtagctatgtctggccaaccactgccacctgtcctgcctccagaatacattccaccttcttttagaagagttcgatctggcagtggtatatctgtcataagctcaacatctgtagatcagaggctaccagaggaaccagttttagaagatgaacaacaacaattagaaaagaaattacctgtaacgtttgaagataagaagcgggagaactttgaacgtggcaacctggaactggagaaacgaaggcaagctctcctggaacagcagcgcaaggagcaggagcgcctggcccagctggagcgggcggagcaggagaggaaggagcgtgagcgccaggagcaagagcgcaaaagacaactggaactggagaagcaactggaaaagcagcgggagctagaacggcagagagaggaggagaggaggaaagaaattgagaggcgagaggctgcaaaacgggaacttgaaaggcaacgacaacttgagtgggaacggaatcgaaggcaagaactactaaatcaaagaaacaaagaacaagaggacatagttgtactgaaagcaaagaaaaagactttggaatttgaattagaagctctaaatgataaaaagcatcaactagaagggaaacttcaagatatcagatgtcgattgaccacccaaaggcaagaaattgagagcacaaacaaatctagagagttgagaattgccgaaatcacccatctacagcaacaattacaggaatctcagcaaatgcttggaagacttattccagaaaaacagatactcaatgaccaattaaaacaagttcagcagaacagtttgcacagagattcacttgttacacttaaaagagccttagaagcaaaagaactagctcggcagcacctacgagaccaactggatgaagtggagaaagaaactagatcaaaactacaggagattgatattttcaataatcagctgaaggaactaagagaaatacacaataagcaacaactccagaagcaaaagtccatggaggctgaacgactgaaacagaaagaacaagaacgaaagatcatagaattagaaaaacaaaaagaagaagcccaaagacgagctcaggaaagggacaagcagtggctggagcatgtgcagcaggaggacgagcatcagagaccaagaaaactccacgaagaggaaaaactgaaaagggaggagagtgtcaaaaagaaggatggcgaggaaaaaggcaaacaggaagcacaagacaagctgggtcggcttttccatcaacaccaagaaccagctaagccagctgtccaggcaccctggtccactgcagaaaaaggtccacttaccatttctgcacaggaaaatgtaaaagtggtgtattaccgggcactgtacccctttgaatccagaagccatgatgaaatcactatccagccaggagacatagtcatggtggatgaaagccaaactggagaacccggctggcttggaggagaattaaaaggaaagacagggtggttccctgcaaactatgcagagaaaatcccagaaaatgaggttcccgctccagtgaaaccagtgactgattcaacatctgcccctgcccccaaactggccttgcgtgagacccccgcccctttggcagtaacctcttcagagccctccacgacccctaataactgggccgacttcagctccacgtggcccaccagcacgaatgagaaaccagaaacggataactgggatgcatgggcagcccagccctctctcaccgttccaagtgccggccagttaaggcagaggtccgcctttactccagccacggccactggctcctccccgtctcctgtgctaggccagggtgaaaaggtggaggggctacaagctcaagccctatatccttggagagccaaaaaagacaaccacttaaattttaacaaaaatgatgtcatcaccgtcctggaacagcaagacatgtggtggtttggagaagttcaaggtcagaagggttggttccccaagtcttacgtgaaactcatttcagggcccataaggaagtctacaagcatggattctggttcttcagagagtcctgctagtctaaagcgagtagcctctccagcagccaagccggtcgtttcgggagaagaatttattgccatgtacacttacgagagttctgagcaaggagatttaacctttcagcaaggggatgtgattttggttaccaagaaagatggtgactggtggacaggaacagtgggcgacaaggccggagtcttcccttctaactatgtgaggcttaaagattcagagggctctggaactgctgggaaaacagggagtttaggaaaaaaacctgaaattgcccaggttattgcctcatacaccgccaccggccccgagcagctcactctcgcccctggtcagctgattttgatccgaaaaaagaacccaggtggatggtgggaaggagagctgcaagcacgtgggaaaaagcgccagataggctggttcccagctaattatgtaaagcttctaagccctgggacgagcaaaatcactccaacagagccacctaagtcaacagcattagcggcagtgtgccaggtgattgggatgtacgactacaccgcgcagaatgacgatgagctggccttcaacaagggccagatcatcaacgtcctcaacaaggaggaccctgactggtggaaaggagaagtcaatggacaagtggggctcttcccatccaattatgtgaagctgaccacagacatggacccaagccagcaatgaatcatatgttgtccatccccccctcaggcttgaaagtcctcaaagagacccactatcccatatcactgcccagagggatgatgggagatgcagccttgatcatgtgacttccagcatgatcacctactgccttctgagtagaagaactcactgcagagcagtttacctcattttaccttagttgcatgtgatcgcaatgtttgagttattacttgcagagataggagcaaaaattacaaaaacacacagggtagtgggtccttttgtggctttcctagttactcaaattgactttcccccacctttgcacaggtgctttcaatagttttaaaattatttttaaatatatattttagctttttaataaacaaaataaataaatgacttctttgctattttggttttgcaaaaagacccactatcaaggaatgctgcatgtgctattaaaaattgttccaaatgtccataaatctgagacttgatgtattttttcattttgtccagtgttaccaactaaattgtgcagtttggggcttttcccccttaccatagaagtgcagaggagttcagtatctctgttttaaagacgtatagaatgagcccaattaaagcgaaggtgtttgtgcttgtttgtgtgtatcagctgtaccttgttgagcatgtaatacatcctgtacataagaaattagttctttccatggcaaagctattaccttgtacgatgctctaatcatattgcatttaattttattttgcacagtgaccttgtagccacatgagaaagcactctgtgtttttgttcggtctcagatttatctggttgagttggtgttttgtttggggtttttaattttgcgtgtttgcatagcataaaatcagtagacaacaccactgaggtcgttacgatcaacgatatccacagtctctttttagtctctgttacatgaagttttattccagttacttttcatggaatgacctattttgaacaagtaattttcttgacaagaaagaatgtatagaagtctccctgcaattaatttccaatgtttacattttttaactagactgtggaatttctacagattaatatgaaatggagctcatggtccgtttgtgtgttagatatgctgtagctgaagccctgtttgtcttttaaacactagttggaagctctcaataaaaatgcctgctgctcacagcacagaaaatggggcagggggagcctcaagcacaatctagctgtcctcctaaagactctgtaatgctcactcccctcgcgttctcccggcgctgtcgggaggctgtgctggtggtcgtgtagaggtccttctcctttcacatggtgcagagagcgaggacctctcctcctcgttcagttgcacttcagtattttcacggatatgaatgtaaaatatataaatatataaacctgcggctttaacaactgtaatacaaccttttgaattagttccgtgtatagataattaaattcttcatacaaaagtta
